United States Patent Application Publication US 2007/0054278 A1 - sequence listing, part 41

SEQ ID NO: 94502 - DNA, 305608 bp, Homo sapiens
  misc_feature (1)...(305608): n = A,T,C or G
gtaagataatgggaaacttgaaaataattattaccctcaagttcttgttttttcggagcaaactgtgaagatcatattaaattccacacttacttattcttggctagtaaactttccattagcctatacatgtgattttagatgctgaggagaccatggactggccaagatgatataggctaaactgaaattcaaataaaatatgagtgtcaaagtactcttcttacttcaaattcaaatgaactttaaaatcatcaaaacaaattttaaaatatagctacaacttattttttttttactggcaagttctaatgagtccatgtgtagaatttagtctctctaaagtcttacacagtcaaattttatacattaattgatttattcctaaagtttgggataatgttagacaagttaacatatatataataaattctttgattatgtagacatgacgttctacagaccttttacctatacaaaagtagtgttggtgagcccaaaaagtataaaggtaagcaatcaaatcgggcttaaaatcactctaatgataacacagcccagggaattggtcttagtttttaaattttactttattttcattttggtcaatgaaatctgctccatccccatgtataggataagtcacaaaatcttaggtgaaaatcaactctaattctactagaatagtattttctcaaggagcagtccaaagacatgagtgtttggagctccttcagggtgtctataaactttttttttagtattcataagtttatatcacacattttttcccatgttgtaaataaattaaaatcattaatgaaaaattaattggtttcattaaaaacaccatttcagacccagagacaagaaaaacaaagaggtttagtggtctgtagggctaaattttccataaatacacttggttttcatgctaggaatgataaattcctcttcaaaatgtttaattgtgtgatgttcttattctttgttcagaagcccaagctccttgtactctcgtttccagcctgcaaacaaccctcccactcttgttgtgccctgacatggccaaacatgtccagacatgccttatactatagtggacagaccactcctaacccctccttttacaaatcgtgcatttaccctatttggaaaattttaagtcttagccaactggaatcagttttgattgtgtggtccaaccctagccaataagggaaggacacagggacaggaactgcattagggttaaaaatcccttccttcctttgttcggtgtgctcttgcgatcaggcgcagcacccttctgcagaagtaaatgtgccctgctgagaaattttctgtctaagtgctagtttttctttgcagcaacaagcacttgtttctaacaataataacattatttattaagtttatcaattagagtaggtatacatgagatgtttttaaaaaatctattttcatactttcaaacaattaaatttcttactaaccttcacaagtggaatctgttcaataggtacattttcaactggaacataacatgtatagcagtagaacattctggaaccaccacatttgagacattttgatctcccactttgctgagctttttgaagaacttcttgagatgctaaacataagttttgaaggggatcttctgaagctatggaagtagtttgtgactgttttgtttccacaaattttgaactattttcttyacttcgtttgagaaatataggtggattgagagacattcttcattcaaaccaaagtttaayggctatttctaaaacacatatcataggtgcactgtaaaaaaaaagtatcaagagaaggaaaaataaaaacagaaaacattttactcagtctacaaagaaaattactcaatttaagtcacaattgtgtgctgttttagtacttattaaacatgttttaaaccaccaaattggcacactttaaaacataagattaaaagcaataaactgaaagttatttcaaatataaagttcaggtactgagaatccatttttcaagaacccttttttgttccagagatggcagttttgttttccagatattaggaatgcaatggtttcacgttagcatcagacagggatatattcaaccctgttggctctgactttgaattgacattaatgaaaaatagaagattctagtggaattggcaaaatttagttggttatgttctaaaagatataaccctctccaacttaaacacacactacatatgtgtgagtgtgtctgtgtacatgtgtgcatatacatataaaacttcatatccaataaaaaataagaggcatctactactcattacaatttgtaaaatatcccataaggtaaaatatattatcctataaattttaaaaatttacagagtaacattaatgtccacttactctaagaatttatgttttttaaaaacatacatcattcagattctttagtactagagaaaaatggtaaaataactttcccacttaatattttcttcaaagaagggtgatggctgccaaaattgctatctgtataccctgtaaggaagatatctttcaagggagaaacaacactggtgccctattgattcgatatgcattccacagctgtaaaataattctcttattataaagccttctggcattgtggtttaactacgaagctccaggcactttaagtagaaacagcgacaagagaaatgctgtgactccagcaggaaacattttgtggtctcccaaacagaaagtgaacaaaaagtccagagaaacataaaatacaacataatttgctgagaagaagttagtggcactaatttaattactcatcaaatgaatttttctttttctttttttttttaagattgtaagtcccagtgagtttgagatacaaataaagagatacaaaaacgccggttatagtagaaaaaggcacttgccaaatgtacccaaggggaaaaacaaaatacagtaaatatttttgctgtgtactgattacgcacagatttgcattttgggtaagaaagcagtatttaagaacaatggtccaatcccttgttcctgcctcacaaatagaaaatcttacctacttctgactgccactccaactcacctgcctaaaaatggctttgatctttgtgatcatgccctcaatgactgaaagtgcaggatattaagatgccctcttttcttgagcctcagattcttttaggaatcacatgaaaatattaaaccgcatccctagaaaatgcatatacagacacaatattttgcacacaatttcaggaggtttggagatctcctagagtccatctacgacccaggtaaggaagttccaagcttgggaagggccacgcatggtggctcatgcctataatactagcatttgggaggttaaggtgggaggattacttgagcacaagagtttgagaacagtctggacaacaaagtgagatcccatctctaaaacagagaaaaaaaaaaagcttgggaagagatcctaatagtccccagaaatgagagttgcaaatgctctgttggcgtctctttgctgcacatacgaagctaagtttcacctaaactctctttgggtttgtcctggtgttgcctgaggttcttacagagaaacattttgaggctttaatagtcctgagttattcagatgatgggattcatcctaaaaaatgaaatttgattggagtagctcaacctgacttcatttccctgggtaatggagtagctatttagtgggaatgcatgtaccactcaaaggcccaggcatagtgggactgaaaaatgtagttcctgtggatgtcatgaaagttactgtggttgcctgacatttaacagaaaactactggtgagtttttggagttatcctagggcactgaaagtgcattcctcctagagatacctcagaaatatcactttgcagttcatggacctgctatccacataactaaatggatattagtgaagctttatataaataaccttcctctagaaaaatcaaccaccacaaatacctgtaagacagtaaaagagaaatgtttatggctccacctcttagttcacctatatactctcacttatggctgaggtggccacgtagaagaggccagcaattgtaaatcatgggcagctccctccagtggtctctgaaactacatgatcagggcatctgtcctaaccgagccaacagcctgcctcgactgtgagaaaatcattgcaaatgattttattgcaaatggggttatttaaaatttttaaaacatacttgttaacatcaaatatgtgcaaggaagtacaatttgagtcatgggggctaaaaagacttagaaaacataaagactgttcctaaggaactaacaattttaacaccttgatggtgcgtccatcattctggaacttaaggctaaaaatacattaattttttattcctccttctacccaatttccaccccaaattaattatactcaccaagttgcatctaccttgtatataatcctctatcttcactctcaaagtcaggattctaattcagttccttattaactcatagatgggccacagcaatgtcttaaacctctttgagtacttattattagttccacatatttgacatggaaaaatgcatttattgtggaggtactttagtgaatctatcccctccagcattcaactctgtaagagcagattccttccctgatctcacctattcctgattcttatgcaacagcaggaactcaacaaacacttgttaactaaatcaaaaccattctgcaaaacacatccagtaagcatctcactactgaagtatctgacaaactacctttatgggccgtctgcagcctagcacaagtggcaggctggcaatttttttttctccaaaataataacaaaaagcttctacctcttccattattgtaagctgactcacctcccaatggaacactatacagactcccctgtcctatattgtggaccaattcagtattagaaaaaaaccacttccaattttctttagagtgtttttaagaacttggtcacataggacctacaggtccaacattcatttttcataatccaaggtagtagtaccctttttcatataggatcaatggcctctcccacaccacccgccatatggtaacaaactgtcttgccttcgttttcatggtgcactgggttagtccttacatgctgcgatctacagtattgattttaccatccaactttgtgggcctggcgactgaaaatgttaatatacttccttatttgtcctacattcccaataaataatttagacgtaagaaacaggctcttttgcttattatgtaaccacaacctcaatattttaaatacactgcatggcatcactaattctacgtctgtactacgcttccccttccgtgataaccaaacccccacaaaccactccaaatactaaaaataaaataaaataaagtatggggttcctagggaactgactttgccaggacatacttttcgttggggcggaatgcaccgaaaatcattggtaggaaaaataattttttttttgaggaaaaatttggaaacctttttcccaaagggcccgcaagatcctaaaaaaagcaagagaccgcgcagaaaccgaggatccccctcacaggcgacacccagcgcgacctccgctagggtcctgacaaagaatgtccacttcccgcggccgcacctctggggccagaccactggtctccagagaggcgcggggacctccaccagggatcggagtggtactcagacctgcacacccgcgagtcctcgaacagctccacacgtctccagctccgcccgagcccgagccacgcgccgggccgtgatcgcgcacggaccagacggagcgctttccgggagacaccagagggaggagccaggcagttactagcgtcgttgctaaggcaggggccgcgcacaccgcacaccgcgcggcttaagcaacaggctgggacgacagcggggggggggttagacgggaagttccgcctcagcctctcaatcagcggcggtgtcgcacttctcccgagaggctccggcgaggggcagggccgcgttcgtccgggacccgcctcaagcctcgcagcctttcacccagtttcctcccgattcttgctgggacaacaaaattgggaagcggttctcgaaacatactgtcaaggcgtagttgcagtgagttgtgaagaaatgttgatcccagagaaaagtttgcattttgcccacctcaaagatattttgattgtgagaacttggttacattagtctttcgtggctatatcaatatcattatttcgtgtgctgtgtggtaatgaaagctattagaaaaatcatttgtatcttaatgatttagtttgcataaaaacacgcatatagagttaagagtactttgtgtttttccactttgaagtataatatgtggataagttattagaacatttgtccgtgcctctccccaaacaatgcgcaaacggaagtgcactctaacaactaagattttaaaacacaatggtcaaatgttgagcaatgttttattgactactctgaatttatcaagtggtagataaaggacattacaatgccctagaagtgctcacgatatcaagtaaagcatgttaaattcaagtacagaaaatgcartattcttactactgagataaaaaatggaatttaataaattacaggaatttcaagaaagctgagaatggagtggtcaataaaggcttctttttcggacttgggtaaggccttgaagaatgatttaggtttaggacagtgtttttcaactggaaaggggattgtgtgggacccattagtggaggtcttgacccatttgtaagcaaggaaatctctttaaacttaaaaaaaagaaacaatatagattggaaatatcagcgcatgtaagtaaatttagtgttagttagtaaagtactgctttatggagcttttaattgtatatatgcgtgtatgtgtgcactagggcttgtttgtaaaatgtatttcttactgtatttcaaaccttamaaagtttgaaagccagtgatttagggagaaaggtgaattttctgggtagggaaagtagaatagcaaagtctataagccaagaagaattcacaaccattttcctttttagtttaactctaaattttatcaaagtagttaaattgcacagattaaaaagcaaataatactacttgttagattgagcattgggttgctatcgtatgtaataaattactccaaaatatggtggcttaaaacaaccattttattatgttcacaggtggtgttgtcaatagggcatagtcatcagcttttctttggtaactcaattagaaagactagagtgggcatgctagcagagcttctgtaactatatggccggggtttcctcacagtatggcagcaaggtagtcagacttcttagcttaaactcagagctccaaagggagtgttgcaatgaacaaggcaaaaattgcctgaccttttctgaccttgcctcaaaaagtaacgcggtgctacttcccccactttcttttgcttacaaatgtgtcaaagtcctgttccattttaggaaaggagacatagatccctcttctcaaaggattggcaaagatttcttgtccatgttttaaaaccagcatagtgaatttacttctgtaacagaaaaccccaaaatatcggtggtttaatacacttttttttttcctcacaaaagatccattgtggctatttctaggcagacgaaatgttaaattcaaggccagatgtttttatttttaatggttctgctgccttctaggactagcttgtttgacaagaaagaaagtatggcaaattacccaaggttaactctaaaaatgacatgtatcaatttggccacattctgttggccagaatttagtcccaaggcccccactttaactgccggggatcctgagaaatgtagagaaacacacacatattggtgagcactaacagtttgccacattctaggttaaagaaaaccctgtagtacccaacccttctactctattctcaattcttctcaccaaaggaaaattcaagtcttttaaatatttcatctgttacccccatgtctaaatatacttacattgcagtttcttgattttccaatttcagacattacccactgactttctcctgtggaaggcagtgataaaggtcttttgtaacaacaccacctccaagtgtgtgaacattccctctctacctcatacactcttcttgtcccttcacctgtcaatagtgatatcataggctttggctaaatcaacatttagtgttatcactactgtctaggtaaatgtcattcaaccccaaggcacatagtatactaagatcgcattaacttttaatacaactttttactttcctttctcttaactgccatttttaatgtattatttatctgttctcaaacactggcaaactgctaaagcatcacagtgaaatacatcagttaatccagtagattttttttccttacagatactcttcctacagcgttacagcctttagtttatttaggattgctggtttctccaacataatactgctctcctgtgtgttagatcccttgtttcctttttctttgtttaatccctttttaaaaatgaactacattctctaataccttcttggaaaaaggtaaataggagtgtagtagatagaataatggcccccaaagatgtctatatccttacctccagaacctgttgatattttatatggcaaaaggaactgcatatgtgattaaggagatgggctaaattaccctggattgtctgggtggctggacataatcaaagagttcttatgagaggaagacaagatgtcaagagaggggagaagactctacactgctggctttgaagatagagggaggagctctgagcaaaggatagcaggtgactgctagaagccccttttctcacaaaaagatcttctgggagaaaaaattatgtgtattaagccattgatattttgtgttttttttgttacacaagtaaatttactatgctgggcgacaagagtgaaactctgtcacacacacacacacacacacacacacamaaaacatgaaaggagcatagccctgcagacccatttcagattcccgacctctagacctgtgaaataataaactttgtgattttttaagccactttgttagctgtttgttacagcagcaataagaaactaatatgagatgaatttttttttagtatcttgcaaatctgaaaaatgccacacatttaattgatgctctgtttatatttaaatttacagattgaaagtcattttctggcataatcctctaaattattgtttttttatcctctgattcttgtttactttaacatttttgttctagtttctagaagatttcttcagctatttttcactagactgttgttgaataatttatatcatatttgtactttgcattttttcttattctgtattcatttataacatgcagttttggtttcagggatgcattatcttattatagctctctatgagtcttaaagacttttttgaagtttccttctgttccccacattgtctgtatatgcctagattttatttttagtcacttgtttggatttccattttttaaaaatattttttatttcacaattagtccataaataataatctttagctttctatccattttgaaatacaaggattaaaatggtgatagaaagcctcatggtgtctcaacaggaattgtcaagcattcagcttcatagtagagcaaggtttatcattggaagtttctcaaacatttaaagaagaaaagggactaataargataagaataaatcaatgaaattaaaaacaaatgtgcactaaagaaaagcaacaaggccaaaactggttctttgcaaagattaataaaattgataagcctttagatagactgaccaagataaagaaaagtacaaatttcagaaatgaaaaatgaaacatcaccacagacactacagattgcaaagataataggaggatattaagaataaatatttatatcaaaatacttgacatttcaatttttcttgaaagataatttaccaaaattaagaagtaatagaatagctgaatgatcctatattaattttgatagcttatatctgtattagtctacctaggatgctgtaatagaataccacagagtagatgacttaaacaacagtagtttattttctcacagttttaaaggccagaagtccaagaccaaggtgccatcagtgtgagtttctagtgaggcctctcttcctggcttgtagaccactgccttctcaccatgtccttacaaagcctcttctcttatatagacagagcatcagttaagtgtgtggcatttttcacatctgcaaaatgctaaaaaaaaaaatcactctttctcctcatattagtttcttattgctgctgtaacaaacagccaacaagcaaagtggcttaaaacaacacaaagtttattatttcatagttctagatattttcacagataaaatatctgtgtgtatatggagagagagtataagcaagcaagctctctggtgtctgttctcataatgacaccaatcatattagagccccactcttttagtctcttttaaccttaattgtctcctcaaaggctccatctgcaaataaagtcacatcttgttataagtgttagggcttgaacatatgaatttggggtgggggcatgattaggtccataacagtatccttaatttaaaactcccccataatttcaggttcaggttcagggaacataactagcagtgtccaccaaacatttaaggaagaaaggaagaaatagtactgatctttcagattttaaattctttcagataatagaaaaaaatagaggcatttcccaactcattttttttgagaccataatagccttaattccaaatcttcacattataagatagaaaaattcaggccaatctttcttataaacattataatagcttatattattagccttcccttgtccatttcttgttatatgcatgtcgtttgtcatgtgacgtagtagaacctccagcttcatgagcagaatatattttccagcccttcctcccctgctgcgttagtccgttctcacattgctataaagaactaccagagactgggtaattttaaagaaaagaagtttaattgactcacagttccacaggctgtacaggaagcatggctggggaggcctcaggaaacttacaatcatggcagaaggtgaaggggaagcagatgcgtcctacatggctggagcaggaggaaaagggtgaagggggaggtgctacacacttttaaacaaccagatctcatgagaagtctatcacaaaacagcactagggggatgttgcaaaatcattagaaaccacccccatgatccaatcacctcccaccaggccccacctccaacactggggattccaacagttcaacatgagatttgagtggagatacagagccaaactatctgacttggtaaaagtcagaagtgaggtttgtgggtgaggggaaagggattgtttggctgagtcatttatttttgcatttgggtgtctttcataccccagtttggtcgcccaactcacattgaagcytaagacccagctgatttctcttcatttctgcaaagttactgtaccatggcaggccaacgaacatgtcaaaggaggagcagcagagctggccccggggtaaggaagcttccacagctttatgttcacttacaaaggttatatttctcttggaatttcaggtaatcagggctcccaggtagagctggctttgtcactgaaacaccaagggtttggtctaggtcttaatgctcgctgcacagatggccaatcactgagatgagtattgccaaggaagaaagctttaatagggtgctgcagccgaggagatgggagatcagtctcaaatccatctccctgactgactaaaattagggttttatatagcaaggaagaaatgtaaccatgtgtgggaaaacagaaattagggagtggtggtaagaaggaggagttggttaacaggaaayaggtagtcagttaggcaatcatgatgggtgatggtgaggagtctagaggctaattgtcaagatatagtgatttggtatgttttagttccttgacactatctgggaggcctgatggttagttttctgggaaaggaactcagataagaccaatgtaactttctcaagttttaagactagaaggattaatttctatatttatttaaagaaaccataaacattagttctatgggacagttaggcttgtttttagcttcatgggtttacaacttctgcagttgcacagggccttatgctgagaagtacatgcatttggtttaatgctctgatgttattatcttcaaactcaataattttgaacaaggaactctgaatgtttacaagttatttaactggtcctgcctcctggcattcaccacttttcactaaccccatagaaaaatatgattttttttttgtccaagtttgtcttattattatcatggaagtgtaggtgttttatatccttctacatcctaccaaaagtagaaatctgtttaatttataccttaccttattttaattttaccccaaaagaaacatggaatttttgaaattagttagaacttcactatgcaagtttcactttcttcacttttctaattccctttaatttaaatgtgcatattatttttggtgctttgtacttggagtggtttgacagccattacaagaaaaaaaagtcaatgcttaaattgttttcattaagtttgattctgtatatttgtaaatgtattgtgagttccttctagccaaattgctatacccatgaagctagagatattatatcgtgagtatttttctgtctgtaagccttttgcatgcaccatctctcatatctctcattcttttcaatttgactagctctagagttccctgtttcccataacatgttcttcacatctctatgcatctttgcttctgtctaaacatttgctttccttttttaaatttttatttttaatttttaagggtacatcataagtatatatatatttatggcatacatgagataatttttgatacatacaatatataataattatatcagagtaagtggggtatccatcatttcaagcatttatcacttatttatgttgtagacattccaattatactcttttatttattttaaaatgtgcagtaaattattgttgactatagttagccagttgtgctatcgaatattagatcttattcattctctctagctgtttttatttgtccgtttgttttttagagagagtctcgctctgtcacccaggctggagtgtagtggcacaatcttggctcaccgcaacctccgcctctggggttcaagcgattctctcacctcagcctctcgagtagctgggacacctggctaatttttttgtatttttataagagactggggttttaccgtgttggccaggctggtctctygtactgttgacctcaagcaatccacctgccttggcctcccaaagtgctgggattacaggcgtgagccaccatgcctggccactctgttttgttttgtttygttttacctttttttaaaattttttatggmgattggctcttgctgtgttgcccaacctggtctcaaactcctgggctcaagcagtcctcctgtcttggcctcccaaagtgtgctggtattataggcatgagccactgtgcttgaccctaacctatatttttgtacccattgactatacccactttcccctcacttcccactacccttctcggcctctggcaaccatcattctatctctatctccatgagttcaattgtttaattttttgactctcactaaatactcattttctataatggttgtcacatacactctttatcttcttcttgtattatcagttatatattttcttatattcatcatatatttagatgaatgaaatatcccccaattcaaatatgtaattattttttagcatttttttctaaaacatgaacttgtgattctgtaatcttgaccactttatatattgatatgaaatatgtgttttaataaataaaaatgtagtacaatcttttcagtgatatcatcatggatattaggatattagacttctgaattcctcttatttttgccttctcactggattttcattctctagaagtatttttattatttttcaagtacctatatatttctgacattcatctactcatttatgctttaatttatgcacactgcgagtacttattatgcattgactatgaaccagccactgtgtgaaatttagaaaattcagccatgattcacatatacaccatggaatactatgcagccataaaaaatgatgagttcatgtcctttgtagggacatggatgaaggtagaaaccatcattctcagcaaactatcgcaaggacaaaaaacaaacaccgcatgttctcactcataggtgggaattgaacaatgagaacacatggacacaggaaggggaacatcacacactggggcctgttgtggggtggggacaggtgggagggatagcattaggagatatacctaatgttaaatgacgagttaatgggtgcagcacaccaacatggcacatgtatacatatgtaacagacctgcacgttgtacacatgtaccctaaaacttaaagtataataaaaaaaaatagcctctccaaggaattggccggctacaaaataaacataccaaattaaaaaaaaaaaaaaagaaaattcagccatgattgcaccatagtttctatcctcatagagataatctgctgtatgttaccacggagaaaactttgggggataagaaaggcttgatggacaaagtgacttttaatttgttatttgaagtaagagttaaataggccaagaaaggattgaaagagggtttgggaaagggagacttctgggcagaaggaagaatgtaggcaaagtctctaaggcgaaaaggagaaagttgtggtctggattaaaattagtttgtgtaatgttgaatacattttgaaatcacaaagaaactactaaaaaatgtgatttttatctattagactgaaatatccaaacatttaaatttattttaactatgtaactagttaactttttaaaatactttatcagcaagaacatattatatttttggctctggatttattatagaggctatccatgatagcccaaaatatcttggaactcttttaggaatctgaaatgaggacctaaagcaagattcatgtggagtttttctctagggctagtgtataagagggaagcctattacaaaatttggtttggaggctaagaacttaaacatttatgtgtgtcccttttcaaagtggagggatggtataaagtgagcattttatgatatcttaccgctctgaaaatgataaatagagtatcattttatttaagtaaattatttgtaaatattatgaacagtctagtgagtttatgccaatgaacaatgttgatattactttattagaaaatgcaagaacctccaaagagcattgaagaattcttaaagtttcaaaattgggtgagtaaagcatcttattttatgtgccattacatcattttaaaatatcagttatggagatttagaaggcttagaataaactttaagactagaaatttcagaaatatgtttcaatgaggaaagtgtgtatataaatacttatgtcctttgagtaggctctatgttgtagtcttccctcttgtcaacattctattctctttttcacattaaaaaaattctagccctatacagacatttctatatacttttgttattgtaagatttttgtcttatgtatttacaccttaaagaatatccaacagttatgcttacttatctcatttatttatgcaccacacctgagacaggtaatctgtagaggtgttacatcaatattccttgattattgaatcagagtgaaaaattcaaaatgtgttttcatgttaaaagttcagtttccattgttatgcaaaattactgacttcgcctggggttattggacttgctaagtcttcccttggatccatgcatctgcaagtgtgaaggtcatatttgttttgcattgaggaatgtcaagtaagggccagaagaaagatgtcagtatagaaaacagaaaaaaggtggctttttaattagatatgtttgtattttgagtggattggaatataaataatttacatttatttatgcttaaatgtaaatagtatttgctatgattaaactgctaacaatgtagtttcagaaatatctacttttaaatatctatcttctgtttttawatttgtttagacaagttttttttttttttttttttwctttcaatgttttgggaaaggattgcgctcagatgaaaacattcttagtcataaaagtttacttcagtcacatggtgtatctaagtatgttgaaatacttttggaacaaactttttgtaactattttgatttaaataatgatgcaaatgtgctgcagcctaatgacaatgtttaaggactttttaatgttttaagttttaagttaaaattaatctaaattcagcaaataatggagactgtattattatacatgtttgaggacctaggattttaaataaaaaattctaattatttgaagtagtaaatatgttatccctttgcttaaattgagaatgataccaatcaaatcaagatagtgggtttatgccagctcttcactaaatacaggataaaaatcaaatcaaaccatgtcttattaatagtatgtcagtagtatcatctttgtatgcaaaggatatatttatatttgtattcaaaggctatatttatagccttcaagttttatcaggtagcatttgataaaacaacatatccatctgtatcattttgtcatttataggtttctctgtaaatcttttcatattttctgaatttcccaaccaaatacccatattctgtagttattttttatggtttgactatgtttatacattgccaaactattggatatttgaaaatattcaggaataaaatgactagatgcttaattttttgtttgctatacaaagtctttgtccaatagacaatggtagaaaagtagtgactgccatgaattcatttaagaaatatttttgaacacctgctatgtgccaggcacatagatgcttaggatatatcagtgaataaaaacaagcaaagatgcctgcccttatggagctattattcttttagaattgaatcatgttattaatccaagctctgctgttaactagcattataatagtacttgcaacctacatgttagctacttgtttctcttgtcttctacttaatcttttatcatatcatctaaagtcctctcttttttgccagttcctaccatttctatcttttttggtaattttaatattttatatcatctactcctctctttcacctcttcctatctcctgttgtacttctgtgtatctttttatcttcaattgtttttatcctctcatttctctattgatcatttcccacattccctttactccatcacaattctatttctagttttatttttataaaaatatttttatgtttttataacatcttctttttccactattgttgtatcagtgtcagctctcttacttatcctattcattcactcatttagttacttccgttcactacccactatttgccagatatttttctgggcactggagttacagctatgaacaaagacaaaagattctactcttaaggaatctacattatcttccccctttttgtctcatctctctttactgtcacactttaaaaaattctttttggttcttcaagtacaaagtgttgattccaatttcttccatatttatatattatacttttgatttttcatgttatttatttcttattaccttttttctgtgtccatgcaacttttatctggtagaactttaattcatcttttcttagttcatcaatgttaatttttgttaacaggcctgttagattcgtaatctgtgtctgaagagtactccatgatatgatttttcttagaggatcaaaattattttatgatagagaaaataataatttcaatcccattctcttttttgagggaatagcctgatttatttgcttatttgtttattcatttatttattcattaatccatttaaatccttatatcaaagcttaatataaaggaaaaagagctaaataatagtcacttttcttactaattctagtcatgcttcttatttcttaccttctgtttgatacttcagcattgtctcttgggctttgggacatgggtgaagacttacccatatattcaataaaaaaaattcctctctaaactccacgagagcccttttgtctgtctactctcccttctccatctctagttttatattagcatataataatttgtgcttctgccactgccaaagttaattgctataattaaaataaacatgacaaatacatagccaattcttgcttcactgaccctgttttaaacaaggtaaatgttcttcttacttatcactaaggaccacagcgctataatgtagaatttaactccttagggaacaaaaacttctagtccaattcttttgttcttttgggatttgaatacatttatttacttttaattaatataatcaccatagactctggatgctcatactctagtagtagtgttgattttctttcgggcagtatgaactgcctgacagctaatctgcctgttagctgctagttgactcgatttgcctttttaggtctggccacaaaatttattttttagataacactctattcaagaggtaccttattgaaggcaaaatataaaggaataaggaaggaaagtaatagagaaatgagatggggaaaatagattatgatctgctacaagatatkatctactccaagataatcatctggtatccatttaataatacagccacaaagaattaaaagaatttaaaaatcaccttctttatattaatgactttgggacaccagtctatcccttgattaccttggtgatgtagagaagacagagtctcatcagccttatggaatttttggaaactttattcagctcataatatttcaatatcttggggaaaaggattgtgatataacaagtctgacataaagaactgacataaagacattttcataaagatttgtacatattataacatcttttcaaattccttttagcctcttccttctccctcaactcccctaacaatagcaacacatgactcataaggactgtgttttcaaatgtggctgccattctaaattgacagtgttggtcttcagggattttaccctgtgaccttctcttattcttcaaaatcttttaaatttttgacacagttttccagatttcaatgctggaaaactttcccaagtggctatgcgtcttatttaagatacacatttacaggrtttggaagaggrcacttaacgtatttatatagcactctttttttcaaaatgacagggggacctttttggaaaagttttgcagtgttaagcactgggtattattttcatatcttactattagcacagttaataaatgaacaaatgtatgatgagtttaggattgcttttaaaggaagaaaaaaggagatggaacagaccaaggtgggtttgaaatttctgatctgcagacctcagatttcttccccttaagctaaggccccagtgtattttacccaaactccattgcagagtttcatcctacacaagtctcccaccatcccaaaaagtattctcttattcataaacttttaattatgttgactaactttctttgttttgctattwtttggttatattaaaagatcttgtatttagatttgcaawtattaatgttgtggttccacttcccttcttctcttcatttcccttgtttccttttcattccatctgcttcctttcctaaacaatttagtattaaagccatctggtggccaaaacaaggcaggcttccacattgagaaagaagggtttgcttggtggcccagagcaagatttctgagcccaacaatggtgaggaggatgtccatgtgacaccacaggtatcagaatccaagggaatgatgatgatattcacacataaagggagaagaggaaggtagccttcactctgatgtgggaggtcagagatcaagtgggggtaaggaggatgtcctcacagaattggcaacctaacatgcgatattagagcccaagtagtatgaaaaggatatccacgtaaggaagagtctgggagcaaatatgagagattggttacataaaaggattgatcaaataagtaaatatattaaagataatggtagctaggtttttaattgttagggatggcaattataatacggaaagagagaaaactagaatggttagaattggaattagaggcatcagtgtgaactcatggctttgaatatataaaagtaaaaaaaaaaatacttaggagaaatgactccagcaagatggcaaaataacctttatccctttgcagaaatatcaatttgaacaactatccttgcaagaaaaatacctttacaagagctaaggaatccaggtgagatattactagtcttcactatatgggagtcctaggcgtggcacagaaataagaaaagataccttgaakaggttaggaaggacattttcaagttaccaagcaagggcagaacagtgtggagagagatacctttcatgtgggaaagggaaaggagaatgaagtgagcacataactttgccgtggaccgcagcaagaggactgtgcaagcccaccctccacagccccaagctccaggccagcacctgtagacccagtctccaagtccactccagtggcaggatagctcccacagccccaggctatccctctcagactcaaactccagctccatgccagccccttggatttttgattttaggctaccacatgaggacccaggctccaggcccactccagcaccaggctgctgcaggctccaggccatttccaggggaggcaggctccagggcagtcagacttcaggtccactccagtgtactcaggaccaggtctgcacaagtagaccccagcaccaggccagcccatggacccaggctccaggactgctcctgagacctaggcttaaagccaaaccccacaagtccaggaaccaggatatcccccaaaacagattcgaggcccaccccagcaccaggccaacccccacttcagtgtcaggttggcccctgtggacccaggcttcagtcctgcctccacagattaagtgtrcaggctgcacccagtggactgctgtgcsaggtcaacatcccttgagcctaggactcaggaccactccggtggacccaagaggtaataccacctaagggaacccagaggcccaaccccataaaccaaactacaaggctagccactgtgggctcaggtaacaggcctgcccacatactgaaccagataccaagtcagcttacctgacaattccaacaggaagtccatggaccccaccagctggcctgcctacattttctgggtgggctgacaggtgaagggcttttgtgctgaagccagcccccagaagaggcgcctgttcttcagatgtgcagacatcaaaacaaggcagtcagggaaacatgacatcaccaaagtaacaaatagaagcatcagttacctaaaaaaatagagatctacaaactgcctgatgaagacttaaaaatatcatcttcaagaagcttagtaaacaagagaacacaaagaaaatcaggaaaacaataaaggaacaaaagtagaggcttataaaagagataaaaaatcatgaaaaatccacacacagaaattctgggagctgaagaacataatgattaaaccaaaaaattccatagaaagcttcaacagcagatgtgatcaagcagaagaaagaataggggtactcaaaaacagatcatttgaaactgctgtcagaggaacaaaaacatagaatgaaaaatagtgaataaagcctatgagacatgggacattgtcaagtgaaacatatatacataataggaattccagaaggagaagagaaagagaaaagggtagaaagcttatttaaagaaagaatgatagaaatattcctaaattgagagagcaaaataaacagcaggatccatgaagcccaaaaaactccagatagattaagacaaagaagaaatcttccccaagatacattataatgaaattctcaaaagtcaaagatgagataattttgaaagcagcaagaagaaagttatttattatatacagktataagattataagcagatttatcagcagataccttgaaatccaggagagagtgggatgataacgaagtgttgaaaaaaaaactgccaacaaagaatttgataacctggcaaggctctccttcaaaaatggaagtcaagataacaagttttgcacacatggaaaaagtgttgggagtttatcaccactagatgctaaagggagttcttcaagttcaaatgaagaacactaacaatataaaaacattaaagtatagaactcaccataaacgtaagaatatagtcaaaatcagaatactgtaatagtgtattggtagtatgtaaattacttttaactctattataagagttaaaaggcaaaaatatttaaaataactatacatcaaactgaattcaacaaaacattaaaagtatcattcatcatggccaagtgggatttattccagggatgcagggatggttcaacatacacaaatcagtcagcgtgatatgtcatatcaacagaatgaaggacaaaacccatatgatttccgctgatgctgaaaaagcatttaataaaatccaacattccttcaagataaaaatcctcaaaaaactggatatagaaggaatatactttaacataataaaagctatatatgacagacccacagctagtaacacactgaatggagaagagctgaatgcctttcctgtaagatcaggaacacaacaaggatgcccactttcaccactattattctaactttcactgctattattcaaccatagtactggaagtcctaggtagagcaatcagacaaaagaaagaaataaatggcatctaagttggaaaggaaaaagtcaaattctccttgtttgcagatgatacgatcttatatttggaaaaacctaaagacttcatcaaaaaaccctctagaactggtaaaaaaattcagtaagcttgcaggatacaaaacaacatacaaaaatcagcatttctatatgccaagagagaaaaatctgaaaaagaaattaaaaagtaatcccatgtatagtagccaaaaataaatgaaatacctaaggaatcaagttaaccaaagaagtgaaatatctctgcaatgaaaactatcatgaaggaaatttaagaggacaccaaaacatggaaagataktccatgtttatggattggaataatcaatattgttaaaatgtccaaactacccaaagcaatttacagatgtaatgcaatccctatcaaaataccagcgacattcttcacagaaatagaaaagaaaatcctaaaatttatatgaaaccgcaaaagacccagaatagccaaagctattctaagcaaaagagtaaaacgaggaatcacattacctgacttcaaattatactacaagctgcgttaaccaaaacagcatggtactggcataaaaacacatatacacccatggaacaaaataagagaacccagaaaccaatccacacacctgcagtgaactcattttcaacaaaggtgctaagtacatacattgaataaaggacagtttcttcaataaatggtgctgggaaaactggatatccatatgcagaagaatkaaactagacccctatctctttccatatacaaaaatcaaatcaaaagggattaaagacttaaatttaggatctcaaactatgaaactactacaagaaaacactgggaaaactctccagcacattggtctgggcaaagatttcttgagcaatatgccacaagcacaggcaaccaaagcaaacatggacaaatgggatcacatcaagctaaaaagcttctgaccagcaaaggagaccaccagtaaagtgaagagacagcccatagaatgggaggaaatacttgcaaattactcatctgataagggatgattaataaccagaatatataaggagcttaagcaactctataggaaaactaataatctgattaacaaatgggcgaaatatttgaatagacatttctcaaaaggagacatacaaatggcaaacagtcatatgaaaaggtgctcaacatcactgatcatcagagaaatgcaaatctaaactatagtgacatacaatctcaccccagttaaaatggcttatatccaaaagacaggcaataacaaatgctagtgaggatgtggagaaaagggaaccctcatacactgttggtggggatgtaagttagtacaaccactacagtgaacaatttgaaggttcctcaaaaatctaaagatagagctaccatacaatctagcagtcccactgctgagtgtataccccagagaaaaaaaatcagtatgtcaaagagatatctgcactcccaggtttgttgcagcactgttcacaatagctaagattaggaagcaatcttaagtgtccatgagctgatgaatgtataaagagaatgtggtacctttacacatggagtactattcagccataaaaaagtgggagatcctgttatccacacaacatagatggaactgaaaatttttatgttgagtgaaataagccaggcacagaaagacaaacattgcatttctcacttatttttgggttctraaaatcaaaacaattgaactcatggaaatagagagcagaaggagggttaccagaaactgggaaaaggagtgggaggattgtggggagatggggatggttaataggtacaaaaatgttagttagaaaaaatgagtaagaccaagtattgatagcacaataaggtgagtgtagtcaataatgattgaattgtacatttaaaataactaaaagagtataattggattatttgtgacacataggataaatgcttgaggggatggttaccccatttttcatgacgtgattattatgcattgcatgcctatatcaaaacctctcatataccccataaatatatatacctaccatgcacccacaaaaattaaaattaaattattacaataatttgataatggatacacaatatatttaaaatgtaaatagtgaaatcagtagcataaaatgtgagagtgggagttaaagtgtagagtttttgtatgtggtacatatgaagttgttatcatcccaaaatataacataataactgtaagatgttttatgtaagccttatataaccacaaggaaaaaccttgtgtacatacacaagagataaagagaaaggaatcaaagtgtaccattatttaaaaaatcatcaaatcacaaaggaagagaggaatagaggaagaagagaatgaagttactattaggttggagcaacagtaattgtggtttttgccattaaaagtgatggcaaaaaccgcaattactgtnnnnnnnnnnnnnnnnnnnnatggcaaaaaccgcaattactgttgctccaacctaatacaaaacaatcagaaaacagtgaacaaagtggtagtattaaattctttttttttttttttgagacagagtcttgctctgtcacccaggctggagtgcaatggcgcgatctccactcaccgcaacctctgcctcctagattcaagtgattctcctgcttcagcctccggtgtagctgggattacaggcgcacaccaccacacccagctaatttttggtatttttagtagagatggggtttcaccatgttggccaggctggtcttgaactcctgacctggtaattcgcccacctcaacctcccgaagtgctgggattataagtgtgagccaccacgcccggcctggcagtagtaaattattccatgtcaataattgctttaaatgtaaatgggttaaattctttaatcaacagatgttaagtggctggctggattttttttttttttttgagatgtggtcttgctctgtcacccaggctggagtgcagtggtgcgatctcagctcactgcaacctctccctcccgggttcaagagattctccctgcctcagcctcctgagtagctgggaccacaggcagacaccaccacacctgggtaatttttatatttttagtagagatggggtttcaccatattggtcaggtgggtctcaaactcctaacctcgggtgacccacccgccttggcctctcaaaatgcttagattacaggcatgagccaccatgcctggccggatttaaaaaaaaaaaaaaagaaagaaagaaacagctatatgctgcatacaaaagactcactttagctttaaggacacacatagactgaaggtgaagagatgattaaaataaatttatgcaatggtaataaaagagaactaggatagctctacttctatcagattaagtaagctttaaagtcaaaatcttttaagagagacaaagagggtattcatataataataaaagggtcaatttgcaaagagtgtctaacaattgtaaatatatatgcacccagtgtcagaacacctaaatatatgaagcaaatattaacagaattgaagggagaaataacagcaatacattaacaataggagactttaaggccatattttcaaaaatggatagatcatatggagagaaaattaatayggaaatagaggacttgaacaactctctagacaaaatggtcctaacagacacatacagatcattctatccaaaagcaacaaaatgcaaatttttctcaagtacacaaagaaaattctccaggatggattatatattgggccacaaaacaagtcttaacaaattttataagattgaagtcttatcaagtacctcttgtgaccacaataatattaaactagaaatcagtaataggaggagaactggaaattgaacaaaatgctcttgaatagccagtaggtcaaggaataaatcaaaagggaaatcaaattatcttgagataaatgaaaatggaaataatgtaccaaaacttatggaatgcaacaaaggatttctaagagggaagtttatagcaataaatgcctacattaagaaaaactctcagataaacaatctaacttatatctcaagtaactagaacaagcagaactaactaagcccaaagtcagtagaaggaaggaaataacaaagatcagagcagaaataaatggagagactggaaaaacaatagagatgatcaacaaaactgaattgtgttttctgaaaagattaacaaaactgtcaaatctctagctaaactaagggaaaaaaagaagaaagattcaaataaatagaatcagaaatgaaagaggagacattgaagttgataccacagaaatataaataattatagtaggctaccatgagaaattatatacaagtaaattgaataacctaaaataaatgaataaattccttgaaacatacaacctaccttgactggatcatgaaaaatagaaaatctgaacagaccaataatgagtaaagagattgaatcagtaattgaaaacctcccaataaacaaaagcccaggaccctttaactttactcatgaatcctaccaaacattgaaagaagaattagtatcaatctttctcagactcttctgaaaaatagaagaggaaagaatactttcaaatttatttgatgaggctagggttaccctgatactacaaggacacgacaagagaagaaaactgtggaccattatctcttatgatgaatagtaatggcaaaatcctcaacaaaaacaagcgaacccaattcaacagtacattaaaaggatcatataccatgatcaagtaggatttattcatgggatgcaaggacgtttcaacatatacaaatccataaatgtgataaaccacattagcagaataaagaataaaattattatcagctcaacagatgaagaaaaagcatgttaacaaaatttagcattgcttcatgattttaaaaactctcagcaaattaggtgcagaaggaatgtactttgagattataaggaccgtatatgaaagcccacatctaacatcataatcaatagtgaaaaatggaaaggttttcctctaagaacagaaacaacacaaggattcccactcagcactcctattcattatggtattgaaagttctcctagagcagttagaaaacaaagaaacaaaccatccaaataggaaaggaagaagtaaaattgtctcttgcagataacataattttgtatacacaaaactctaaagattccagaaactgttagaaatactgaatgaattcagtaaatttgcacaacatggaatcaacattcaaaaatgagtagtatttctaggtactagcaattaactattaaagaaatcaagaaaacaatctcttttacaataacatgaaaaaatacttatggataaatttaaagaaggaggtattrgcatgtagctttttttgttgtcttttcctagttttggtattaaggtaatactggcttcatagaatgatttagggaggattccctccttctctgtcttttggaatagtttcagtagaattggtaccaattcttctttgaatatctaatataattcagctgtgaatccaccttgtcctggactttttttttgttggtaattatttattaccatttcaatattactgctcattatttgtctgttcagagtttctatttttttcctggtttaatctatgagtgttgtatatttccaggaatttatccatctcctctaggttttctagtttatgtgtgtgaagatgttcacagtagccttgaataaacttttgtatctctgtgttatcagttgtaatatctcccctttctttcctaattgagcttatttggatcttctctcttcttttcttgcttaatctcgctaatggtctgtcaattttgttaatcttttcaaataatttaacaagctttttgtttagtttatctttgtcttgtctttgttgcttcaatttcatttagttctgctgtgatcttatttcatttcttcagctgggtttgggtttggtttggtttctgttttctctggttccttgaggtgtcaccttagattgtcttcttgtgctctttcaggctttttgatgtaggtattcaatgctgtgaacattcctcttagcactggttttgctgtaccttagaggttttgataggttgtgtcaatattattgttcagttcaatttttaaatttccatcttgatttcattgttgacccaccgaccattcaggagcaggttattttatttccaggtatttgcatggttttaagggttctttctggagtggatttccaattttattcaattgtggtctgaaagagtactttatgtaattttgattttcttgaatttattgagacttgttttgtggcctgtcacatggtctatcttggagaatgtttcatgagctgatgaatagaatgtatattctgcatttgttggccagtatgttctgtaaatatctgttaagtccatttgttgtagggtatagtttaagtccataatttctttgttgactttctcttttgatgacttgtttggtgctgtcagtggagtattgaagtcccccactattattgtgttcccatctatctcattttttaggtatagtagtaattgttttgtaaatttgggagctgcagttttaggtgcatatatatttaggattgtgatattttcctgttggactagkcctttcatcattatataatgtccctctttgtcttttttaactcttgttgctttaaagtttattttgtctgatacaagaatagctactcctgcacttttggtgtgaatttgcatggaatatcattttccacccctttaccttaagtttatgtgagtctttatgtgttaggtgagtctcttgaagataacagatactgggttgatgaattcttatccattctgccattctgtatcttctaagtggagcatttaggccatttacatccaatgtattgagatatgaggtactattctattcatcatgccagttgttacttgaataccatggttttttttctttgtgttattgttttataggccctgtgagatttatgccttaaggatgttctattttgttttgttttgttttgttttgttttcaagatttgtttcaagatttagaactccttttagcagttcttttagtgctggcttggtagtctctctctcatcatttgtttgtctgaagaggactttatcttgtcttcatttatgaatcttagttttgctggatacaaaattcttaactgataataattttgtttaaggaggctaaaggtaggaccccagtctcttctggcttataatgtttctgctgaaaaatctgttaatctgataggttttcctctataggttacctgatgcttttgcctcatagctcttaaaattctttactttgtttcgactttagataacctaatgactgtgtgcctaggtgatgattatattgcaatgaatttcctggatgtccattgagcttcctctgtttgcatgtctagatttctagcaaggcagggaagtctttcttgattattcyctcaagtaagtttttgaaactttcagatttcctcctcaggaataccagttatttttaggtttggtcatgtaacataatctcagactccttggaggctttgttcatttttaaaaaaattatttttcctttgtctttgttggactgggtcaatttaaaagccttcttgattttgagctctgaagttctttattctacttgtttgattctattgttgaaacttttcaatgtcttttgcgtttttctaagtgtgtctttcattccagaatttgtgatttttatttatgatatgtatttctctggagtttttgttgtccatattctgtatttaattttaattccctcatgtttgttttcccctttctcggtgctttcttgagtacaaaattcagcatccctttatgattaaaaccctcagcaaaatcaacatagaagggacataccttaaggtaataaaagctatgtcaaacccacagccaacattatactgaacagggaaatgtttaaaacattccttctgagaacttgaacaagacaagtatgcccactttcaccacttctattcaacccagtactgaagtcctagctagaacaatcagataagggaaagaaataggggcatccaaataggtaaagagtatgtcaaactgtcactgttcactgttgatatgattatatacctagaagatgataaagactaatttgaaaagctcctagatctgataaatgatttcagtaaagtctcaggatacaatatcagtgtatacaaatcagtagcactgctatatacaaataacaaccaagctgagaatcaaatcaggaactccacctcttttacaattaattaaattaaattaatacaatataaaataaaattaaaaatacttaggagtatgtctaaccaaggagatgaaagacctctacaagataarctataaaacactactgaaagaaatcatagatgacacaaacaaatggaaacacatctcatattcatggtgggtagaatcaatatcgtgaaaatgaccgtactgccaaaagcaatctacaaattcagtgtaattcccatcaaaataacataatcattcttcacagaactagaaaaaacagtcctaaaatttatatgtaaccaaaaaaatgccttcatgcccaaagcaaaactaagcaaaaagaacaaatctggaggcattataatacccaacttcaaactacactataaggctgtagtcaccaaaacagcatggtactggtataaaaacaggcatataagccaatggacagaacagagaacctttaaataaagtcaaatattgacagccaactgatcttcaacaaagcaaacaaaagcataaagtgggggagggaaaccctgttcaacaaatgttggtgggataattggcaagccacatgttaaaaggatgaaactggatcctcatgtctcaccatatacaataaccaaatcaagatggatcaaagacttaagtctaagacctgaaaccataacgatctgaagataatattggaaaaacccttctagacattggcagaggcaaagacttcatgaccaagagccccaaaacaaatgcaacaaaaaccaagataaatagatgggacttaattaaactaaaagtcttctgcacagcaaaataaataatcagcagagtaaacagacaacccatagagttgcaaaaaagtctttgtaaactgtgcattggacaaaggactaatatccagagtctacaaggaactcaaatcagcaagaaaaaaaagaaataattccatcaaaaagygggctaaggatatgaatagacaattctcaaaagaagatatacaaatggccaaaaaacctgtgaaaaaaatgctcaacatcattaattatcagggaaatacaaatcaaaaccacaatgcaataccaccttactcctgcgagaattgccaaaattaaaaaattatatataatatagttgtggatatggtggaaatggaacacttttactctgttggtgtgaatgtaaagtagtacaatcactatggaaaacagtatggagattccttgaagaactaaaagtagatctaccatttgatccagtaatcccactattagataygtacccagaggaaaagaagtcattatataaaaaagacacttgcactcgcatgtttatagctgcacaatttgcatttgcaaaaatatggaaccagcccaaatgcccaatcaacaagttgataaaatgtggtgtacatataccatagaatactactcagccataaaaaggaaccaaataatggcatttgaagcaacctggatggagttggagccattattctaagtgaagtaacttaagaatggaaaatcaaatatcgtatgttctcacttacaagtggcagctaagctatgaggacacaaaagcataagaatgttacagtggactttggggacttgggggaagggttcggggggtgaggtacaaaagactacacattgggtacagtgtatactgctcgggtgataggtgcaccaaaatctcagaaatcaccactgaagaacctattcatgtaacgaaaaccacctgttcccccaaaactattgaaattaaaaaataacaaaaataaaaataaaaaataaaatgcagattctgacagcaaaaaaaatttttaaaataagaaagtaaatgctctatatgctgaaaactgtaaaatattgatgaaagaaattgagatgagagcagttccaaaatggccgaataggaacagctccagtctacagctcctgtgtgattggtgcagaagacgggtgatttctgcatttccgactgaggtacctgcttcatctcattgggactggttggacagagggtgcagccctcggaggtgagccaaagcagggcggggcatcacctcacccaggaagcgcaaggggtcagggaatttccctttcctagtcaagggaagccgtgacagactgtacctggaaaatcagtacacttctgcccaaatactgtgcctttcccacggtattagcaactggcagaccaggagattctctcctgtgcctggctcagtgggtcccacgcccacggaactttgctcactgctggtgcagcagtytgagatctgcgaggctgaagcctggtcgggggaggggtgtccaccattgctgaggcttgagtaggtaaacaaagtgggcaggaagcttgaactgggtggagcccactgcagctcagcaaggcctactgcctctatatactccacctctgtgggcagggcatagctgaacaaaaggcagcagacaacttctgcagacttaaacgtccctatctgacagctctgaagagagcagtggttctcccagcatggcatttgatctctgagaatggacagactgcctcctcaagtggatccctgaccactgtgtagcctaactgggagacacctcccagtaggggccaacagacacctcatacaggcaagtgcaactgtgggacgaagcttccagagtaaggatcagacaacaatattttctgttcttcaatatttgctgttctgcagcctccgctggtgatacccaggcaaacagggtctggagtggaccaccagcaaactccaacagacctgcagttgagggacctgattgttagaagaaaaattatgaaacagaaaggaatagcatcaacatccacaaaaaggacatccacaccaaaacytcttctgtaggtcaccaacatcaaagaccaaagttagataaaaccacaaagatggggagaaaccagagcagaaaatctgaaaattctaaaaaccagagcacctcttctccaaaggatctcagccycttgccagcaatggaacaaagctggacagagaatgactttgatgagttgacagaagtaggctctaggaggtcagtaataacaaacttctgtgagctaaaggaacatgttctaacccatcgcaaggaagctaaaaaccttgaaaaaaagacgaatagctaactagaataaacagtggagagaagggcttaaatgacctgatggagcagaaaaccatgccatgagaacttcatgacgtgcacaagcttcaatagccaattcgatcaagtggaagaaagatatggaatcaacctaagtgcttttcaacataagaatggaaaaagaaaatgtggtgtgtgtgtgtggctgtatatacatagaacacattttctttgtgtgtgtgcatgtgtatacatgcacacatacacaaaatagaatattattcagccttaagaaaggctgggcacagtggctcatgcctgtaatcgcagcattttgggaggccgaggtgagcagatcacaaggtcaggagttcaagaccagcctggccaacatagtgaaaccccatctctattaaaaaatacaaaaattagttgggcatggtggcacgtgcctgtaatcccagctacttgggaggctgaggcaggagaatcgcttgaaccttggaggcggaggttgtggcgagccaagatcgtgccactgcactccagcctgggcaacagagcaagactccaaaaaaaaaaaaaaaaaaaaaaaaggaaggaagggccaggtgcagtggcttatgcctgtaatcccagcactttgggaggctgaggaaggacggaaggagggaaggaaggaaggagggaggagaagcgaagggaggaagggagggagggtgtggtggctcacacctataatcccagcactttgggaggctgaggcaggcggattacggggtcaggtgattgagaccatcctggataacacaaaccccgtctctactaaaaatacaaaaaattagccgggcatggtggcgggcgcctgtagtcccaactactcgggaggctgtgcctgtagtcccaactactcaggaggctgaggcaggagaatggcgtgaacccaggaggcggagcttgcagtgagccaagatcgcaccactgcactccacctgggcgacagagcgagactctgtctcaaaaaaaaaaaaaaaaaatcaaaaaaaaaaaaaacaaaaaaaagagaaagagaaagaaaagaagagagagatctctctatttttgacagtgtggatgatcttggaggacatgatgctatgtaaaataagccaggcacaaaaaggcaactgtggcatgatctcacttataagtggaatgtataaaaatggaactcataggagcagagagtagaatggagtcttactggggcttgtgaaagaaagggagaaatggattaaagggtgcaaagtttcagacaggagagagaaattctggggatcaattggtcagcatgatgattacagttaataataatgtatggtgtacttgaaaattgctaatagagtagatcttaaatgttctcaacacataaactctgtgaggtgatggatatgttaattacctttttggcagtcattgcacagtctatacatttatcgaagcttcacattgtacatcataaatatttacaattttaatttgtcaattatactttaataaaactagaaaaaaatgaaaataagttaaaattatctcttctaatcttcccccttcccttccccacagatattatggaactgtcgtagactgaaagggaccaaagagacatgaagccaaaacttaacatttttattctgaactagattcttttgctataaagggcataattggttccactgaaacttgaatagagtctttgtattaaatataaataatgtatcagtgccaatttcctgattctaatggttgcatttattatgtaggagaatgtttttggtttttggaaatatacattgacgttttaaaggatgatgggctatcatataagcaaattattctcaaatgattcaggaaaatagttttagtaaaggacttgtaacttttctgacgtttgtgattgtttcaaatttttaaaaagtgataaaaaacaatgctgtggaataaaatctcgattatagctcattggttttgaactctattatttaaattcattaaaaatgacttaagctatattctctctttcacgttttttgcaggattattggccaagggaaatccattttagagatgatgataaatggtcatgcactctgaaaaaaataaaagaagatagttcatttgtttcaatttatacacacctatgggaaaatgttcctcgaatatttgaagcacttttgatcatggaatcaaaattaaaggaatattcacttattttgcaaaaccacacctctgaaatatttaagtggaaaagcatgatttctgagacaagtgagccttatttatttttatcttttatagaaatggagtctcactatgtttcccaggctggtctccaaatcttggcctcaagtgatcctcctgagtcaccctccaaaagtgttggaattacaggcataagccagtgcacctggccagtccttattttttgtgttagtaaagtaatggtcagttgtctgtgtgtgtgtgtgtgtgtgtgtgtgtgtgtgtgtgtgtgtgtgtgtaatctcataaagaatgaaattctaaggtacaaatattaaaaatattttattttaaaacctcttcatttcaaaatggttcaatacagatttttttagttgaacagaaatatgtggtttcaaaggaagtattactaaaacaaagccttaaaacagttgttaaactgttaagcttttgttaaattggagtggaggtacagagtattaggaaaacaggagagcaagattgcatcaactaatattcttactagaaacaaacatatcagtaagggtcaggatagaacagaaatatctgaaactgaaagtaaaaggggtgatagttaacctatatgggctctcaggstagtttctaggggtagctggtattcactatggaatagctgaatgaatgacaaagcatacagcaagtaatgataatttttacttcttttcaatatttgtataacatttttcttatctaattgtattaacatttccagaatagttttaaatacttataattattcttgtcttattcttgatttaatgggcaaatttgtcatatatataagtcttggaaatgatactaattgtacttataaagtgtttttaggtattagattcattatgttattttggtatttaatattcttttttgaactaagatttgtgtaattctgaagatgtgtttaaatacacttctattaaattaactttttaaaaattttcatatttaaactgtaaatttttaaaagtttatatttttaatgtataaaagttatgtatagcttctgtgtatgtatatataaatacacacacatatatatagcttgcatacacacatacacacagacacccrtgtgtgtgtataaattcrtcttgtaatgaaataaaatacccacaagtaaacaaagtatgaacatatcctttcatatcttccttctgttttttaaaaaaggtaattttatatatatatatatatatatatatatatatatatatatatatatatagtcctcaatatgtagatatcagaacttggattcaagtctatctcggttatctgacttcagagccccccatattgtctcactgtgccctgctccacagtactgcactttattgaaattaaggtgaccatgaaacaaccaagtgtaagtggctgagctatttgaaaaatgtggacttttttaggagaagggattgacataaaagtttagacataggagtaagtgccacagacatgttagttggaacatggtatttcagaaaaaggaaacagaagatatactytatataataattccagttattcattcagctaacagtgtgtattaacatatacttatcacaattgctaattgatttcattgaataattttgtatataatttgtttaaagtatttaaaattttgtttatttttagaggaggttcatatgtataatatatatactgtgaattcttattttcttaaaggttcttatagaaaattggaacgatatggggaatttctaaagaagtaccataagaaaaaaaagataatggtatggtatctatgtttttatcatccttgaaagttggattttcacagaaaatataaacactacatttccacagatgagcactaataacacttttgtaaatgtccttttagtctactgttaccaatctatctctatgttttaaagatagctgcacttactttcttttcatactcagtattactgagtattggcatcttcacataactacaagttatttgaagacttatttcaaggtatactattacattttttggttatttaataatttataacatacttagtagtgcaggtcctatatcagccctcttattttagaaaattaataattctttttgatgacctttactttgccaattttaaaaaatatttttgagattttgataaaaatggcaagtgttttgaattactttcagatacttagtctttttaaaaatatgttctaaaattatataatgttagagctagaaaaactttgtatcaccattagtctagccacctcatttaatgctttatttttaaaaatttaacttttattttcagttcagggttacatgtgcaggtttgttatataaataaacttgtgacatgcgggtttgctgtacagattattttgtcacccaggtattaaacttagtgcccattagttatttttcctgattttctccctcctcctgccatccacccttcaataggccccagtgtctgttgttctcctctatgagttcatgtgttctcataatttagctcccacttaaaagtgagaacatgcagtatttgtttttctgttcctgcattagtttgctaaggataatggcctccagctggatccatatacctgcaaaggacatgatcttgttgtttcttagggctgcatagtattccgtggtgtatatataccacattttctttatgcagtcaaccattgatgggcatttaggttgattccatgcctttgctattgtgaatagtgctgcagtgaacatgtatttgcatgtgtctttatggtagaatgatatatattccttttgagttctttcagaaatcatcaaactgcttcccacagtggctgaactaatttatattcccaccagctgtgtattataagcattcccttttctctgcaacctcgtcagcttctgttattttttgactttttaataacagttattctgactgatgtgagatggtatctcattgcggttttgatttgcacttctctaatgatcagtgatgttgagtttttttcatgtttgttggctgcatatatgttttcttttgaaaagtgtttgttcatgccttttgcccactttttaatggggttatgtgcttttttcttattaagttccgtgtgagttggatattagacctttgtaagatgcgtagtttgcaaatattttctcccattctgtaggttggttgtttactctgttggtagtttattttgctatgcagaagctctttagttcaattggatcctatttgtcattttttgcttttgttgcaattgcatttgccatttttgtcatgaaatctttgcccatacctatgtccagaatggtattacctaggttgtcttccagggttttcatagttttgggttttacattttggtctttaatctatcttgagttaacttttgtataaggtgcaaggaaaaggtccagtttcaatcttctgcatatggctagccagttatcccagcattatttattgaatagggagtccttttcccattgctggtttttgtcagctttatcaaagatcaggtagttgtagatgtgtggccttatttatgagttctttattctgttccattggtctgtgtgtctctttttgtaccagttccatgctgtttgggtggctgtagccctgtagtttgtaatagtttgaagttaagtagcatcatgcccccagctttgttgttttttttacttaggattgtcttgggtattttagctctatttttggttccatatgaatttaaaaaagagccttttctagttctgtgaataatgtgattggtagtttaataggaatagcattgaatctacatattgctttgggaagttatggtcattttaacgatattgattcttcctgttcacgagcatggaacgtttttccatttgtttgtatcatctctgatttcttttcaatttaatttaattttattattatactttaagttttagggtacatgtgcacaatgtgcaggttagttacatatgtatacatgtgccatgttggtgtgttgcacacattaactcgtcatttagcattaggtatatctcctamtgctatccctcccccctccacccaccccacaacagtccccggtgtgtgatgttccccttcctgtgtccatgtgttctcattgttcaattcccacctataagtgagaacatgcagtgtttggttttttgtccttgagatagtttgctgagaatgatggtttccatcttcatccatgtccctacaaaggayatgaactcatcattttttatggctgcatagtattccatggtgtatatgtgccacattttcttaatccagtctatcattgttggacatttggcttggttccaagtctttgctattgtgaatagtgccgcagtaagcatacgtgtgcatgtgtctttatagcagcatgatttataatcctttgggtatatacccagtaatgggatggctgggtcaaatggtatttccagttctagatctctgaggaatcgccacattgacttccacaatggttgaactagtttacagtccccaccaacagtgtaaaagtgttcctatttctccacatcctctccagcacctgttgtttcctgactttttaatgattgccattctaactggtgtgagatggtatctcattgtggttttgatttgcatttctctgatggccagtgatgatgagcattttttcatgtgttttttggctgcataaatgtcttctttagagaagtgtctgttcatatccttcgcccactttttgatggggttgtttgtttttttcttgtaatttgtttgagttcattgtagattctggatattagccctttgtcagatgagtaggttgcaaaaattttctcccattctgtaggttgcctgttcactctgatggtagtttcttttgctgtgcagaagctctttagtttaattagatccgagaagtgttttgtagttcttgtagagatctttcacctccctggtaagcagtattcctagatatttttgtgtgtctgtggcaatcgtgaatgggattgtgtttctgatttggctcttggcttgagtgttgttggtatataggagtactaatgatttttatacattaattttgtatcctgagacttcgctgaagttgtttatcagcttaaggagcttttgagactatagggtttctaggtataggataatgtcacctgaaaacaggrtagtatgacttcctttctttctatttggatgccctttatttctttctcctgcctgatagctctgactagggcttccaatactatgttcagtagaagtggtgagagagggcatccttttcttgtgccagttttcaaggggaatgcttccagcttttgcctatttattatgacattggctgtaagtttgtcatagttggctgttattattttgaggtatgtaccttcaatatgtagtttaatgagagtttttcacatgaaaggatgttgaattttaaygaaagccttttctgcatctattgagataatcatgtcatttttttatttgagttttgtttatgtgatgaatcacatttattgatttgcatatattgatccaattttgcatcccagggataaagcctacttgattgtggtggataagctttttgatgtactgctggattcaatttgccagtattttgttgaggatttttgcatcaatgttcatcaagagtattggcctgtagttctctttttttgttgttatctctgcccggttttagtgacaggatgatgctggcctcatagaatgagttagggaggagtccttcttccttaagtttttggaatagtttcagcaggtatggtaccagcccttctttgtacatctggtagaattcagttgtgaatttatctggtcgtgggctttaataggttgataggctatttattactgattcaatttcagacctcattattggtctgttcagggattcaatttctttttggctcagtcttgggagggtatatgtgtccaggaatttatcagtttcttccagattttctagtttatgtggacagaggtgcttatagtattctccgatggttgtatttctgtggggtcagaggtgatatcccccatataattttttttttttttttgccaagtgaaagcaagtttattaagaaagtaaaggaatgaaaaaatggctactccatagacagaggagccccaagggctgctggttacccatttttrtggttatttttgatgatatgctaaacaacgggtggattattcatgcctcccctttttagaccaaaaagagtaacctcctgacattgtcatgtcatttgtaaactgtcatggtgctggtgggagtgtagcagtgaggatgacttgaggtctctcactctcgtcgccattttggttttggtgggttttggccgcctcctttactgcaacctgttttatcagcaaggcctttatgatctgtaaacttttgtgctgacctcctattcccttatcatttctgattgtgtttatttgattcttctctgttttcctctttattagtctagctagcagtctattttgttaattaaaaaaaaaaacaaatacgggagttgtcctggatttgttgatcttctcaattttttttgtgtctcagtctccttcagttcagctctgattttggttatttttgtcttctgctagctttgggtttggttttcttttgattccctggttcttttagttgtgatgttaggttgttaacttcagatctttttaactttttgatgtcggcatttagtgctataaatttccctcttaacactgccttagctgtgtcccagagattctggtgtgttatacctttgttctcatcagttccaaaggacttcctgatttctgccttaattccttttttttttcctgaaagtcattcagtagcaggttattcaatttccatgtagttgtatggttttgagtgaatttcctagtcttaatttctaatttgattgctgcatggtccaagagactgtcatgaattcagttcttttgcatttgctgaggagtgttttacttctgattatgtgatcaagtttagagtatgtcccatgtgggcaatgaaaatgtgtattctgttattttggagtggtgagttctgtagatgtctgccaggtccgtttgacccagtgctgggtttaggtcctgaatagctttgttaattttctgcctcaatgatctgtcctaatattgtcagtggcgtgttaaaagtcttccagtattactgtgtgggagtctaagtctctttgaaggtctctaagaacttgctttatgaatctgggttctcctgtgttgggtgcatatatatttaggatagttaggtcttcttgttgaattgagtcttttaccattatgtaattcccttgtcttttttgatttttgttggtttaaagtctgttttgtctgcaattaggattgcaactcctgcttttttctgtttctcagtttcttggtaaatttttttccatttctttactttgagcctatgtgtgtcattgcacacaagatgggtctcttgaagatagcgtactagtggatcttggttctttatccaggtttccactctgtgccttttaacgggggcatttagcccccatttacattcaaagttagtattgatatgtgttgatttgatcctgtcatcatgatgttagctggttattatgaagatttgtttatgtggttgctttatagtgtcactggtatgtgtactgcaagcaggtacagccaggctggggccctgggagaggccagcagaccaaggggtgcccaagatggattggccccattttttgggcaagatgrccttgcgtagttcaggtctgacagttcccctagggctgtcatcttgttgttagtttgttattatgcagacttgattgtgtgggtactttttagtgtcactggtgtatgtacttaaatatgtttctctggtggctagtaacggtctttgatttccgtatttagcactccctgaaggacctcttacaaagcaggtctgttggtaatgaattcctttaacatttgcttttctgaaaaagatcttatttcttcttcacttgtgaagcttagtttggctagatacgaaattcttagttggaatttcttttctttaagaatactgaatacatctgggtacggtggctcacgcctgtaatccagcactttgggaggccgaggcaggtagatcacatgagttcaagaatttgagaccatcctgaccaacatggtgaaaccccatctctactaaaaatacaaaattagccaggcgcagtggtgcataattccagctacttgggaggctgaggcaggagaacttgaacctgagagggggaagttgcagtgagccaagattgtgccactgcactccagcctgggcaacaagagcgaaactctgtctcaaaaaaaaaaaaaagaatactgaatataggcccccaatctcttctggcttgtaggatttttgctgaaaggtctgctgttagcctggagaggttccctttgtaggtttacctgcccttctctctagccacatttaatattttttctttcgtgtcaaccttggagaatctgataactatgtgtcttgtggatggtcatcttgtatagtatctcacaagggttctctctgtgtttcctgaatttgaattttggcctctctaacgagatttgggaaattatcatggatgatgtcctgaaatatgttttccaagttccttttctctcccccattttcaggaactctagtgagtgtagatttgatctctttacataatctcatatttctcagaggttttgttcattattttttatttatttttgtgtgactgagttatttctgagaagcaatctttgaggtmtgagattcattcctcatcttggtctattctgctgttaatacttgtgattgtattattaaatacttttagcgtgtttttcagctctgtcagttcagtttggttctttcttaaaattatcatttcaactttcagctcctgtattgttttattgtaatccttagattctttggagttggtttcagtttcttctgaattttcatgatctttatttctatccatgttctgaattctttgcctgtcatttcagccatttcaacctggttaagcaccattactggaactagtgcagtcatttggaggaaaaagacactttggctttttgaattgccagagttcttgtgctgattctcatctgtgtgggctgatgttcctttaactgtggtgtagtttgagtgtagtcaattggctttgtttctggatgttttcagagggctgagactttgtgttgggtctttttttgtagctgaattattgtccttggttttatcggggcatgtattkgcaaagtatttttagtgttgaagtttgggatgtgattcagtagatggtgcttaagcatgctggttaktagctgggcactcgctcagccaagtggctcttctgtatttcctcacatttacaaggcatgctcctttcaaagaagttttaaaattgtgactacttagttttatcaaatgacttttcaaaatctattgaaatgggctataggtaaattatactaacaaaagttttaatagtkattctttttgttaaatataaaagttttattggatttatcaatcagaattttaacatgtatttatatttttgtggtctcgttttcaggttatatgaccaaaaactatgttttttgttactgcaactctgctgcttgaaaacttccactgtttcttttcctcctgcagaataaagccaggacttggagattaaccttaacatttaattaaatctgacttcatcttttttattgatacataatcattgtacctatttacagggtacatgtgatattttgattcatgcatgcaatgtgtaatgatcaaatcaggttatttagaatagctatcatttttttgtgtcaggaacatttcaaatattcttttatagctattttgaaatatacaatacattgttgctaactatagttgccctactatgctatcaaacagtagaacttaatcattctaaataactatatggttgtacacattaaccaacctctcttaatctcctccattccccaaacacccttctcacagcctctggtaaccaccattctactctatacctccacgaaataaactttttaagttcccacatatgagtaagaacacataatacttgtctttctgtgccttatttcacttaacagacaacctccagttttatccatattgctgcaaatgacaggatttcattcgtttaatggctaaatagtattccattgtgtatatacaccacattttatctatttatcctttgatggaaacttagattggttccataccttagctatcgtgaatagtgttccagtaaacctgagagtgcaggtatccctttgatttcctttcttttggagagakactgagtagtgggattgctggactaattgtatgacagttctatttttagttttttgagaaacctctgtactgttttccatgatagctgtactaatttacattcccaccaatagtatataagaattctcttttctcttcatccttactagcatttgttgtcttttgataatagccattctaatttggataagatgatatttcattgtgggtttgacttgcatttctctgatgatttgtgatgttgaacgtttttcgtaggccatttatatgtcttcttttgagaaatgtatattcagatcctttgcctactttttcatggtattatttgtgtttagttttgctgttgagttgttccagtggcttaaatactaatatattctagatatttgtctcttgttaaatagatggtttgcaaatattttctcccattacaaaggttgtgtcatcactctgttaattgtttcctttgctgtacagcagcctcctgttttaatatagtcccatttctgaccccatctttattgatctatagctttcaagcatatagccttctttccaatcatatttgatctcatttttcctaaaaagtctctctttcttattcctgtgtacactttaaaaagtgagaataatatgatcctctttctggaagcaatacatcattctttccaatttgttttatatgtcatatgtcatcttctttctaatatatgtgtatgtgtaatatgtgtgtatgtgtggtattgtgtgtgtaaaacttacttgtaagcttagtaattgttggagtaattaggaatgtggaaattaacctgctatctatctatctatctatctatgtctgtctatagtatgtatacatattatgtatgttttatatatatatatttaaacatgactagatgatcaaaaactaatctatgtgtataaagcagtgtagtagacattaaaatatgccacccaattccttttcaaagaaggatctgtgctctagggcctaagagtgctgttaagggacacccttcaactgtcagccccttcattggtttacttacctccagagaacttcctcttctgagraaacatctttccaggaaccatccagtgacrgctcaagttggagcagaaaggcttggctatttcagtccaatgcaggacagctctgatcaatactttcagctctagaactcttctttgagccagttgtggctattaggcctccatcataactaatttctccatctgcccaatcctgcctcttcccttgactgccaaaggcattgattccaaaaggcattgattccaaaagcactcacaataaacattctgaacactaaacttccccagagagtctatttcccagggaaccaaactgtaataagtagtttgtttattatagcccttatatctatttgttttgtttgtatatgtatctgattccgtttttgaaccataactagtttgagggcaaaggccatctttgaatttccaatatcaaacacagcaatagtattttaggcctctgtaggatatatatacatatatctatagttatctatgcatactagttaactgaacaaatttactaaatgtaaaatttctttaatttagagttttaaagagtttatttaaaatgttttccagctttcagatgaaatggagacagagaagaatatagaggtacttaaaatttctgttctgccagattgtatatcaagtgtattatgtaggactaaaataatgtttacaacaatataaacaaggctctaaatatagagagaggtaccagaggagagagttggaaacaggtatagaagctttctctttctgcctagtctttatttacttatgtgtagtctagctaaaattcttgatcatttgagtttatatcaaaattagttctgaaatatgattttgtttttattttagrtatgacatatgaatgtgctagggttcttaatttcaaagaagcagaaaatatgaaggtttttctttttttgcagggggtgtggggaatggggcctcactctgtggcccaggctggagtgcagtggcgcaaccgtggctcactgcaacctctgcctcccagattcaagtgattctcctgcctcagcctcccaagtagctgtgattacaggcacgtgccaccacgcccagctaatttttgtatttttaatagaaacagggtttcaccatgttgtccaggctggtctcgaactcccgacctcaagtgatccacccacttcagcctcccagtgtggtgggattacaggcgtgagccaccgtgcacggccaaaggtttttcttagatgggttatataatttttagttaatttagtaaaaagaagtaaagtaattatgttastgagtgatagttaaatgttggtcttctgtagttatatgagtctactatagtgagaagagtgaaatatttactctcctgttatattttcctctttctagggttgcagcttcacaggattcaaagcaaatgaacttactcagctacccagacatttggatgctgaacaaatttatctttttattttaaaagcccataattttgatgtatgtaaatatttcattttattgtaggatacattttgacagtatgatttaatgaatcagacctttacttaaagctatgataaattaggtgttcaacaagatttgatcctttgggcattaaatttggcaggaaagaccagtgatgtgtctaaccgctaattaccagaaaagaatatattaaactctgtgttactgctttgggaccctgaggttgctagcgtacactggcttggcatgtaaccgtaacaggtgttttttccttcttgtctgttcctgctctgtcagctcaggatgttttagcctgctcatttttgatcctgaaataagttgtgagtgcccttcttcacaacccttctgggtgtttcttttgagtcttcaagtgtctgtgggaattttggggtagtatccctgtagggtaaccaaacagtgaaaaactgcaggtgttgggaggtaattagatcaatagccagtgaatacgagggctaaaatgagggtgggatggttacctggtaaaactggtcattttgccctctatttcagttttctgctctttgtgtttatgtacattacatatgttctttttcattaaaaagtattaaatccaagttgaagctgttatcagtgtacatcatactatacttagtggcctatgaaaaagatgtgtccccacagaatacataataattttcttgccatgagagtttatatgatgtcctttttatagacctgtacttgaagaggaattcatacctctggatgcacttaaaagaaatcttgaatgttactcaatctggcattaaaacattttgtgactaagaagataaaataatctattgaatctgcctatttaaaccaaaacttatattttctagtagttacagtagacaaatttagccatttattccaattttgattaattgtttgcttaggaagaatactacacaggctcaggataggggcttattagaatataagtccatgattgattgttgatatttgtcctcagtggaaaagggggaaataatggcatgaatcttacatttttgctgttcttggtgtcctttcaatatctactagccaaatatgattattgagcatatgaaatatgactagtatgactgaggagctgaattttttattgtatttcttttaactactttatatataaatctaaaaactatatttgatttagttattaaaaagcttttaattatgtttggaagaaaattacaaacatgtattctatgaagtctaaatattaatctagtacttctgatgaaaatgtagtgttcaagttgagatatgctatcaaaaatatataccgtatttcaaatgcctagtactaaaaatagaatccaaaatattttaataatttttataaaaattatgttgaaatgatattttaaatatatttggttaaataaaatgtcactaaaattaatttcactttttacttttttaatgtggctacaagaaaatttaacattatgtatgtggctcatgttaaatttctgttggacagtgctgatctataagcaatgaaagcatactctttataaagcctatttacattaacatgttttgtaatatattttaatctccatgcatctctctcttgtttttttccataggaaagagtttttaaaatctggaagactcattttctctcagaagcctccattgctcttttgcatgactccttttggtggtggtttctccataaatttagggtatagtgatttttaaaaatttattttttaagttgatttttggcataattaatttttcaatagagataagtctagtacaaaaatgtttttctggatgcaactacagagattagtttttgagcattccacacattagaaatcctatatgatgtctagagttctttcagaggagttaaaactttaatatagatttcaaaagattctggatctttgaaattagacttcatatattatatctatcataatatatatcacatattatataattagagtctaagtcagatttttaatcagaagatccagaattagaaaggtgagaattctgattaggattgaacagataaagaaggtgtattagtctgttttcacactgttataaagaaccacctaagactgagcaatttatgaaggaaagagatttaattgactcgtatttccgcatggtgtggaggcctcaggaaacttacaatcatggtggaaggcaaaagggaagcaggcaccttcttcacaggaatgcaggaaagacagaaagggaagggcaagtgccacactttttaaaccacagatctcatgagaactcactgactattacgagaacatcgtgggggaaaccactcccatgattcagtcacctccctcccagtccctccctcgacatgtggggattacaattcaagatgagatttgtttggggagacagagccaaaccatatcagagggggtatctgggaatcaataagagaagaaataaacagcacctgaaactgtgttttactggaagaatttcagtaataatattataatacccttaatgtttaaaaaaaattgctcttgggaccttaactacaaaaaagacaaatacctggaaagtgcatcattcccctctaaacagcaacaaaaggaaggcatttaacttacaaagtcagtttttttttaatccatcatacaaagtagatttcaaagcaatgttgccagggataaagaaagtaattttataatgttgaagtggtcaattcatcaacctaacataacaattccaaatatttatgcacctaataaaaatgcttcaaaacacatttaataaaaacttaatacttcaaagagaaatacacaaatcagtacgtatagagacttcagccccttctttgaatagttggtagaatatacagaaaatcagtaaggatacagtatgatatagaaggcttgaacaacactgtcaagcaacttgactaattgacatttattaaacatctctcttgtattagttggttttgtgctacaataacagaatggtgatttataatgaacagaatgaattggctcacagtaggctgggaagtccaagatagagggaccggcatgtggtgaaggcctttttgctgcatcatcccttggcagcaagtagaagagtgagagagggaacaagcaagagggcccctcctatgataacaaacccacttctgtgataatggcataatctgttcatgagggtaatgtccccaagacccaaacacctcccattaggcctcatctcccaacaccactgcattggggatcaagttttcaatacatgaactttgggggacacattcaaatcgtagcacctcccaataacagcagaatacacatttttctcaagtccacattaaacagttgctaagattaactacattctgagctaggaaaatatcctaataagtttataagaatttaagtcaaacacagtgttttcagatcaacatggaattatattataaaataataacagatatctagaaaatccccaaatatttggaaatgaacacaattctcagttaccatggatcaaatcaggaatcaataaggaaatcaaaaattattttgaactaaatgaaaatgaaaacagattaaaatgtgtgagatataactaaagcagtatttagagagaaaatcatagaattaaaatgcctrcattagaaaaaagagaaagttctccagaaagagaaagttcagcttctaccttaagaaagtggaaaaagaaaaaaaaaagccaaacctatggaaagcagaagaaaataaaataataaagatcagagagaaaattaataacattgaaaagagaaaataaagaaactcaattaggccaaaagttggttatttgagaattctaaaaatgaggtagcacaagagcaaattgaagcctgtgtttcactgagtgaccatagaagaaacaaaacccaaatacagctcattacttgacttgagtccagctcctaaaggcttagcaaaagaagaggaatgcctattcccaagcataaatattatatacctcagtttctacaggcctatgaaagtgccctgctctcaaacagaaggtataagacatataaagaaggaaaggaattgtgggttgtttggtatgaaaatgatcagcttaatgagaaaatgtcacattgtttttccaggtgaatgtacaattttatactcccattgttaatatattgagttcccattgttcctgaacaaccaatgggtcaaagaacaaatcaaaaaggaaatcagaaaataccttgagacaaatgaaaacaaaaacacaacataccaaaacttatgagatgcagcacaagcagtgcaaagagggaaatttatagctgtaaattcttacattaaaaaagaagaaagccatagcaattaggccagagaaagaaataaaagtatcctaatagaaaaggaagaagtgaaatatctctgtttgtaacaacatcttatatacagaaaatcctaaagattccaccaaaaaactgttagaaatgtatgaattaagttgcaggatacaaaatcaacattcaaaaattagtagcatttctgtacactaacaatgaattatacaaaaaagaaatcaagaaaacaattctgtttacaatagtaataacaaaaagtaaaatacttagatttaaacttaaccaaggaggtgagagatctgtatactagaaatataaaatactgatgaaagaaattgaaaatgacacaaataaatggaaagatatcctgtgtttatagattgaaagaattagtattattaaaatgtctatactacccaaagcaacctacagaatcaatgcaatccctaacaaaattccagtgatgtttaaacagagatagaagaaaacagtcctaaaatttatatggaactgcagaagatccctgaatagtctgagcaatcttgagcaaaaagaacaaagcttgaagtatcaccctacctaacttcaaaatatactacaatgctgtagtaaccaaaaaaagcagagtattggcataaaaacagacacatatacgcatagaacagaaaagagagcccccaaatgaatctacgcgtttacaactaattggttttcaacaaagrcgccaagaacacataacagagaatggacagtctccaataactgttgttgggataactgagtatccacatgcagaagacggaaattgaacccttatttcacataatatacaaaagtcagcatgaattaaagacttaaatatcagatctgaaactgtaaaactactagaagaaaacagaggaaaagctccatgacgttggtttgtacggtgattttttgagtaygaagccaaatgtacaggcaacaaaagcaaaaaatagacaaatggaattgcgtcaaactaaaaagcttcagcagagcaaagcaaacagtcaatagattgaagagagaacctgtagaatgggagaaaatatttgaaaaccatacatctgataaggggttaatgtccaaaatatataagcaatttaaacaatttaatagcaggaaaacaacctgattttaaaaggaacaaagtaaattagtagtcattttggaaaatagtatgaagtttccacaaaaaaactgaaagtagaatcaccgtaagatccagcaatcccatttctgtttatatccaaaggagtttaaactgctgtgttgaaaagatttgcattttcatgttcattttagcattaattgcaataaccgagatatgaaagcaacctgaatgtccatcaatggatgaatggataaagaagatttggtatataattatatataatatatatttaatgtgtaatattaaatatattcataataatattaataaattatataaatgcatatgtaatatttaatatatatttaaatatatttatatattatatataatataaaaatatatagcctttaaaaagaaggatatcctgtaatttccaacaacctagatggaactggatgttttgctaactgaaataagccagtcacagaaagacaaatactgtatgatctcacttacatgtggaatttaaaaaagtcaatctcatagaaacagcagaaaggtagttatcagaggccgagggtggggagaaatggggaaaggtgagatgatcaaaaggtgcaaagtttcacttacaccagagaaataagttttaatgatctattatactgcatggtgaccacaataaataatacatttcaaatttgatraaataatttgataaaatttttaaaatgggcagaggctctaaacacttctcaaaggaagacatacaaatagctatgtgaacagtatttgaaaaactgctcaacatcactaatcrttaggggaatacaaaccaaaaccaccatgggatgtcatctcacacaactgtttgatgtgtgagattttatctcacatgactgttatcaaaaagatgaaagataacaagttttggtgaggttatggagaaaaggaaatgcttgtatatgattggaaatatgaattgctacagctaatatggaaaacagtatggatttctcaaaaactaaaaatagaactaccacatgctccagtaatcccacttctggatatacatccaaagaaattgaaatcaatatgtcaaatacataactctatttccacgttcattgcagcacaatagctaagacaggaaatcaacctaagtgtccatcatggaaatcaacctaattgtctgtcaacgaatgaatggataatgtggtgtaagtacacaatagaatatgcttgggycttgaaaaaaggaaatcctaacatttgtgacaacctgaatgaacctggagaacattttgctaagtggaataagccaggctcataaagacaaacatcacatgatctcacttatatgtggaacctaaaaaagttgaactcacagaagtagagagcagagcagtagttacagaggctgggctgaatggcaatgggcacatgttcaaagggtaaagagtttcagtgagacaggaggaataactttttgagatccatagcacaacatggtcactacaattaatagtactatattgtatacttcaaaattgctaagaaggtaaattttaaatgtctcacctcaacaaattataagtaactgagataatggatatattaagtagcttgatttaatcatttcacattgtatacatttatcaaaatgatacattgtaccctataaataaacacaattatgatttatacgttcaaaataataaaacattaaaaatcaaagaagaaagatctgaaatcaaccacaccgtctcacacattaagtaaccggaaacagaacaaattaaatcctaagttaacagaaggaaggaaataatacatattgcagcagagataaatgaaataaagaatagaaaaacagaaaaaaaataaaactagaagttctgtctctgagaagaacaaaatggacaaacctttagctagaatgactattaaaaaatagggaagactataattactaaaattataaaaaartgggggcaatattttcaattttatggaggttgaaaggattataagagtgttgtaaatgaatatatgccaacaaattggaataatgtagttgaaatagacaaattcttagaaacatacaatctaacaagatggaatcataaagaaatagaaaatctagattgtaactattaaggagattaaatcagtaatcaaaaacttcccatcaaagaaaagccctgtaccagatggcgtcactggggaattctaccaacatttaaagaagaataaacaccagtccttctgaaactctttcaaaaagttgaagaggaaacattttctaactcaacctgtaagttagaaggtattactctgatactaaagcccaaaaagacactgcaataaaaagaaactaccaatatcttttatggtgaattttgagacaaaaatcctcaacaaaatactagcaaatcaaaagcaacagcatattaaaaggattatayaccataaccaatgggatttattcctggaatgtaaggataattaactcatcaaatgtttgcatgctttttgttgccaggtactgtgctaaggccttgaaataaaaagttacaaaaatatgatccctgtccttatttaattttactgcacgcctttaagataagtatatattacctacatttgacagatgagaaacccgggacttaattaacttgcccagggtaatacagccaatgcataacagccagtgttaaaatttgggtctgcattatgcgaaaacccatgctgattctcctgtaccaattgatctgctcatgagaataaatgaaattgctgtcatcatgtaaacaaattccagttttaaattgtaatattgactttaatttcacacatttttttaagcctgacagagaaaaccaagattgcttattcgatagaatttcagaaagttatgtgacacttttcatgagcatacctctaagtcgaaaggatgcattttttcaggtaagcattgaaattaacagttatgctaattatttttaaagtgaatgaaatagaaaaaatcgttattttatttaaacccatatgagaatatattttgttacttttgaaagcaaagttggtgtagagtattagtaatattttgaaagttatgctcttattaacccctcaaaatattgtattccctggcatcaaggtcttacataatctccttagtgactacaggaactttgtttgcatattaataattttaaaactactgagtcattctatgtatgttcctgtttttttttctgtttacctacaaaattatttatgacttttcttttactttataatgaatcttgatccayttaagcggactttacaagtttattttatgcccaaggactaagcacctgttacagtaaagcacaatacataaaattatgaatcaaatgcttgctgtgcttttctgttattgtactaactgatggataggattgattcaaataagtaatgtccctgggtagtgtgaaatgaagatggtaggaatctcactgggtgtttttaagtttaatatttagcatttcaaaacacaagtcatattcaaatactttgttgcattagcaatttgtaaatcagaaatcatagtaaatactttggagtttgtaaatgttttcatgagaaagccatacccaaaataaaaaggtgtctttcatgatgaatatataaacaagcctaaattcacaaatttgccaaatatttatatttaatcttgacctatcttactcacaaacacatgtgtaaagtttgatagaaagaaactaccactagtagactgggaataaggatacttggcttcatgtccagaatatgctactgattacctgggtgatctcagcaagccactcagcctctcaggttgacagctgggttgtatatcacatgaagaggttgattaggtcttgattattttaagacagtgattcttaaattgttatcaaacagtgatgttctgacaggttttttcttatttgcagcaaaaagttaatgattaggcatgttgcaattaaattgtctaaagatcacaaaaacagctgtttctgctacccatattctttcagttagcctattcttctatggcttttattttaactatttactgagagtgcctagtccacctacatgattttatgaaatcaagcatgttttagtacagggcccttaagaaaaagataagaggcttttaaatatggacaaagaataaaatggtggtaacattgtgtatcccccattctttagtttctgtttctacttttatgatccaaatgttctcacttgtggtggatgtgtcttttgataaatcttatacttacaacttctctcaaaccatgatttgattttttctggattctgattttcagtaactttttctaagaagaaattagaagttgtttaattaagttgcaaagcctcatttgagaacagacaagatgtacttaatgattagactcctggacttgcactaagtcttcctttaaaactccctgtccatgcatttrtgtgtgagagccacctgccttcaggatctcatcttttattgaccataatttcaattatttttaactaattcaaataagtgagggttttattactattaactcatctgatttatatttcctaaggaagataaatgtattaatatttaagaaagaaaaaaattatcttccagtccactatttagcacaaattaatctgaacctaaatatattttgtatggcttttattttcctttcttccagcatcacacaatgatattctctcagaaattttccaaatagtttgacacttaatctccttcatctcctgaaggcaggatattcatagaaaatgtttagaagttccctttattcaccttgttcaacattttaattttaaccattggtataatttgtgtaccacaaatagaatatgtcatcatttctggtagaaaaaaatgctcatggctcatttaataaaattaaatatgtcaacatattatagagtttttcccttttcccttcacttcccaagaaaaatcatggagatcttaaaagaataccatcacttaccagcaaatttgagcastaatagattaagtgactgtattagtctcctactactgttgtaaaaattatatatttagtggcttaaagcaatagaaattaattttcttagctgtggcggccaggagccccaaatgagtcttacagggctaaaatcaaggtgtcagcaggaccaatgtctttaggagggcccagaggagaatctattccttgcctcttctgtcttctggaggttgccagtattccttagcttatggttgtatcactccaatctctgcttctgtttttgaattgctttctcattttctatagtcaaatttccctcagctgccctcttacaaggacacttacagcccatgggataatctccttattttaagtggggattaagttaagatctttaatcttaacccccaccgaagatctttaactatcacatttgcaatatgcttttgccttrtaaggtaacatttacaggttccagggattagaacatgtatatattttgcaccartattcagtctatcacaatgacttgtaagagactttctaattctaaaattttacaaagtgatgggcttaatgtgtgattataaatacttatctgaatgcagagtatgcaaatagttgtatcaatttgtctttaatataaaaatattgtgtttttctatgttgagtcactccctgagaggaatttaatagtttagggatttgaaagctaacaggatactggtagtcccttayatttgttgatttctgatttttttttttttttttttgagatggagtctcactctgtcacccaggctggagttcagtggcgcaatcacggctcactgcaacctccgcctcccgggttcaagcgattcttctgcctcagcctcctgagtagctgggactataggtgcccatcaccacccctggctaatttttgtatttttagtagagacggggtttcaccatattggccacactgttcttgaactcctgacctcgtgatccgcccacctcagcctcccaaagtgctgggattacaggtgtgaactactgtgcccggcctctgattatgattttaatattgaaatagtactgattgcactatataaactcatgcgaacaacctacagttacttaaaaatatactttttattgctatggctcatatgcatcatttacaaaawttgcaacatttactttaggttcagggagtgcacgtgcaggttcgttacgtgggtatattgtatgaaagatcctgtcatccaggtagtaagtatrgtatagtgagtttttcagtcctcacccccaacacctccctcttctatctagtagtccccagtgtctattgttctcatctttatatctatatgtattcaatgtttagctcccacttataagtgagaacatgtggtatttggttttctgtttctgtgttaattagcttagattaatggcctccagctgcaaccacattgctgcaaaggacatgattttgttcctttttatagctgtatagtattccatgttgtatatgtaccacattttcttcatccagttcaccattgatggatagttaggttgattccatgtctttgctattgtgaacagtgctgtgatgaacatacaagtacatgtgtctttttgatagaacgacttattttcctttgggtaaacacgccttgttatgggattcctgggtctaatggtagttctgttttttaagttatttgagaaatctctaaactgttttccacagtggctgaactaataaacatttccaccaacagtgcataagcattcttttttctctgcagccttgccagcatccattgtttttgactctttaataatgcacactcagattgatgtgagatagtatgtctttgtggttttgatttgcatttctctaatgattggtgatgttgagcattttttcacatgtttgctgcgtgtatgtcttcttttgagaattggctgttcttttcctttatccacattttaatgggattatttcttctttgttgaattgcttaaatcttaagtttatagattttggatattgggcctttgttggatgaatagtttgtgaatattttctcctattctgtaggttgcctgtttatgctgttgatagtttcctatgttgtgcagaagctttttagtttaattagatcctgcttgtcaatttctatttttgttgtagttgcttttgcagacttagtcgtaaattctctgccaaggccaatgtccagaaaggtacttcctaggttttcttctaggatttttatagtattacatcttatatttgtctttaatccatcttgagtcaatctttgtatatggtgataggtagaagtccagttttgttcttcagcgtatggctagccagttaccccaacaccatttattgaatagggagtcctttcctgattgcttgtttygtctacttgttgaagatcagatgtttataagtgtgcagctttatttttggcttatctgtcctgttctgtttgtctgtgtgtctgctgttcaaccagtaccatgctgttttggttactgtaaccttatagtgtagtcagaagtcaggtaatgtgatgtctctgaatttgttctttttgcttgggattgctttggctatttgggctcttttgtgtttctgtatgaattttagaatagatttttctacttctgtgaaaaatagtattggtagtttgataggaatagcattaaatttgtagattgctttgggcagtatggccatttttaacaatgttgattcttccattccgtgagtgtggaatgtttttcygtttgttcatgtcatctatgatttctttgagcagtgttttgtagttttccttgtagagatctttcacctccctggttagctgcattcctgggtattttatttttggcttctgtaaatatgattgcattcttaatttggctctcagctttaacattataggtgtatagaaatgctactgagttttgtacattggttttgtattctgaaactctactggagttgtttatcagtcttacagaccttttggcagagtctttaggatgttctaggtatagaattatatcattagtgaagagagataatttgacttcttttactatttgtatgccttttatttctttttcttgcctgattgctctggctaggacttccagtactagttaaataggaatggtgagtgtgggcatccttgcctttttttggttcttatggggaatgctcccagcttttgcccttttagtatgatattggctgtgggtttgtcatagatggctcttattattttgaggtatgttccttcagtgcctacttttttgaggatttttatcataaagggatgttgaattttatcaaatgctttttctgcatctattgagttgatcatatttttwaaaaaaattatatttatgtggtgaaccacatttgttgatttgtgtacgctgaaccaaccttgcatcacaggaataaagcttatttgatcatggtgaattcacattttgatgtactgctggattttgtttgctagaattttgttgagaatttttgcctctgtgttcatcagggatcttggcctacagttttttttttccttttgtcttttccagattttggtatcagagtgatgttggtttggtagaatatgtgaggagaagccccgctaaggttcctcagtttctttgaatagtttaactagggttggtaccagctcttcaactggtagattttactatgaatccatctggtacagggttctttttggtacataggtttttattattattattactgatttaacttcagaatttgatattggtctgttcagggtttcaatttcttcctgcttcagtcatgggaagttttatatttctaggaatttattatttattctagattttctaacttgtgtgtgtagtgttgttcataatagtctctgagaatctattgtatttttgtgggattgtttgtaatatctcctttgtcatttctgaccatgtttatttggatcttctccttttttctctttattaatctagctagtggtctattgacattgtttatcctctcaaagaatcagcttttggcttggatgatcctttttatggatttctgggtctcaacttcattaagaactgctctgattttagttacttcttgtcttctactagctttggggttatattgtttttatttttctagttcctttaggtgtaatattatattgttaatttgagatccttgtaacttctctatgtaggtgtttagtgctatcaactttgctcttaacattgctttggctgcataccagaaatttgggtatgtcgtgtctctattttcatttattccaaatattttgtttatttgtgtctaacttagttgtttaccaaaaaactatttaggagcaagttgtgtaattttcatgtgattttctggttttgagagatcttcttgatattgatttgtgttgttattccactgtggtagtatttaactttttttgaatttattgagacctgcttcatggctgagcatgtggttgatcttagagtatgttctatgtgaagatgagaataatgcacatttctagttgatgggtggagtgctctgtagatatttgttaggtccaactgatcaagtgttgaatttaagatcaggacttctgtgtcagttttctgccttgatgatctgtctaatgctgtcagtggggtgttgaagtttcctactaatattgtgtggctaagtcttttcataggtccataagtacttgttttattaatctgggtgcttcaatattggatgtgtatatatttaagaaagttaaggcttcttgttgaattgaaccctttatcattatgtggggccttctttgtccttttttactgttagcagttaaatgtctgttttatcttataagaatagctactgttgctcttttcttgttttccctttgcatggtagatctttctccaaccctgagactttaggtgtcattatatgtgagatgggtctcttgaggaaagtagatagataagtcttgtctttcaagtcaacttgccactctgttccttttaagtggggcattaagacaatatacgttcaaagtaagtattgatatgtgagattttgattctattgtaaagttcttagcttattgttttctatcttctattatgtacttgctttattgggtatgtgggttatatacttaagtttaattttgtgttagtaggtgtcatttttttgtttctacatttagaactcccttaatgatctcttataaggctggtatagtggtaataaattaccttagtgattgcttgtctgaaaaattttctatttctcccttacttatgaagcttagtttagtgggatatgaaaattctttgtgggaatttattttctttgacagtgctgaaaatagacctccaatctattctggtttgaaaggtttctgctgagaggtctgctgtaagcctgatgagattcccttcatacataatctgaccattttctctaggtggctataagatacttttattagcattgaccttagacactctgttgactatatgccttcatggtattcattttgtatggtatctggcaggtgttctcttgattttttaaatttggatgtctacctctctagcaaaattaggaaatttttcttgaattattttttcaaatacgttttccaggttgtgaacttgttctccttctctttcaggaataccagtaattcataggtttggttgctttacataataccatttttttgatactttgttcatttttcttaattattttttatttctttttgtctgactgggttagttcaaaatactgatcttcaagctctgaaaatttttcttctgcttagtctagactattgataaaactttcagtggtattttgaaatttctttggtgagttttttatttccagtgctctaattgatttcttttcatgatgtttagcacttccttcatttcctggattcctttagaagtttctttgtgttgatttttaatcttttcttgaatctcattgagcttccttgcaatccatgctttaaattcttacttgtcatttctgagtttctttttyggtcaggaaccattgcggaggaactagagtgatcttttggtggtgttgcaacattcaggtatttttggtgtcagaattttttttttttcgagacagtcttggagtctcgctctgtcacccaggctggagtgcagtagcacaatctcagctcaactgcagtctccacctttcaggttcaagtgattctcctgcctcagcctcctgagtatctgggattacaggcacgtgccaccacgccctgctaatttttgtatttttagtagagacggggtttcaccatgttggtcaggctagtctcgaactcctgacctcgtgatctgcctgcctcagcctcccaaagtgctgggattacaggcgtgagccaccacacccggcctatagtgtcagaattcttatgctagttcctgcttgtctggagaggagtgggtgggtcttttggcattgcctctgttgacttatggtgttttggctttgcttctattgccttatgcacttccgtgggctggttttatattgagctgtgcagtttgacctagaagttggtcagtggtgctctcaggtgagagccagttgcaacataagcaggtaggtaggtacctgatctttgtttattgaggtgctctctgttgtttcaagtgaaggactggacattggagtacctggtgccataagtttcctgttctgtggggttggagagacacagctggagccccttgctttcccacaaatgcccaaatggcaagcacaggcacctgccctgatgagggttaatgggaggagttccttatgaagtgcactaaagactctgcagggagttgagatggttgcaccagcttcctatcctacataggcaggaacttgatctgttttcctattacacaattgttccagggctcatgactcctagtttagattcatattctagtctatctctggactacartgaggttgagagccacagtaaatgcctgttttgtgmctctctgtgggagtggtttcagggcataatttaatctctgaacctgatacagacagttttatggctcacgtctttgccagtgtgacagtactgctgctgcttgtaaatggtgggtgggcggggggtctccacctttgggcccacatgagtgagttttggttctggtggtgrtgactggttaggtcagcctgactttgggccctggggaagtggtccagtgcctgtagagttggaacagggtaggggtagggtacgtaggtaatttccaggctcctcgatggcttgcagagcaatgggtatgagtcctgaaagggctgtgccagaatcaggctaacccagagttcaagtgctggttatgatgaagagtggcgggttggtccctgggtcactggccaaactcttaggtggcagcaggtaaaatgcttagatggtggaaaccaggggcaggcagaacacttaggtggggggaaccaaaaggaatatcacaaacctgtgggagttgggttttcagaatggctgtggactgcagatgaaatgttcaagtagggtaagggtggctatgcagtgggcctttcactgaggaggggaagatccctcagctggagcaatggagactggcagctgtggggcacatggcacacttgcacttcacttttacccaagcagtgctagacttcactgtcagaacaatgcaaaggtgccaagccttgtttgttaccttttggagttttgtcccagagaaatgcagagctgtgactgacaacaggtgtttaggtggatccagggctgctgcactaggagcccaggttggcaagccctgccttgcaaggagcagtgtgggtaggggtcacacggtctttagtctgggtgctttctggagaaatgcagagctgtgaccacccacagtattcaggcaaagttggggcatkmsgcattaggagcccaagtcagcaagccctgccggrtgaggagcagtggggataggaggtcacatagtctgcagcctgggtgcttcctggagaaactcagagccatgaccacccaggttcaggttggggtggggccactgtgctggaaacccatgctggcaagccttgcctactgaggagcagtggggcagtctggctgcttcttagcaccatggctgcagcctctgttggggctacagcagatggcactggactactcagggattcaaggcctgtagggccccatgtgggcttcaatggttcttctgcaaagactctaggtggctctccatctcaatctggaggctcctgggggtcaggaatatctctcatgtccgggattgcaaaggtctatcacagaagtatagatcccctcaggactctcactcactcacctttccctgcgtgagggagcttcccccactctccatcagttctgggtgggcagctgcctggcttcgctcctcttgttctctgttggtcctgttgcttccttggtgaatcttcatgggatctccttgacaatccacttgaggaactagtatttactcaccactttgtttcatctccatgagagcagtgtatactagctgcttcccatctgtcrtcttaaactcctctgtacatgactttctaaaagaggaaagcaacagcaaagttaagtgaaatgaataattatgaaaycttaattgttcattttattctctatctgaattaagtttttttcccaaaacattgtcagattgactggattttcaactcttacttgtttatgtccctcaattaaaggtacaaagaagtaataaaatggccaaaagcaagttataagaaaaaaaaagacatatatatttcataaagtaaataataatttctaaggtggctgactagatgcagccagaaggaatatctgctaccaagggactgggacactgggaagacttgtgcactctgagcatatcatcagagggaaggcactgagagtggatggagggagaacacacatactgggatggagggggaggaatatgggaactctgcatggggctaccatgcacaaggacttcttcctggccccagtgactcctggggaagaggtgagatgagcaggcaaggggcaacccactctcaccagggacctctggaatcctggcatcaaaggacccatgacccctatggacgcttgagctagcagggagagctggttggagatatgttggagcaggactgtagcctgtgcagaggccagagggattagtgcgggaatgtctgtgatggagcacaaccagaaatacccatacctgaaggcttgccatgctaccctaggagactttcattttaggggaactgtcagacctgaacagagcagggtatccttgcctcggagatgggccagtctgacctgagtgccccctgtctgtcagcctctccttgggtccagcctttccatggttgcttgcagtatggcaatggatgcccaaatgggctgcctcccgggggcctacattaaagctcttgcagtggcaaacagtgcctggccatcaagagttccaacagaatggcccctgtctgatgaagtgcttttgctggcaccacacatcagaatgttgtggcctgtggcccaagaacactttagcccaccagcacagcagatttctaacctcaaggggccagggaacaaagctggggcaggataccagctctccagagttagagcaccctgcccaggagtgctgagctgagctgtatagccttctaatttctttcagaaacaaagtcagtaaactgaagccaccttatacaacaattaaacccctgacaaaatcaaataagataaaagaaaaaaaaatccaaagaaagcaactttaaagattgaagaaacatcagctcatgaagatgagaaggaacaagtgcaagaactctgggaactcaaaaagatagactgcttacctccaaataactgtactagttccccaataatggttcttaatcaggatgaaatggttcccgggtcacttgtcagactcgatgagcaggtcaaatatgcatcgataataacctaattctagatacagaatttagaatacagattaaaaagaattcattgaaattcaatccaaggattctaaggaatacaataaaatgatacaggyggtagaagacaaaatggccatttttaaaaagaagaagcactgatacagctgaaaaacgcacttcaagaatttcagaatacagttgcaagtattaatgcagaatagaccaagctgaggaargactcttcatggctcaaagactgattctccaaaatcaaccaatcagacaaatacaaagaaaaaacaatgaayaagaatgaacaaaaccttctagagatatgggattatgtaaagagaccaaatctatgactcattgacatccttgaaagagggagagaaagcaagcagcatggaaaacatttcagaatattgtttgtgaaaaattacccaccctcactagagaggccaacattcaaattcaggaactgtgaagaactgcaaaatactatacaagaagaccatatccaagtcacatagtcatcagattctccaaggttgacatgaaagaaaaacattaatggcagctagagagaagaggcagtcacctacaaaggaaacctcaccaatttaccagcagaccttccagcaaaagccctacaacccagaagagactggcagcctatattcagcattcttaaaggaatttccaaacaagaattaatatccagcyaaactaaacttcataagtgaaagagaaataagctccttttcagataagcaaatgttaagkgaattcactaccaacaaatctgctttataagaggtcccgaagagagtgctaaatatggaaaggaaagatttttactggccactaaaccaacaacattataaagcaatcacataaagaagtctgcrtaataaccagctaaaaacacaatgactgcattaaatctgcatatatcgataataaccttgaatgtaaatgggctaaatgcctcaattaaaagggacagagtgacaagttgaataaagaagacccaactgtatgctgtcttcaagagaccaatctcacatacagtgatacccmyaggctcaaagtaaagggatggagaaaaatccacctagcaaacagaaaagaagcagaagttgctattctagtttaagataaaacaggcagaggcagagcacaatggcagaatagaaacctcactgattgtccccccacaagaacaccaagttaacaactatctacacagaaaaaaacaccttcataaaaaaacaaaaatcaggccaagtacttatagtgcctagttttagcttcatatcactgaaagaggcactgaagagataggaaaagcagtctggaatcaccaacaccacccctccccaacccccagcagtggcagtgtagtgcagagagcatttctgggtgctggggaaagaacacaacattgtgagatagttaactcagtgctgtcctgttagagcagaaagaaaaccgaaccaaactcagctgataccggcccacagagggagcatttaaaccagccctagacagaggggaattgtggatcccagcggtcagaacttgagaacctgcaaaccttgccacagagggctacacattctgtgtctccaagtaaatctgagagtctaggccataaggactgcgactcttaagcaagacctattactgaacgaggtccagagacaatggactggagtgtgcacgcaacatagtgacacatcagtaggggcagccaagggagtaccggcatcacctctctcataaccccaggctgcacagctcacagctctgaaagagaccccttccttctgctagaggaaaggagagggaagagtggggaggactttgacttgcatcttggataccagctcaaccccagcaggatagggcatcagacagagatgggaggcccttattccaggccctagtttccagatgacatttctagacacaaactgggcaaaaatggaacacactgccttgaaggaaagggcccaatcctggcaacattatcacctgctaactgaagagcccttgagccctgaataactagcagcaatacccaagtactacattgagggccctgggtgatactctgagacttgctggcttcaggtaccagcatggccacaggtggggagagcatcagctgtgctcttggggtccccaattccaggacttgactcttgggcagcatttctggacctgccctgggccagagaggagcccacttccctgaaggttgtgtcccaggccaggcagcattcaacaagagctgatttaagagcctgtggcccttaagggaacattggctgatagtgtggcaatattcctcatggcatggtgtgacagtggctacagggtgagatgactctgcctttggaaaggggagggaagagtaggaaggactgcatcttgtgatttgagtgccagctctaaggttttttttctttagtctctggctcccaggcagcacacctggacctaccaggggcctggggaacctcgccaccctgaagggaaggacacaggcctggctggctttgccacttgctgattgtagagccccagggccttgagcaaacatatacagtagttagggagtgattgctgcaggccttcagtgagacccagcattgttctggcttcacgtcttacccaaagcagtcataatggtgatagccacaggagtgcttgtgtcactccacctacatttttaggtgtcagaacagaaagagagattctgtatgtttgggataaagtaagggaggagaaaaaaagtctctgcctggtaattcagagaattacctccacaagtctgcaagaaccacagtgttactgggcttggggtgtcccttaaagtagatacagcttatatcacaacacccaagctctttcaagtatctggaaaaccttcccaagtagarcagctataaataagcgcagacagtgaatattacaataaatacctaactctttaatgcccagacaccaaagaacatcaactggcatcaacacatccaggaaaagacttcagcaattaactaaataaggcaccagggaccagtcttggagaaacagagatatgtgacctttgaaacaaaacttaaaaatagctgtgttgaggaaactcaaataaattcaggataacccagagaaggaatctgaattatatcagataaacttaacaaagagatagaaataaaaagaagcagaaattctggagctgaaaatgcaattggcacactgcagaatgcatcagagtccttaaatagcagaatggatcaagcagaagaaagaattagtgagcttgaagataggctatttgaaaacacaaggaaatcaaaagaaaaaaacaaaaaacaatgaaacatgcctacaggatctagaaaatagcctcaaaagggcaaatctgagttgttggccttaaaaaggaggtagaaaaagagatggggtagataggttattgaaagggataataggcaatttccttaaacctaaaggaaaaataccaatatccaagtacaagaaggttatagaacactaagcaggtttaacccaaagattacttaagatgtttaataatcagactcccaaaggtcaaggataaagaaaggacctgagagcagcaagataaaagaaagaaacaacatacaataatgctccagtacatctggcagcagtcttttcagtggaaaccttataggccagaagagaatggaatgatatatttaaagtgctgaaggaacaaaaacatttacccaaagtagtatatctggcaaaaatatccttcaaacatgaaggaaagataaagatattcccacacaaaagctgagggatttcagcaataccggacctatcctacaagaaatgctaaagggaggacttcaattagaaagaaaaaacattaatgagcaataagtaatcacttacatttacaaaactcactggtaatagtaagtacacagaaaaaacacagaatattaaaacactgcaactgttgtgtgtaaactactcttatcctaagtagaaagactaaataaaggaggaaccactcaaaaattataatttcaacaactttttaagacataatacagtaagatataaatagaaacaacaaagagttaaaaagtggggggacaaatttaaaccattgagtttttattagtttgtttatggaaatagtattatgttgttaccaggttaaaatatgggttttaaaatagtgtttgcaagcctcatggtaacctcaaaccaaaaaacatacagtagatacacaaaaaatacaaagcaagaaactaaagcatgtcaccagagaaaaatcacattcactacagtaagacaggagcaaagaaagaaggaagagaagaacacagaacaagaaagcaaataacaaaatcacagaagtaaacccttacttaccaataataatattgagtgtaagtggactaaactctaattaaaagactggctgartggatgaaaaaacaagactcattgttctgttgccgacaaaaaacacacttcacctataaagatacacatagactgaaaataaagatatgaagaaaggtattctatgccaatggaaaccaaaaaaaggaattgctatacttgtatcagacaaaatagacttaaatacagaaactataagaagaaacaaagaaggttattacataataataaaggggtcaattcagcaagaggatataacaatttaaaaatacatatgcgtcctctccctctccctctccctctccctctccctcatgctgagccaaagctggactgtactgctgccatctcggcccactgcaacctccctgcctgattctcctgcctcagcctgccgagtgcctgcaattgcaggcgcgtgacgccacgcctgactggttttcgtatttttttggtggagacggggtttcgctgtgttggctgggctggtctccagctcctagcggcgagtgatccgccagcctcggcctcccggggtgccgggattgcagacggagtctggttcactcagtgctcaatggtgcccaggctggagtgcagtggtgtgatctcggctcgctacaacctccacctcccagccgcctgccttggcctcccaaagtgccgagattgcagcctctgcccggccgccaccccgtctgggaagtgaggagcgtctctgcctggccgcccatcgtctgggacgtgaggagcccctctgcctggctgctcagtctggaaagtgaggagtgtctctgcccggccgccatcccatctaggaagtgacgagcgcctcttcccggtcgccatcccatctaggaagtgaggagcgtctctgcccggccgcccatcgtctgagatgtggggagagcctctgccccgccgccccacctgggatgtgaggagcgcctctacccggccgtgaccccgtctgggaggtgaggagcgtctctgcccagccgccccgtctgagaagtgaggagaccctccgcctggcagccgcccatctgagaagtgaggagcccctccgcctggcagctgccccgtctgagaagtgaggagcccctccgcctggcagtcaccccgtctgggaagtgaggagcgtctccgcccagcagccaccccgtccgggagggaggtgggggtcagcccccgccaggccagccgccccgtccgggagggaggtgggggggtcagcccgccgcccggccagccgccccgtccgggaggtgaggggcgcctctgcccggccgcccctactgggaagtgaggagcccctctgcccggccagccgccccgtcagggagggaggtgggggggtcagccccccgcccggccagccaccccgtccaggagggaggtggggggatcagccccctgcccggccagccgccccgtccgggagggaggtgggggggtcagccccctgcccggccagccgcccccgtccaggagggaggtggggggatcagcccccagcccggccagccgccccgtccgggagggaggtgggggggtcagccccctgcccggccagccgccccgtctgggagggaggtgggggggtcagccccccgcccggccagccgccccatccgggagggaggtggggggggtcagccccccgcccggccaaccaccccgtctgggaagtgaggagcccctctgcccggccaccaccccgtctgggaggtgtacccaacagctcattgagagcgggccatgatgacaatggcggttttgtggaatagaaagtggggaaaggtggggaaaagattgagaaatcggatggttgctgtgtctgtgtagaaagaggtagacatgggagacttttcattttgttctgtactaagaaaaattcttatcctgttgatctgtgaccttacccccaaccctgtgctctcggaatcatgtgctgtgtccactcagggttaaatggattaagggcggtgcaagatgtgctttgttaaacagatgcttgagggcagcatgctcgttaagagtcatcaccactcccttatctcaagtacccagggacacaaacactgcggaaggccaggccacagggtcctctgcctaggaaaaccagagacctttgttcacttgtttatctgctgaccttccctccactgttgtcctatgaccctgccaaatccccctctgcgagaaacacccaagaataatcaataaaaataaataaataaataaataaataaaatacatatgcaaatcaataagagaagaaaatttgaaagtaaacgtggaaattaaacaatatgctcctcatgaagaaattaagaaagaatttgaaaaatctctttaaacaaacgactatggaaacacaacatgccaaaatccatggaatagggtgaaagcagtactaagaggcatatttatagctgtaagtgcctacatcaataaagaacaacttcaaagaaacagtctctaacaatgtgtcttaaagaattagaaaagcaagagcaaaccaaacccaaaattaggagaagaaaataaataataaagatcagagcagaagtaaatgaaattgaaatgaaaacaaatgataagaaagattaataaaacaagtttgttttttgaaaagttagaaaaaattgacaaatcgttagccagactaagtaaaaaagacaagatacaaatcagaaatgaaaaaggagacattgcaactgatactgcagaaagtcaaaggattattagttgctaccatgagcaactgtatgccaataaattagaaaatctagaggaaattgacagatttctaaatattaccacctcccaagattgaaccaggaacaaattcaaatcctgaacaaaccaagtaatgagatcaaagccataataaaaagtaccccagtaaggaaaagcccaggacttgctggcttcactgctgaattctaccaaacattcaaagaagaactaataccaattctactcaaactatttccaaaaaagagaggaggagggaatactcccaaactcattctacaaggcagtattatttggataccaaaactagacaaaggcacatcaagaaaagaaaagaaaactacagaccagtatcactgatggatattgatgcaaaaatcctcaacaagatactacaaaccaaattcaacaatacgtgagaaagatcattcatcaataccaagtggcatttattcckgaagtggaaggatggttcaacatatgcaaatcaatcaatgtaatacattgtattaacagaatgaaggataaaacccatatgatcatttcaactgatgctgaaaaaaakcatttgataaaattccatatcccttcataataaaaattatcaaaaaattggtgatataaggaatatacctcagcatagtaaaaaccatgtataacagactcagagctagtatcatgctgaatggggaaaaactgaaagtttttcctctaagatctggaacatgacaaggatacacactgtcaccagttgttcaacatagtactggaattccatctgctgatgaagagaatgtatattctgaagttgttggtagactattctgtaaatatctgttaagtccatttgttctagggcataatttatgtccattatttctttgttgactttccatcttgatgacctgtttggtgtcgtcagtgragtattgaagtcctctactattactgtgttgctgtatatctaatttcttgtgcctagtaataattgttttacaaatctgtgagttcctatgttagatgcatataagtttaggattgtgacattttcctgttggactgattgctttatcattatataaatgtctctttgtcttttttaactgctgttgctttaaagtctattttgtctgatacaagaatagctactccttgttggtttaaagtctgttttatcagagactaggattgcaacccctgcctttttttgttttccatttgcttggtagatcttcctccatccctttattttgagcctatgtgtgtctctgcacttgagatgggtttcctgaatacagcacactgatgggtcttgactctttatccaatttgccagtctgtgttttttaattggagcatttagcccatttacatttaaagttaatattgttatatctgaatttgatcctgtcattatgatgttagctggttattttgctcgttagttgatgcagtttcttcctagyctygatggtctttrcawtttggcatgtttttgcagtggctggtactggttgttcctttccatgtttagtgcttccttcaggagctcttctagggcaggcctggtggtgacaaaatctctcagcatttgcttgtctgtaaagtattttatttctccttcacttatgaggcttaatttggctggatatgagattctgggctgaaaattcttttctttaagaatgttgaatattggtccccactctcttctggcttgtagtttctgccaagagatccgctgttagtctgatgggcttccctttgtgggtaacccgacctttctctctggctgcccttaacattttttccttcatttcaactttggtgaatctgacaattatgtgtcttggacttgctcttctcaaggagtatcgttgtggcattctctgtatttcctgaatttgaatgttggcctgccttgctagatgggggagttctcctggataatatcctgcagagtgttttctaacttggttctattctccccatcactttcaggtacaccaatsagacgtagatttggtcttttcacatagtcccatatttcttggaggctttatttctttttattctttttcctctaaacttctctgctcatcatcactggccatcagagaaatgcaaatcmaaaccacaatgagataccatctcacaccagttagaatggcgatcattaaaaagttaggaaacaacaggtgctggagaagatgtggagaaataggaacacttttacactgttggtgggactgtaaactagttcaaccattgtggaagtcagtgtggtgattcctcagggatctagaactagaaataccatttgacccagccatcccgttactgggtatatacccaaaggattataaatcaygctgctataaagacacatgcacacgtatgtttattgcggcactattcacartagcaaagacttggaaccaacgtaaatgtccaacaacgatagactggattaagaaaatgtggcacatatacaccatggaatactatggagccataaaaaatgatgagttcatgtcctttgtagggacatggatgaaaatggaaaccatcattctcagcaaactgttgcaaggacaaaaaaccaaacactgcatgttctcactcataggtgggaattgaacaatgagaacacatggacacaggaaggggaccatcacacaccggggcctgttgtggggtgaggggaggggggacgratagcattgggagatatacctaatgctaaatgacragttaatgggtgcagcacaccaacatggcacatgtatacatatgtaacaaacctgcacgttgtgcacatgtaccctaaaacttaaagtataataataataaaattaaaaaaaaaaaaaatagctactcctgctcccttctggtgagatcatatgataggccacaaaacaagtctcaataaatttaagaaaatcaaaattatatgaagtactctttcagaccacagtagaataaaattagaaattactccaaaaggaaccctcaaaatgataccaatacatggaagttaaataatctgctcctgaatgatctttgggtgaacaatgaaattaagacgaaaattttaaaattctttgaactgaacagtaatactgacatgacctatctaaacctctgggacacagcaaaagccatgctaagaggaaagttcatagcattaaatgtctatatcaaaaagcctaaaaaagcacaaatagacaatctaaggtcacatctcaaggaactagagaaacaagaacaaaccaatcccaaacccagctgaagaaaatcaacaacaaagatcagagcagaactaaatgaaattgaaacaaaaaactataaaagacaaacaaaacaaaaagttgattctttgaaaagattaacaaatttgacacaccattagcaagattaagcaagaaaatagaagatccaagtaagctcaattagaaacaaaatgggagacattacaaccgataccacagaaatacaaaagatcatttagggctactatgaacacctttatgcacacaaattacaaaawctacaggagatggataaattccaggaaatatacaactgtcctaggttatatcaggaagaaatagaaactctgaatggagcaataacaagtagtgagattgaaacagtaataaaaaaattgccaaaaaaaagtttgaggatcagatgaattcacagctgaattctatcagacatttaaagaagaattggtaccaattttactgaaactattccacaagatggtgaaagagggactcttccctaattctatgaagccaggatcaccctaataccaaaaccaggaaagaacataacaaaaaaagaaaactacagaccaatattcttgatgaacatagatgcaaaaatcctcaacgaaatactagctaaccaattccaacagcatatcaaaaatatcatacaccacgatcaagtatgtttcataacagggatgcagggatggtttaacataccatcaatatgtcaataaatgtgatacatcacaaaaacaaaattaaaaagcatatgtttatctcartagatgcagaaaaattatttgacaaaatccagcatcactttatgattaaaaccctcagcaaaattggcaaagaggagacatamctcagggtaataaagccatctatgacaaatacacagccaacattatactgaatggggagaagttgaaagcattgccccctgagaactggaacaagacaaggatgcccactttcaccacttctatttaacatactggcagtcctagccagagcaatcaaagaagagaatgaaataaagagcatccagatgagtaaaaaggaagtcatactgtcactgttttctgatgatatgattgtatacctagaaaaccctaaagtcttcatccaaaaagctcctatatctgacaaattcattcactaaagtttcaggatatgaaatcagtgtacacaaataagtagcactgctatacaccaacaacaaccaagctgagaatcaaatgaagaactcagtccgttttacaacagctgcaaatataaataaattaaataaataaataacttgggaatatacctaaccaaggaggtgaaagacctctacaaggaaaactataaaacactgctgaaacaaatcacagatgagacaaacaaataaaaacacatcccatgctcacagataggtagaatcaatattgtgaaaatgatcatactgccaaaagcaacctacaaattcagtgcaattcccataaaagtaacatcatctttctgcacagaactagaaaaaattctaaaattcatatggaaccaaaaatcccacaaagccaaagtaagactaaacaaaaagaacaaatttagaggcatcacattacccgacttcaaactatactacaaggctatgttaccaaaacaccatggtactagtataaaaataggcaagtagacaaatcgaagagcatagaaaacactgaaataaagccaaatacttacagccaactgatctttgacaaagcaaacaaaaacataaagtgggaaaaggagaccctatttaacaaatggttctgggataattggcaaaccacatgtagaagaataaagctggatacttgtctcttatacaaaagtcaactgaagatggctcaaagacttaaactaagacctgaaaccataaaaattctagaagataacattgaaaaaactcttctagacattgctttaggcaaagagttcatgaccaaaaaaccaaaagcaaattcaacaaaaacaaaaacaaacagatgggacttaattaaactaaaaagcttctgcacaacaaaagaaataatcgtcacagtaaacagcctcctgagtcggtgcaaacatttgcaagctatgcatccgacaaaggactaatatccagaatctayaagaaactcaaacgaatcagcaagaaaaaacaaataattccattaaaaagtgggcaaaggacatgaatagacagttctcaaaagaagatatacaaatggccaacaaacatatgaaaaaatgcactacatcgctgattattagggaaatacaaatcaaaaccacaatatgataccattttactcctgcaagaattaccataagtaaaaaatccaaaaataatatatgttggcatgggtgtggtgaaaagggaacacttttacactgctggtggtaatgtaaacaaataaaacaactatggaaaacagtatgaggattactcaaagaactaaaagtagaactaccgtttgatccagcaatcccactactgggtatctacccagaggaaaagaagacattatatgaaaaagtcacttgcacacgcatgtttatagcagcacaatttgcaattgcaaaaatatgaaaccagcctaaatgcctatcaaccaacaagtggataaagaaaatgtggtatatatatatacaaaaagaaatgtttataaaaagaaataatctgttcacaaacctccttcacatgtaatttacctatataagaaaccagcacatgtccccttgaatataaaataaaagttaaaaatattaaataaatgtataactagttttaattatatatatatatatttatatataaaatggaatactactcagccattagaaggaatgaaataatggcattcacagcaacctggatggagctgcagacaattattctaagtggagtaactcaagaatggaaaaccaaacatcatatggtctcacttatacatgggagctaagctatgatgatgcagaggcatacatatagtggactttagggactcagggggaaggatgggagggggatgggaatgggagggagatgagggataaaagcctacaaattgggtactgtgcacattgctcaggtggcgagtgcaccaaaatctcagaaatcaccactgaagaacttttccatgcaattagataccacttgttcccccaaaactattgaaatcaaaataaatttttaaaacaacaacaacaatccaacccaaataatttcatcatctccctccactggctgtgactcagacttactttctcaataaattgtactaatgtttataaaaagaaataatctgttcacaaaaccttcttaacatgcaatttacctatataagaaacctgcacatgtacccttgaatataaaataaaagttaaaaatattaaataaatgtaaaactagttttaaaaactaaaatttaaaatcataaggaaaccaaagaaatttaatttccaggtggttggagggagtggagagggtggcattgctccttactgaaacatattccagttcaaatttagctttcaggcatagtgacgtacattaatttatataaatgtgattttagaatttaaaaamtggcgaatttttattcggttaataaattgcaaggcaaatttaaaaaataataatttctttggcagctgacatatattaaaatttaaaaatataaaattaatctaatttgattttattttggtagatatatcctgattgtttggcacaagccatatatgcaacgttccatgaagcatttccagaatcgagttacctctttaatgatgaatttaaagaagatctagggaataacatttttctttggtgttcaggtatgaatatatcatttaaatattaatcattgttttggtttctaaaattttggggttgcagtattttatttattccatccaaaaatattggtagttctttttcttacaaagcatgccatagcagtacccatgtgttaaaataaatgttrtttattttcttctgaacatttcattataccataattaattacttattaaatttagagccaaatatcttataatcaatggaattattatggaaaactgaaatgtcacagaaatagtcataccatgtatgtactatatttggaccatacatgttttaaactgcttttagaatactacttatatttaattagcgaataatattatttaggataaaatctagaaataatttaatttctcagagaacattaatcaaggaaaacctgtttgtgaatcactgtgtgtgtgtaggtgaaaatggtaggattgaaaagctaaaggaaagcaaaactctatcctagaacatttatcaagaaatttaagtactagagtttaaaactaaggtatagaaatatagtttcatgttcctagaatgacctcccagcattttttataagattattattattaaccaccagaagctattaactgttttcacatagttcttgtaaatatttcaatctaaatgttatttgatttttaaaactgcttaatgtcagtttttactaaccaaatcacttttataagaaaatgttttatactttatggagggagcctttgagaggtaaagacttgaaaacaaccctgagaaaccacctatgaatacacacgggtaagaatctcctgccagttatataaaaaatcaaattaattcaaacataagaaacaaaaacgaaatgaccactgcattcaaacaaagatactacaagaaaaggacatgatgaagggcagaagaattttctacagacatgttatgaactgaattgtatcttccccaaaattcatatgctgaagtaaattcatctctactacacctcacaatgtgactgtatttggaggtgtgatctttaaataagtaattaaggttaaatggcattacatgggtgggctctaatccaatatgattggtgtccttataagaagtgggagagataaatgatatgagcaacacggtggattaggttataccagcttttatctctctcacacacacacaaaataattagacagctacccatgaacaaaaatagtcctagaaggggttaagagtcaaatttaaaacctacagcaaaacagtacagcaaaaaccaataattgcacagaaaggatttctggggagattggcatatgtgagacatctggatacagctaggaacaaagaaagatggggaatatcagaatcagtcatgaggcaggtaccactctggtctccagtggcctgctctgcaaaggatcctagcaaccttttctactaaggacttcaacagttcctgaggcagccacacactccctgcagctttcacatcagatgtccycttagtgttcatcctttctgtcttcaggacacaggacactgctggctcttccactgagatggttaaccaacagccattgctgttttgacctcctggagagagagagagasactgctgtgctccakcctcaataagaagccactgttgtgctacccagggccaggacctactcacatccaaaaccatgcatgccacagactccagagccacagacactctttgcatacccacattctaggcctcagctttgttgcaggagcatgcatgtccatgtttcatattccaaagtcattttcacgacaagctagcctgcacctgggaccatggagccacttttactccacacatgtcttcactttaaattctagctctacagccactccataaacacctcctatggacaccagagccactgctgcagcatctgcatctgcattgtggactctagagcaacagtaaatttgcacatgcccatgctctggamcccagatcctagggcaacacctgcacccatgacactggacccactgcaacaccacctcagattcctgagctctgcctgaatttactctccagacctcattttcttgtttctccaaaagttcccatgtcccacaaaccattattaatgctgctgcagagggacctgcaccacaggcaccaatgtccctactgccccagaccctggagccactgactcttcatgtgtactcatactccaaatcctggcaccatggccattttgtgggcactgaacatcagacactgatgccaccactactaccaccacgaagatgcccacaaactgaacctggcatttttagggatatctgtgggcatgaattccactatgggagaaaaagagattagtaagatcccagcagcctttgtagctgaagacgctaacaaccctcacagccattgcagacaccactagccttggcgactgaggatgctgcaattttcagtgatgctgacctcatctgacagagctgcatggggaatgtaagctgttgcatgctcaccaagccagaaacactacacctcacctagtcaatgccttcacacccacccatagttgaagctctttccccaccaaaaccagcatgtaaattctggaagaggtgactgcaccatcaaatgtgcagacattaatgcaaggcaaaaagaaacaaggaaaacaaacatgataccgccaacagaatgcaataattttctagtaactgacccaaaataaatggatactcaacaatttcctgataaagaattcaaaataattaaggaaactaagttaactaaaaagagaacacagatagacaactaaacaatagaaaaagatacttgaaaacaatgaggtcaatgaagaaataggaatttaaaaaaccagaactctggagtttaagaatacagtgaatgaaatgaaaaatgcaatagacagtgtcaacagcwgacttgatcaagcagaagaaagaatctgtgaactctaagacaggtcaattgaaagtatccagtcagaggagcaaaaggaaaaaagaatgaagaaagtctacagggtttataggaaaccattaaaagagttaaattttacattgcaaccttttcagatgaagagagagaaagggcaggacctgaagccttgacccactggagcatttgcaccccctggtacycaaagtgaagtagcacctcaccccctggggacccaaagtctcagcctaccagagcatcctgcttctccagtgccaaagctgagtcaatgctttcaccttccagggaccctaagcttaggtcccccagagcagttgtgccttctgcggccaaactgatgaagtgctccaggttccagggaatcagaagcttggctgagctgtccttgtcatcttcatgttgagtaggctgaggaaaaggaggaaaaacagggattggtcttggcggtggtagaggcagatgaaaatccatatgtaagtgaacccaagtacttcaatttatattcttcaagtgtcaaccgcataatcaaactctctcctggcttgcaaagtttttgttgaaaaatccactgaaagccaccacactcccttgtatgtgaggaattttctttaccttattgctttcaaaattttctgtccgtgattctttttttaacagtacagttttattaactagtacattaatgttgtacattagatctttagactagttcatcctacatgtctgctccttcatagcctctaacctttatcatcccattcatgctgtaccccacccaccttgcctggtcccggtaaccaatattttattctttatttctgtatctttgatttttcttattttccaaatatcagtgagatcatgaaatatttttatttatgtgtctggcttatttcactggattattccttccaggttctacattgtggggcaaatggcaggatctccttttttaaaatgctgaataatattctgttttacacatacaccaaaatatttttatccattcatcaatcagtaagcacttaggctgtttctataccttggctattgtgaggaatgctgcaatgaacatgggagtgcagatacccttatgatatggtgatttcatttcctttgggtaatatacccaaaagtgagattgctgggtcacatggtagttctattttaaatttctttaggaactctcatactgttttcctcaatagctgcaccagtctacattcttaccagtagtgtacaagggttcycatttatgcacacccttaccaatttttttaatctcttgactttttaatagccattctatgtgaggtgatattcatagtggttttaatttgcatttccctaaaaattaatattgagcaccttttcatatacttctgtgtcttttcatatatttgtatgtcttctttgaaggaatgtctattcaagtcattggcttatttattaattgggttgttttctactttgagttgtatgaattctttataaattatagatattacaattaatagatagtagtaatattatttgtcaatatattttcctaattcataggttgccatttcattttgttgattattttctttgacgtgcagaagacgtttagtttgatgtcatcccatttgcttatttttgctattgtagcccaagctattggtatgatatccaaatattcatcacatatgtcagtgtcaagaagctattgccctatgttctcatttagaagttttatgactttgtgtcttacatttaggtagcctatccattttttttgtggagtttctgagtggcataaaataagggtccatttcatccttttgcatgcagaaattcagttttcccagcaccatttattgaaaaaactgtcttttcctcattgtgttcttttggtgcccttgtcaaaaattaattcaccacatatgtttgtcatttatttctgggccctgtattctatacctcatctttatgtcggtgttcatgccaataccatagtttttaaaaattattatttctatagctttttaatataattttaaatcaagaggtttaatgcctacaacgtttttttcctcataattgctttgccctctcaggatcttttgtggttctatacaaattttagaattgtttattctatttctgtgaagaatgtcattaagattttgttagagattgtgttgacattgtatataggtttgggtagtatggacatattaaccatattgattcttctgatacatagcatgggatatctttattgttgtcttcttcaatttctttcttcagtgttttacagtgttcagtctgcagactttttacctccttagttaaatttattcttaaatagttatttttgaccctcttattaaatggaatttttaaatatcttttttggatagtctgttgttaatatatagaaatgtaattggttattgtatattgacttagtatcctgtaactttgcagaaatcacttatcagttctaacttttttgtgaatgctttaggattttctacagatactattatgtcatctgtaaatacagataattttatgtatttcctttcccattttcaagttttttctttcttttttcttttttttttttttttgtctgattgcccttgctagtacttccagcactgtgttaaagagaaatgcaaagagagagtatccttgtcttgtactggatcttagtggaaaagtgttctggtttttccaattgattataatgttagccatgggttttgcataaatggccttcattatgtttaggaactttatttctacatctaaactgttgagagtttttatcaaaagaatgttgaactttatcaaatgctttttttgcatcaattaatatgatcatgaggctatcataactgattgtgttggtatgatgtgtcacactgattgaattgcatttattaaaccagccttgcatgctagggataaagcctacttagtgatgatgtataatctttttcatgtgcttttaaatttggtttgctaatatcttattaaggatttttacatcattgttcatcagagaaattgacctgtagttttcttgtaatatctctgtctggtttcagtacgaaggtgatgctgatctcactaagtgtgtttgggagtattctctctagttttatttctagagtttaaagagtgttgatattaattcttctttatatgtttggtggaattcacccataaagccatctggtgttgggctcttcattgttgggaggtttttaattaccttttcaatgtctttatttgttgttggtatgttccagcttcctatttcttcctgattaatattaataggttgcatttttctaggtatttgtccattccatttaggttttttcaatttgatggcatataattattcataatagtctcataattatttttatttcagaggtatctcttgtaacgtctccactttcctttttattgtatttatttgaatattctccctttttttagtctagctaaaggtttgtccattttatttcctcaaaaaatgaactcttagttttattgatttttaaatgatttttctattttctatttgctttgtttctgttctgttttttgttatttccttccttctgctaactttgattttaatttgctcttattattctagttccttaaggcataatgttaggttatttatttgggattttttttcatataggcattcgttgctatacatttccaactcagaactccatttgctgcatcccacaggttttagtatgtcatgtttccattttcctttgttccgatttttctttaacttcccttttgatttcttctttgacccattggccaggattacattgatttccagatgttttttaattttcccacattcctcattattaacttgtagtttctggccattgtggttgaaagcaatactagatatgatttcaaacttcttgaatttgttaaaattttttttgtggcctaacatatggtctatcctagagaatgtcccatttgcataagacagaaatgtgtgatctactgctgttggatggaatagtctgtatatgtctgttatcacagtgcaatccagtaatttcattattaatcttgtcttcttaatttatccagtgttgaaagcagagtgttaaagtctcttgttattattgtattgctatccatttctcatctcatgtcaaataatctttggtttatttaggcactctgatgttgggtgcatatatacttttaattgttacatcctcttgataaattgatccatttatcattaaaaaataatgttatttgtcccttgtgacagtttttggcttaaagtctactttgttttgctatcatatgagtgttcttgccaaattcatgtggaaccttatttctcagcatggtaatattgagaggtgaaactttaagtagagtttattgggaggtgtctgaatcatttgggctctacctgcagaggtgacctgctcttgatcttaaggtagtgagttcttgctctcatgtacctgaaatggttctcatgggaaatgattacttcctgtgagtgtgttatgctatcaaaatagactgttgtaattataataggatttatgtaagtcacatggtaactacaaagtaaaaacctacagtagacccacgaaagatagacagaaaggaagcaaattacacagccagagaaaataataaaatcacaaaggaagacagcaagaaagtaataaatgagcaaaggatctacaaaacaaccagaaaacgaaaaacaaaatggtaggagtaagtccttacgtttcaattacattgaatttaaatggattacaatctccaatcaaaagatagagaggggctgaatggattaaaaaacaacacccaactatatgctgcctacaagagacttatttcagctttgaggttgcacttagaaagtgacaagaggaaaacagataatccatgcaaatgataataaaagagagtgagaaaagctctacttctatcagataaaatggacattaaaacaaaaacttaaaaaargagacaaagaggttattcatataataataaagcagtcaattcataaagaggatataacaatagtaaatatatatgcactagatgttggagcacctaaatatataaagcaaatattaacagaactgagggaagaagtagactacaaagcaataataataggagactataagaccctattttcaaaaattgatagatttctacagagaaaactagtagggaaacaaaggacttgacaacactgaagacaaaatggacctaacagacatatacagaacattccatccaaagcagcagaatgcacatttttctcacrtgcacacaaaacattttccaggatagatcatatgttgggccacaaaacaagtcttaaccactttaagaaggctaaaatcatatcaagcatctcttctgaccacgatgacatgaaattaaaaatcagtaataggaagaggaaaatttataaatatatagaaactgaacacccattgggtcaagaaagaaatcaaaaggaaaatcaaaatatcttgaggaaaaaatgaaaatggaagcaacatatcaaaacttatgggatacaacaaaagcaattggaggatgtgccattgatggagcagtgtgggggggacacacaaaaatgtgcaccacaaactgttttaaacataaaaagtttagggagttttagtcacacgagcctttcttaaggacttacaagtggccatatgctagccaattaaaatatgaaaaagattgtatggtttctacctacaaatatttgtaaagataaatgtaaatattttggtgaatgagcataagtagttttttcttcttatttaactttgtagttagagctgtgtgactctatgatcttagaaaaatcacatcattttcttcatctgtttactttgtaaagttgttctgattaaacaataaaatggttttttgagaattctaatattttaataatattgttgaatattaattacgattataattggaaaaattctgtaaatgctcttttttaagaagatatggcatacttgatgctttttgcgttattctgaagcaattttcattcccrttttctctagactattttgtctaattttccaccaaagaaacaattattttatttgcaatttttacttgacaaaaatatttgtcattaattttgcttgtattgtcattactttctctcagtctttttaaatgattgtttgctgttcttttttaacttacagagctgaaagttttgtacattattttcatatttattgcttagtaataaaagaatcaaggctatgagtttcccctgagtaaacctttatttatatctcatgatgtttaactataatttttttcaccacaggctttcttcattatatgattctaatccctaaaaatgtttcaaatagcaaattttcaaatagtggcaactgacatttgataatttaattgagaggaacatcagtgtgctcccaagccattcaaaaaccccaaccagcttccctaaatatctgttatcatttatctattatatatagataatcccttaaatatctatataatattatgtatattttatatatagatattcccttaaatagctatataatattacgtatattatatatagatattcccttaaatagctatatagtaacccaccaaggatttcttcataagtcatttaatagacaaagtaactacctgtttatctagtaacaaacttattaatggatatgttttttggcagtattcaacaacaatgtacaataatggccacaaattatatttgccttcttaaggaaatgaataagtgctgaaatgtaaatgaacaatgaaatatgtagtaaacatattgaatatattatctaaattgtgccagggttgcacgttctctcaggcgtttggcagagagaaacactgggcctcttggaggactaaacccacagtctaaagacagggaagatgatgggagtaatgcacaatgcttttaaacaacaaaagcatgagacatgatcctttctggaaaatagctgatgtacaagtgcagcattagctgtatcttctcacctaggctcccaagaaatctaaacattttcacaatgaatgagatattttgtgtttttatattcagaaatggaattttgattttaaatatttgcaagttgttatagagaatatttgaatcttgaagaattctgatagagatatcttatttccctacactttaaacattttattactgatttttaaatttttctatgattatttgtttttaacattattttattgaaatctaatatacatccagtacattacacaaatctgtagggtgtgccttgatacatagtatataatatatataagcatacacaatacataatatatgtacacagacatatatacatgaaatcaacatacacatcaaggtatggaacatttccagcatgtagttgcaattttggtttgtatttttacctaagaatmtttcaaaatagtgctttttagtggcaaagaatttcatgtttataatttaattattagtttaaacttttttatattatcttaaacactgtggcctgtgtattatccttgtattttagaatgtrttgagttgttgtcatgtaataatgcatagtaaaacattataaatggaatctaatgacttgaaaacaaaagaatattctctgttggaaataggattctatgtattatatttgtgattctatagaatgctgtacacttgtgcttctgtagggttttctttatatttctttatatttacagtagttttaatatgtgttgcacttttaattaataaaaatatattttcttctattaaaacycaaatgagtttacaaataagggaaatattcttttttgtctaacatatatcttacttgaacagtttagatacatttgttactcttctttttacaataaatagtttttggtattttagctactaataatttaatattggagcaattttagagatacatacaattcaattttttctagcctttcattgtagttctattacaacagaggcaaagaaattgatttcacttttacccaatggtatctcaaaaaatgttaacttttttttcttgcagaaagaatctcttagtcatttgccataactattttgatatcttcagattaattctaccagtcataaccttataaaacttcctgaaacaagatcagtttttgtttactttagttagaactacctattctgatatttaagtagtatagagcatttatgttagtgttcttgctaggcagtttgtgtgtggaatgattttattgatgctgtgaagtatgctttgaaagacccataggagtggcctaaagtaaacattccaaactgaatttaccacaggatttcaaaaccattctgtgtgaatctcctggataattgatattgcctcatcttcatctgttacatatattgttttctaaatacgtaataggaatcaattaaaagcataataattgcaaaaaagcattaaaattgtatttgtagatgatatgatatatccatggaaaactctagacagtcaatagtaaaactaatttgaacaaaagggtttcaaagatagccacatataaaaacttaagggcaaatgattaaacaaactatggtgcatctgtgccatggaaaactactcagcaataaaaagggaatggattatagatatatgaaatgacttggataagtctctaaagaattatgctgagtgaataaagtcaatcccaaaagttcatatactatttgatttcatttatataacaatcttcaagttacaaaattacagaaattgggaaaagattagtgctagccaagatttagagatgagagaagaaactgggaaggaaaaagagtagatgtgactataagcaagcaatttgagagatacttgtgatggatctgttctgtatcttgactctatcaatgtctgtatcctagtgtgatattgcactatagttttacaaggtgttaccattgtgggaaactgggtgaaaagtacagagtatctccttgtattatttcttgcaactctatgtacatctacaattatctcaagtaagaagtttaatttaaaaaaatcaaacctacattttcttttgtgtgtatgtttatttttagattattttagattatttttgatgcaggtacatgtgcaggtttgttacatagatatattgtgcaatggtgatatttgggcttctagtaaacctatcacccaaatagtaaacacagtacccaatagttcattttttaactctgaccctcctctcaacctcccctcttttggagtcctcagtgtcttttttttaatctttatatccatgtgtacccattgtttagttcccacttatgagaatatatggtatttggttttcagcttctgagttatttctcatagaataatgacatccagctccatccatattgctgcagaaacatgattgtattcccttttatggctgcatagtattccttggtgtatatattccatattttctttatctgatcatccattgatagacacttaggtttattccaagactttgctattgtgaatagtgttgtgataaacatatgagtgcaggtgtctttttttgtatagtgatttgctttcctttgggtttatacccagtagtaggactgctgggttcaatggtagttttatttttaattctttgagaaatctccatgctttttcccataggagttactgtattatacattcccataaatggtgtgtaagttaccttttctccacatcctcaccagtatctgttatttttgactttttgataatagccattctgattggtttgagatggtatctcattgtggttttaatgtgcttctctgataatcagtgatgttgagcattttttcttatgtttgttggttgcttttatattttcttttgagaaatgtctgttcatatcctttgcccactttttaatggagtgtttttctcttgttgtttgtagattgtgaaaattagtcctttgtcagaggcacaatttgcaaatactttttctcattctgtagattgtctgtttactctgtttattatttcttttgctgtgcagacggtttttaggttacgtctcactggtctgttttgtttycattacatttgcctttgaagtcttagtcataaattctttgcccaagacaatgtcaagaagaattcttcctagtttttttttctggaattattttatagtttcagttcttatatttcagtctctcatctatcttaggttaatttttgcatacgatgagagataggggtccagtttcgttttctgcatatggctatccagttttcccagcaccatttattgaataggtgttctttctctattgtttacttttgttgacttagtcaaagatcaattggttgcagatatgtgggtttatttataggttctctattttgcttcattgatctatgtgtctattgtaccagcactatgttatttgggttactatagctttgtagtttaacttgaagtcatgtgatgtgatacctccaactttgttgtttttgctgaattgctttggatacacaggcattttttgattccatattaattttagggttgttttttctaatcctgtcaaaaaaagacattagtaatttgataggaattgcattgaatcagtagattgttttgggcatcatggtcattttaatgatattgattcttacaacccrtaaatatgggatcttttttgattcatttgtgtcttctgagatttctttcatcagtgttatgtagttctctttgtagagatctttcactttcttagttaaatgtattcctaggtatttaatttttgtgtatatgtctgttgtaaatgggactgagttttggtttggttttagcttgaacattatcagtgtgtagaaatgctactgatttctgtacactgttttatttcctgaaactttactgaaataatttattaaatctgtgagtcttttggaggaatacttaaagttttctaggtaaaagatcatgtcatagcaaacaaataatttgaccttttttccaatttgggtgtcttctattatttctcgcttgcctgagttttctggacaaatttacagtacagtgttgaataggagtggtaagagcatgcatacatgtcttattttggttctcatggggaatgtttccagctttttcccatttagtatgatgttggctgtgtgtttgatggttcttactattttgaggtatggttcctttgatgactgaagggatgttggattttgttgaatgcttattctgcatatattgagatgattggatggtttttgtttttaattctgtttatataatatatcacattattgattttcatatcttgagccatccttacatccctggaataaaacccacttgaccgtgatgcattatctttttggatgtgctgttggaatcagtttgctggttgtttttttgaaaatttttacatccgtgttcatcagaaatattgaactgtagttttcttttttayggtgtccttacctgattttggtactgggtgatactggttttgtagaatcagttagatgagattccctcctccttgatgttttggagtagtttcaataagattgaaactagctcttctttgaacatctggtaacatttgactgtgaatttgtctggtcctggacttttttgttgtttttttaattgattcaattttattactcctacttgatctgttcagaatttctatttcttcctggttcaatcatgggaggttgtatattccacaaaatttatccatttcttctaggttttctagtttgtacgcatagagatgttcaaaatagtctctgatgatcctttgtatttctctgatatcagtggtaagtcagttttaccatttctgactgtgcttatttgaatcttctttcttttttgcttggcaaatctacctartggtctatcaatcttgtttctcctttcaaataaccaacttttcatttcattaatgttttgtatcactttcttaatctcaattacattcacttctgctcttatctttgttatttattttcttcttgtagctttgggtttagtttgttcttgtttttctagttccttggggtaaatgttaggttgttaatttgagatctcgatatttttgatgttggcatttaacactgtaaactttactctcagcacagattttaccatatcttagatgttttggtatattatgtgtctgcttcattgatttcaaaatttttttattgctgcccaaatttcattttttacccaaaagtccttcaggagcaagttgtttcgtttccctgtacttgtgtaactttgagagttcattttaggattgatttttaattttattccactgtggtctgataagatacttgatacaatttcagttttcgaaatttattgagacttgctttattgctaagcatctggtcagttttggagaatgttycatatgctgatgagaaaaatgtttcttttgcaattgttgggtagaatcttctttaaatgtctattaggttcgtttggtctagagtccagtttaagtccagagttcctttcttgattttctaccttgatggtatctaggtctgtcagtggggtgttgaagtcctccactattactgtattgctgtccatctcttttctaaggtttattattctttgttttatgaatctttgtgctccattgttggcttcatatatatttaagatcrttaaatcttgttgaattgaacccttcaatatcatatgatatccttctttgtctttttttttaccattgttgttttaaagtctgctttatttgatgtaagagtactactcctgttcatttttgtgctctgtttgtgatatatatatatatatatatatatatatatatatatatatatatatatatatatttctccaccctttaactttgagtctctaggtatctgtacacatttgatgggtctgttataggcaggtcctgtagaactggtctaatggtgacaaattactttagtgttttatttctccttcatttaggaagctcgattttgcagcatataaaatgattggctggtttattagtctgttttcatgctgccaataaagacatatccaagattgggtaattcatacaggaaaaaggtttaatgtacttaagtttaatggacttacagttccatatggctgtggaggcctcacaatcatggcagaaggcaaggaggaacaagtcatgtcttacatggatggcagcaggcgaagagagaactttgcagggaaactcccatttttaaaaccatcagatctcatgagacttattcactatcccaagaacatcagggaaaaacctgcccccatgattcaattacctcccactgggtccctcccataacatgtgggaattcaagatgagatttgggtggggacacagccaagccatatcattttaccccgattccctcccaaatctcatgtcctcacatttcaaaaccaataatgccttcccaacagtccctcaaagtcttaactcatttcagcattaactcaaaagtccacaatccaaagtctcatctgagacaaggcaagccccttctgcctatgagcctgtgaaatcaaaagcaagttagttacttcctagatacaattagagtacaggcgttgggtaaatacagccattccaaatgggagaaattggccaaaacaaaggggccacggaccccatgcaagtctgaaatctggtgggggagtcaaatctcaaagctccaaaatgatctcctttgactccatgtctcacatccaggtcacactgatgcaagaggtggacttccacaggcttgggcagttccatacctgtggctttgcagggtatatccctcctccaggctgctttcaccagctggcgttgagtgtctgtggcttttccaggtgcacagtgaaggctgtcagtggatctaccattctggggactggagagcagtggccatcttctcacagatccactaggcagtgccccaatagggactctgtgggggctctgaccccacattttccttctgcactgccctagcagagattctccatgagggtccctccyrtgcagcaaacttctgcctgggtatcgaggcatttccatacatcctatgaaatctaggcggacgttcccaaacctcaattcttgacttctgtgcacctgcaggctcaacaccacatggaggctgccaaggcttggggcttccaccccctgaacaaaccactcgagccccttttagctatgactggagtggctggaacacaggaaaccaagtccctaggctgcacagagcagggagccctrggcccagctgacaaaaccatctttcccttctaggcctccaagcctgtgatgggaggggctgccatgaagacctctgacatgccctgatgacattttccccattctgttggggattaacattcagctcttcattacttatgcaaattttgcagctgccttgaatttctcctcagaaaatgggattttcgtttctgtcgcataatcaggctgcaattttttttatcttttgtgctctgtttccctttaaaactgaatgcttttaacagcatccaagtcacatcttgaatgctttgctgcttagaaatttcttctgccaaataacctaaatcatctctctcaagttcgaagttccamagatctctagggcagggcctaaatgccaccagtctctttgctaaaatataacaagrgtcacctttgctccagtttccaacaagttcttcatctccatctgagaccacttcagactggatttcattgtccatatcactattagcataaaaatgctgatagtgaaagccattcaacaaatttctaggaagttccaaacttcctcacatcttcctgtcttctgggccctccaaattgttccaacctctgcctgttacccagttccaaagtctcttccacattttttggtatctttttagcagcascccactataccggtaccaatttactgaattagtctgcttttgtgctgctaataaagacatacacgagactgggtaatttatacaggaaaaagatttaatggacttagggttccacatggctggggaggcctcacawtcgtggtggaaggcagggagaagcaagtcatttcttacatggatggcagcaggcaaagagagagcttgtgcggggaaactcccattttttaaaytatcagatcttgtgagacttattcaccatcccaagaacagcagggaaaaacctaccrtcatgattcaattacttcccactgcaaccctccygcaacatgtgggcattgaagatgagatttgggtggggacacagccaaaccatatcagctggctttttgttttctttaagaagactaaccctaggctcactcttctagcatctcttctagcttcaaggtttctgcttagaagtctgctgttagtctgatgagattttctttatagctgatttgctacttctctacatctgctcttaagattttttctttcacattgaagagagtaaaagaaagagagtctgagtactgtatggagagtagagatggagagtctgattactgtatgctttagtgaagcttgttttgtatagaatctcccaggtgtccttgaatttcttgtatttggatgtgttcatctctagcaagatcagggaaattttcctgaattattccctcaaatatgttttcaaattcctttttcttcttctccctcagaaatgtctataagtcataggtttggttgctttacgtaatcccatatctcttaaagacttctttcattttaaaaaattctttctttttttaatttttgtatgactgagttaatttgaaagactagttttcaagctctgaaatttttttcttctacttggtctagtctattgttaaagctttaaactgtattttgaaattctttcagagagttttttatttttagaagttctgttggttccttaaaatatatcgatttcatctttcatattctgaattttttatctgtgttgtttttcaactttgtcttgggtcttattgagcttccttacaatccatattttgaattctttatgtgtcattttagaattttcatttggttcatatccattgctagagaaatgactgtgattcctttggggatgtcaaaacactctgtcttatttgcttccagagtttttgcacagaatccttctcaactgaagaagctatcacttcttatttttaaatttgctatcatttagatgggacttctaaattttttattcttttctcctttgtgtttctgactgtagtgtatgttgtgtatgatcattttggtttgttcctgggtgatctccaggggctaagacactgttacgggttccttgcttatagatagcttttggacatgattttctcaaatggctcctgttgtagctgtgtattgggtgtatgarctgactcactgtcttctgtgtggctgagagtgtggatgtcttaggaagcttatctcctgccctagcatggtgtgcttcagcaggttatttggtggtgcagttcagttcccagtacagtaggtggtgcttaagactggaagccagatcaccctccagtatcttgataatgagtggaaatgccgccctgataggggtggtggagggagttcatggttgaatgtgctgaggtctggggtggagaaatggcgtgggggctgcaccatctcctcatctttggcaggtagaaatataatttgctttcctatcatgcccctgtcatagggcttgcaagcttcagttaaaatagattctgttctttatctggagaccacgatgtgactaggtccatggaaaacacccatctggtagctaccaaaatggcctggggaagaaactctctccccagctccaaacagctctgcagctggtctgcactcttttgcaggaaggggagataagccctccctttgtgcaagctcaggtggcagcaggcacactttcagggaggtgtaactgaacacaaatagcataggaaaggctgtctccaagtttgtttgctttagttcccagtggggaaagccttggctatgtccacagctgtagacaaggggagtaagagatgaaccccctccatgtccattgtcagccactagttgctgcccttttgctaggcagaacaacattgcccctttcagagatcaccacacacccatgtttcctttgtttcaaagggcactttaatgggctgcactgccccttttccttggggmagcccatgctaagggctaggtctccaggaatcccacagctccctagcgtctggctggtcccctgtgattgccaaagtcagagtgtgttccagagcatgtttccagatgatctggtgatgcaacaacacagggctaagattccctggatgagacagtgtcccataacaagtgtacaagcagtatggcacccaccacctcaattcaggtttgaggggagcgtgaacacacatgcacaatctggctgccctgtgctgtacccccaggaagttcccatatcacttccaacagcattgcttgtgctcacaagggaagagggactctgacaattcagtggtcagtagtctgtcttggggtgaggggagcaaagaaatatttccacctatcctttcactgggacttcaagttctccaggcatcaatctctaccagactcttgctgtcttcctttcctgtggcccagcttcttcctgggggtttgatatggtttggctgtgtccccacgcaaatctcatcttgaactgtagcttccatgtgtcatggaagggacttgatgggaggtaattgaatcatggggatgagtttttcccacgctgttctcatgatagtaaataagtctcacaagatctgatggttttataaagggcagctccscctgcacatgctctctcttgccagccaccatrtaagatgtgcctttgctctcctttgctttccaccatgattgtgaggtctcccyggctatgtgaaactgtgagtttaattacacctcctttttctttataatttacccagtcttaggtatttcttcacagcagtatgataacagactaatacagtaaattggcaccaggagagcagggtackattaagatacgcaaaaatgtggaagcaactttggaacaggataacaggcagagaggttgaaacagtttggagggctcagaagaaaacataaacatgtggaaaagtttggaacttcctggagacttggagggctcagaagacaggaagatgtgggaaagtttggaacttcctagagatttgttgaatggctttaactgtcagcattttgatgctgatagtgatatggacaataaagtccaggatgaagtggtgtcagacggagatgaggaatttattggaaactggagcaaaagtgttccttgctactctttagcaaagagactaatggcattttccccctaccttagagatctgtggaactttgaacttgagagagatgatttagagtatctagcagaagaaatttctaagcagcaaagcattcaagatgtgacttgggtgctcttaaaagcattcagctttatgtattcacaaatatatggtttggaattggaatttatgtttaaaagggaagccaagcataaaagttcagaaaatttgcagcccaataatgcgacggaaaagaaaagcccattttctgaggagaaattcaaaccagctgcagaaatttgcataagtaatgaggagccaactgttaattgcyaagacaatggggaaaatatctccagggcatgtcagaggtcttcacagcagcccctctcatcacaagctgaggcctaggaagaaaaagtggttttgtgggctgggtccagggccttgctgctttgtgcagtcttgggacttggtgccctgtgtcccagccatggatgaaatggagccaamatacaatgtacagatcaggacattgcttcagagggtgcaagcctyggtggcttacacatggtgttgagcctgagggtgcacagaagttaagcattggggtttggtaccttctgcctagaaattagaggatgtatggaaatgcctggatatccaggcagaggtgtgctgcaggggtggaaccctcatggagaacctctgcaagggcagtgtgaaagggaaatgtggggtgagagtccccacatagagtccccacgggggtactgcctagtggagctgtgagaagagggccactgtcctctagaccccagaattgtagctccactgacagcttgcaccatgtgcctgtaaaagccacagacactcaatgccaacccatgaaagcagccaagagggaagctgtaccctgcaaagccacaggggtggagctgcccaaggccatgggagcccatctcttgcatcagcatgatgtagatgtgagacatggagtcgtaggagatcattttgaagctttaagatttgactgctctgctggatttcagacttgcatggggcctgtagccccttcactttggccaacttctcccatttggaacaggtgtatttaccaaatgcctgtacccgcattttatctaggaagtaattaagttgcttttgatattacaagctcatagtcagaagagacttgctttgtctcagatgagattttggactgtagacttttgagttaatggtggaatgagttgagactttgggggactgttgcaagggcatgattgtattttgaaatgtcaggacatgagttttgggaggggccaggcatggaatgatatggtttggctgtgtcccccacccaaatctcatcttgaattgtagcacataatccccatgtgttatgggagggacccagtggaaaataattgaatcatgggagtgtttttttttccatgctgttctcatgatagtgaataagtctcctgagatctgaaggttttataaagggctgttcccctgaacgtgatcattcttgcctgctgccaggtaagacctagttttgctcctcctttgccttctgccatgattgtgcggcctccccagccgtgtgaaactgtgagtccattaaacctcttttttcttkataaattacccagtctggggtattttcttcatagcagtatgaaattgaactaatacagtgttctcccaacagttttgagcataattcccttagcttttcactcaggtcatgaccatcaacctgtractttaatctttctgaggagtactggcattcaaccaccataggcagccatcttaaaatcctataaaaacacaracctatattttttaagataaaagataaccatgctggtgagagtgcaggttaatacaataattttggacaactgccaatatctactaaagctgagcatatgcatacttttgtcacagaatatgtatgacttccaggtacatgccctatagaaatgtgcacatttctgtacacggaaaaaagagcaaaatgttcatatcaggcctgtctataatcatcaagacagaaactgtaaaaatgcccatcagtaatatgaagtttacgtaaattgcagaatattcatacaatgaaatattaccagaaataagagtgaacaaattatatctatatacaacaatatggttaaatcacacaaacttagttaaacaaaaagaaaaarccagatacaagtgagtagatgctgtatgagtctatttatataaaggtcaacatctataaaactaatctattgtgttagtagtgagactaatagttacccttggaatgggtagtaactagaacagaggactcctaggtgctggttatgtgagcactatatattaaatttgtaaaaaattaattgagctatacatttatgatttgttcattttttgaatatttatatgaatttacaaaaagttaagttgaaaacaaaggcaatagtagctgcagtaaagcctctatgatttatttaatcattaatatgtttgtatagatttttcttacactgctttctcttacagtttatatccatcaagaatcacatgttttctgagtctaattctcatgaatgattttctcaacttacatttgtgactcaaatagatttttatcttttatttgtgactattttgcactggcaaaagcacttgttgaaagaattttataaaacatatttttatttctttgttgaggaaatgtttgtattatagatctaaaatactagattcaatgttctctttaatgtatcatatattcttcttcaggatgaagtaatcactttcttaggctgtttacagtatactgagttccattaatttcattaacaactggctttagttttggttcattttttcacaactaaaattttcattgcctaagtgacttatacacaataagagaaaaaaaggatcacaagaggctgtattagttttctattgctgctktaacaagttgccatttagtgatttataacaacacaaatgtatatcttacagttctggaagttagaagtccaactggagtaaaatcaagatattgacagagatgtgttcctttagaggctttttgggagaatctgtttctttgtagcttctaaaagctctctgcatttgccttatagcccttttccattttcagagtcataagtgtctgatctcatatcacatcactttgacactgactgctttgcctttctcttccacatttaaggattcttgtgaattcaatgagcckgcctgaacaatataatcaccctattttatggtcagccaattagcaaacttaattctgtcttctcccttaagtccccttcaccatataacaagacatattcatagttttgggggattagaacatgggtgattttgaagactgcctctgcccaccacagagacacattaaggttttgtataactggctagactatgtcacaacctttatgactgaattccacatcccagccttacaaaaagtaaaattaaaacctgtgccattacttatggcttctgcctaggatttagatagctaaaaatatattgctccctcccttctaccaaaaatcactgaactatctgcaatttcaaaacctttcctgaacccatcagaagttgtaggcaccaatccaaaatctatttttaaaaagtagccaccaagcagagaggggatgcaagccttgtttacctggaggagatgcagtactttgccataaaatcaagtaataacaatttagcagaaatttttagtgaattgctaaaagctgagcataggttagtgtgcggataaaagagaagttgccctacatttatgttttacaccatggacctcataagaaagcttagggatagtgtgacaatcctgagaatgtctgggagaatggaagagcagtcactgaaggaaagggataaagcccctactctatgtaaaaaataacaataaaaaaatttttttaagtcttggcatggggacagcaaaccctattgtccttaaagaactggtgaagacctgatttacctacaagaaagaagcagagaaaaaaccctctacttgtgaggccaggactacataccagatccaaaatattagaggtgtgctacagctggagcaactctggatcattgagaagaccccattccaagacacaggaacatagcccatcactgagctgattcagggcaacggaggatatcccattgccacccatctaacaaacatcaactaacaaatatcagcagtttatttctgagagaggggaaagtagtgtataaaaatactgtttttgagaagaaggcacaaagagaagatctaaagttgatagacaaacagacaaacacaacaaaacacttctggaataatagttcccatcctaagaggaatttgaagcatatgcagtactaaaagtaataatagcaacaagaaaacataaacacagttcattctagactagatttggtcagtttctcacactaaatttgagcaaaagaagcagcccattttcaggcgttaaaactacttacctcatctttactacactgcataatatatttggtcttcaacaaaaattataaggtatgcaaaaaagccatagaaaaagaaaacactgtcaagcgaaaaagcaatcaacagaatcagtttcaggtaaggctcatagattggaatatcagacaggaaatttgaaataaccataattaatatgtgaaaggctttagtggaaaaggtacgcaacatgcatacttagatgtgtaatttcagcagagacattgaaaactctaagaggatcaaatgagaaacacatgaacagagatgaagaatgtcattgacaaacttatcacataaacttgtcacacccaaggaaagaatccattaacttgaacatagatcagagaaattacccamactgaaacacagagagaaaaaagagtgaaaaatacagaacagagcatccaagacctgtaagacaacctcaaactgtcaggcatatatgtaattggaatccctaaaggagaaaagagagaatatattataaaagaaatatttgagaaggtaatggctgagatcttcctaaatggaaaagagtggtcttttcaaaaatttgtcctggagctcgtggctattcataagttgaaaaataaactttgattcaaatcttctaacctatgcaaaaattaactgaaatggattatagccctaagtgtaaaacttaaaactataaaacttttggaagaaagcatgaaagaaatttttgtgacaataggttaggcacaatttcttagctaagacatcaaaagcatagtgcataaaagaaaaatcttgacaaattggatttaatcaaaattaagaacttctgttactcagaaggcactgttaatagaaatgaaaagaaaattcacagcctggaagaaaacactggcgtatcatatttataataaaagattggtattgagacatatgaagagctgaaaattcactgaaaagaaatcaaacatctcaatttaaaaatgggtgaaatatttaaatggagtaggaagagaggaagtcgtatctgttgcagataacatgaccctatatttagaaaaccacatagtctcagccccaaaactccttaagctgataagtaacttcagcaaagtcttagaatacaaaatcaatatacaaacatcacaagcattcctatacattaacaatagacaagcaaagagccaaatcatgaataaactcccattcacaactgctacaaagagaataaaatacctaggaatacagctaacaagggacatgaaagacctcttcaaggagagctgcaaaccactgctcatggaaataagagaggacacaaacaaatggaaaaacattctatcctcatggataggaaaaatcaatatygtgaaaatggccatactgcccaaagtaatttataaatgtaattctatttccatcaaactaccattgacattcttcacagaattagcaaaaactactttaaaattcagatggaaccaaaaaaagagcccacatagccaaggccttcctaagcaaaaagaacaaagctggaggcatcacactacctgactkcaaactatcctacaaggttacagtaaccaaaacagcaaagtactggtaccaaaacagacatatagaccagtggaacagaatagagacctcagaaataagaccacacatctacaactatctgatctttggcaaacctgacaaaaacaagcgatggggaaaggattccctatttaataaggtgctggggaaactggctagccatatgcagaaaactaaaactggaccccttccttataccttatataaaaatataactcaagatggattaaagacttaaacataaaaccaaaaaccgtaaaaaccctagaagaaaacctaggtaataccattcaggacataggcatgggcaaagatttaatgatgaaattgccaaaagcaattgcaacaaaagctgaaattgacaaatgggatctaattaaactaaagaacttctgcacagcaagagatcatcagagcaaacaggcaacctacagaacgggagaaaatttttgcaagctacctatctgacaaaggtttaatatccagaatgtacaaggaacttaaacaaatttacaagaaaaaaacaaccccatcaaaaagtgggcaaaggatatgaacagacacttctcaaaagaagatatttatgtggccaacaaatgtatcaaaaaaagctcaacatcactgatcattagagaaatgcaaatcaaagccacagtaagataccatctcacaccagtcagaatggtggttattagaaagtcaagaaacaacagatgttggtgaggctgtggagaaataggaacacttttacattgttggtgggaatggaaattagttcaaccattgtggaaggcagtgtggctattcctcaaggatctagaatcagaaataccatttgatccagcaattccattgctagatatatacccaaaggaatataaatcattctattataaagatacatgcacatgtatgtttattgcagcactattcacaatatcaaagacatgaaaccaacccaaatgtccatcaatgatwgaccggataaagaaaattttgtgttacatatacaccatggaatactatgcagccacgaaaaagaatcagatcatgccctctgcagggacatggatgaagctagaagccatcatcctcagcaaactaacacaggaatagaaaaccaagcaactcatgttctcactcataagtgggagttgaacaatgagaacacgtggacacagggaggagaaaaacacacaccagggcctgtcgagtggggagagggtgaggtgagagaaggcagagtatcaggacaaatagctaatgcatgcagggcttaaaacctaggtgacaggttcataggtgcagcaaaccaccatggcacatgtatacctatgtaacaaacctgcacattctgcacatgtatcccagaatgtaaagttaaataaataaataattaaaaaaataaatatttgaataggcaccttatcgaagaattcgtatgaatctaagaacwtcatctcaattattggcatagccataataattctggaagattgtgggtaatgataagggacaaaaaataattcagaaagaaatgtacaactcttagtaattaatagaagaagcgagcaaaaaaatgaaacctaggacaggtataaacgatttaaataacatgattaacaaacatgaagtaatgtatacatatagaacactacaattgaaaaatatacattactttcaaacacaaaatatttataaaaattctttttatattcagccaaaaatcaaatacttccagctttcaagagatttaaatcatatggaatcattcattgaatgcaatgcattagaaactatgatcaaaaaataggaagtctttatgtaagttgaaaattaaaaatatgtgcctacgtgtgtaactatgtaacaaacctgcaygttctgcacatgtaccccagaactgagagtataataataataaaaagaaatatgtgcctaataacatgctcatctatctgagcccccacccagttctgttcccttgctggagaggcattgtgatcactgggtacgtacccaaagaaatataaatcattctgttacaaagacatgtacatgtgtgttcattgcagtactgttaactatagcaaagacatagaatcaacccaaatgcccatcagtrataggctggataaaggatatgcggtacatatacaccatggaatgctatgcaaccacagaaaggaacgagataatgtcctttgcaaggatatggatgcatctggaagctgttttcctgaactaacccaggaacagaaaaccaaacactgcatgttctcacttataagtgggagctgaacgataagaacacaaggacatatgcaggggaacaacacacactagggcctattggggatgcagagggagggagagcatcaggaagaatagctaatggttgctgggcttagtacctaggtgatggggatctgtgcagcaaatcatcatagtacacgtttatctatataacaaacctgcacatccacacatgttccctggaacttaaaagttaatgaaaaaataaaataagaaatatgtgcctactaactcaatcttcaaagaagatatcataatggaaattagagaaatggaaactagttttgaacaagttgacaagaataaatactatgtctcaaaatatataagatgatagctaaggttcttggaaggtaatttatggcctttaatgtgtattttcaaaaaagaataaagactgaagaccacagtgatctgtttaagcatccatctcaaatgggaagaaactaacccttcagaagcctttttgtttttgacatctcaattctctatattatattcaaaaagagaaaacagagagaaagcaaagaaataatcaaagaattacttcaaaaagttttccatgcttgaaaaacttgagtttctagtttgaaagaggttatctagtgcttaggacaatggataaaaattgctgtatgccacagtaaaytgtgagtcctcagaacccagagaacaaaaagaaaatgctaaaaaaaaaaaacttccagagaacagaaagattaagaaacagaattgtatcatccctcttaacagcagctttgaaagatggaagagaatggaacaatgtcttacaaattctaagggaaaattatttataacstaggaccctagacccaaccaatttgtcaagtaagtgtaaagatgaactgaaggcattgttaacttatatacatcttttctcatcaagttattggagaaaaaaaaccaccaaaataaggcgtaaattaatgaagaggttaagatgagagtcaagaaatggaggctttaacacatgagacatgtaaattgaatctccaaaataytggtgaagggagctccctaaatgataactgcacaggcctaatgaaaaaatttgttcagattcgagcacattggcaggctttgggagagatgtctccaagaatattaaactgaaagcatctctaatgcatctgaatgtattcaaaggcaatttagacaatagtggggggagcagtttggagctaagttaattataagtacatagaacataagaaaacaaaaacatccaacaattattaacttcagataaaaaaattttcttaagaaaataagtatagcagattcatttttaaagtctcaattgtccacattattctctatattcaaaaagagaaaactggttcagctgtcaacaagattttacatagttacaataatgtaaatgctgatattcacacaatgaaaattataacagttgatattatgtaaagaatagaaagttagcttgtatgtggtgataatgggataggatggtgaaagatcgttaaatctttatcttccctagttggacgtcaatagaatgcctaaaattaatacatcaaaatgtaacaatatagcccttttttktgtgtgctatggttatgggtcccagataaagatagttgtttctgggaagcaagatatggtcttggggatgtgtgaggaactatgggactttggaaattaaacaaatagtttcacatataatttcactctttaaattgtatgtctgtataaattttataaaatgaaaaatgaaaattagaatatatgtaagttaccaaataattgcaaagacattttaggtttttagctcctttattttatgggccatttgtttctaaatcctgtaggataacaatttcctaggaaatacttgaatagatcctactagagtttagttttttaaaactggcaatgtgaaaagataaatttcgagtgttgtggctctatattaatgtcattctttggaacaattcatgttttgtgaccaatttgaattaaaacttktaaataatgttggaatgtagtcagatatcaaccagtggctaatttgcaaaaaaaaaaaaaagtaacagtgaaagtaacttatattaagtgcttactagggatcaggcaccatgttaaataatttcacgtctgccttgatggcagacagggactagattgaaatgacttttgcgccccttgtgtcaagcacatagtttggtacatagtaatccctctctctctttatatatcaggaccaagtagggtttatgcaatactggacagtattaaccatgtattttattttctatattctgatactttgacatctgggaccttgatgaccctagaaggactgcacttcctagggttagttaattcctagaggcaacttgcccatgagcatgttttttaaatgctttttgatttttaaacaaaccaaccaattcagaggtcacacacaaccatttcctttatttggctgttacactctgggtcactatccacctgcccaaatcatcccaggactaggtaccagataggggtagctcctatgcactaaagcctactgaaattatttaaactagtcaatcataggccttcttgccttgcctcttccttcctaaggaaagcacaataaagactctcccccacagttctcccctctttctctgcctcctgactggccccagggcttgcccatgtggccccctgtggcatgacatccccctactcttgggaactgtgagtaataaaccatctttataaacgcaatctgctgatctgttggccttactatacttcaattttyctattaatgcacaatattttaaaacataggcaatctatctagaagcactcaagtgaatcaaactgaagtctgctaaataagtgataactgtayctaaaaacatttagaaaattacaatttgatggctcagtctagtgaataaccctcattgaacactcaccgctgagaaaatattggctacatttatgagcatgttatagtcataattattgttaacatataatattaataataatattagttcatatttgtgtcatactttcccrtttaccaacactgtaacatatatttcaaaataatttatgttattctcatttttattgctgaggatacagatgtttagagtggttagatgacttatctaatcctacgcagcttaaaaggaacaaaaaaggaacttttttgttgtgaggatgaaatgtataattatcataaamatgctttgacaaattaaaaggtattttcaaaatccaaatttatttggctaaatatgtattttatattaacaggtttaaaacctcaaaaaggcttttggatccactggaaactgaaagaactctccacaaccaccattcatggtagcaaaaaagcacctgcaaaatcagtaaaggaaagaattgcagacagtcaagaacatatatcaactagtaagtaaagtttctgtatactgccaaatggaataggtagcaaaaatcaattaatttatttattaggcagaattttctaatgatttatgtttttggtgagggccttaaaataacatttgatttatagattgatgttatagtggtacacacttaagtcctttttccatttgcctgttacaaaataatgattttttaaaatgtttatcctttttgtctttatgtatactacatatattctcacttttacttgtattgctaactggttaatatgtattgtctctatagataaatttacattttttattttgttcatttaaattatgttttctttagggtttcagttttgtggtgtgtttgtgaagacttaactaagattataaaaatacctacctgtatttttctagtatttttaaatttccatataaatttaactctttgttataaacagcatagttgtattccaatatgatggggtttttttttccaaatgatccgtttattaaatagtccacttagagcctacttgaaataccaattcatttacattttaatattcttttctgttcctttgagccacgtccaaattcttgtgccaggaccaaagtcctcagttactctacattaataagctttgtaaggcgagtttatttctctcctgtttatgctatttctttaataccaaacataagtctaatgctcaggtctcgtgtctgactggttaaatcagaatctaggcttagtaatgtttaaagttcctcagtgcctcagatgatttcatgtgcaggcaatgttacaaaccactaatgcagagggaaatacctttctaacctataccttgatataggccaaggaagaggaggaattaacctacccagcctactctttgggaagttattctttagttaatctgattctagaattatttaattagttaattattcttcttcagatctgagaattttgaatttagagcatcactattttaactgtggttttctatattcttatcgcagtatatatcatccaatatgatttctatcttttattagttacaggaaattttcttgtttgctgtcatcctcagtgttttaccaaaacttcgtatatattgttatggggggtgggrggctatttctagggatttctgatagaaagagtaatagtctactatcttgagccaattttgtttatctgttttgacttctcaccctcacatatgaataactaaattgagagtattttgtgaactttccattttctttttaagtaacagaaaagtggtaagaatagcattaacaactcccatatatcctttacctaccaattatttatattttgcttgttctttaaatcattctctttcttcttttttcacataagcaattaaagattaaatttccctaagcactgctttaagtgtgttgtatttagatatgttgtattttatcacttaattaaaaattttctaacatttactgtaattcctactttgacccattagtaggtcaaagtagggttatttagaaaagtattgtttaatttccaaatgtttgggacctttctagatatcttaaaattactgatgtctaattaaaaaaaaactactgtggtctgagggcatactctgtatgatcttttgcaacgtgttgagacttgttttatggttcagaatgtggtctgtcttggtgaacattccatgtacacttgagaagaatgtatatctgcagttaaaaaaaatctcaattagatcaaggtggctaatagtattattcagatcttctgtatcaagtcagctaactgtagcctgtggattaaatctggtgtgtagcatgtttttatacattctatgaacttagaatggtttttgcatttttaagggttgtaaaaaacaaaaacgtaaaacaaaataaagaatatgtgacagagactacattggcctgaaaatcctacaatactgacttgctttttatagaaaaattttgctcaccctagttctatatctttattgatattttatttagttctattaattactcagaggggatattaaaatataattttagaattatctatttctccctttaatgttattgatttttgctgtatccatttttaaattattgagcaaatatacttttattaggtttttcctttaaccattataaaatgttcctttgtagctgtgataattctctttttttgagttcattttgtttaatcttaatatagacacttcagttttcctatgcttatggttcacatcgtatcttttctcatcattttacatataactagttcatattcttatatactttttgtaaacaatctgtagttgagtcttgtttttttattcaggatgacaatctcttcactttaatttgaagtgttacttcacttacatttaatgtaattattgatatgattaatcttatttctactagtttctatttgttttgagatttatcccatctgttctttgttttccctgtcttcttttggttaattgaatatttttgtcattctattttaattcctctattggctatttacctataccacttttgtattttttgaggctgctttaatgcttgcaaaatgcattcttaaattatcaaaatactatctaaagttaatattgtcctacttaacttaaaatgtaggaccttggagcagtatagttacatatacacccccgtgtcttttttgctattgtcaaatatatctacataaataatagcctcacattatatagtgtcatgacttttgtttcaaataattacatgttttttcagctttttgagatctaattggtgtacaataaattgcatatatttaaagtgtaaaatttgatgagttttgacgtatgtataaatctgtaaaaccattacaactcgaggtaaaaaaacatctatctctctcaaaagttccttatgctttttttgtaattccttcttgccaccaacccacaggcaatcatttatgtaatttttgtcactataggttagaatgcaattttctagaattttacataaatgaaattatatagagkgcatgctgtttttcaactaacattttttattccacataattattctgagattcattcatgttgttacatgtattaataatctcttcctttgtattgctgaatagtagtcctccatagtaggaatataatatgatttgtttatccattcatcttttggtggctatttgtattgttctcagtatttggctattataaatacagctgctatgaacatttatatacaagtatttgttcggatayaggattttatttctctttgataaacatctagtagtgggatgacagagcagcatggttatgtaacgtattaggtcattcttgcattgctataaataaatatctgaacctgggtaatttaggaaaaaagaggctcaattggctcatggttctgcaggctttacagaaagcatggtgttggtatctgctcagcttctaggaaggcctcaggaagtttacagtcatggcagaaagcaaagggggagcaggcacatcacatggtgaaagaagcagcaagtgagagaaagtggaagggaggtgccacacactttttttttttaaactttaacatgcacatgaatgacctttattttattaaaagtttctgttcagtgggtctagggtgggacctgggattttgcatttctagcaggcttcagggaacgcgagtggtgctagttccacacactttgagtaacaaagttataaacaatatatatctgatcttttcttttttttttattatactttaagttttagggtacatgtgcacaacgtgcaggtttgttacatatgtatacatgtgccatgttggtgtgctgcacccattaactcgtcatttacattgggtatgtctcctaatgctatccctcccccctccccccaccccacaacaggccccggggtgtgatgttccccttcctgtgtccaagtgttctcattgttcaattcccacctatgagtgagaacatgcagtgtttggttttttgtccttgcgatagtttgctgagaatgatggtttccgtcttcatccatgtccctacaaaggacatgaactgatcattttttatggctgcatagtattccatggtgtatatgtgccacattttcttaatccagtctatcattgttggacatttggcttggctccaagtctttgctattgtgaatagtgccgcaataaacatacgtgtgcatgtgtctttatagcagcatgatttataatcctttgggtatatacccagtaatgggatggctgggtcaaatggtatttccagttctaggtccctgaggaatcgccacactgacttccacaatggttgaactagtttacagtcccaccaacagtgtaaacgtgtttctatttctccatatcctctctagcacctgttgtttcctgactttttaatgatcaccattctaactggtgtgagatggtatctcattgtggttttgatttgcatttctctggtggccagtgatgatgagcattttttcatgtgtcttttggctgcataaatgtcttcttttgcgaagtgtctgttcatatcctttgcccactttttgatggggttgtttgtttttttcttgtaaatttgtttgagttctttgtagagtctggatattagccctttgtcagatgagtagattgcaaaaattttctcccattctgtaggttgcctgttcactgtgatggtagtttctttggctatgcagaagctctttagtttaattagatctcaattgtcaattctggcttttgttgccattgcttttggtgttttagacatgaagtccttgcccatgcctatgtcctgaatgatattgcctaggttttcttctagggtttttatagttttaggtctaacgtttaagtctttaatccatcttgaattaatttttttataaggtgtaaggaagggatccagtttcagctttctacatatggctagccagttttcccagcaccatttattaaacagggaatccttcccccatttcttgtttttgtcaggtttgtcaaagatcagatagttatagatgtgtggcattatttctgagggctctgttctgttccattgatctatatctctgttttggtaccaggaccatgctgttttggttactgtagccttgtagtatagtttgaagtcaggtaacgtgatgcctccagctttgttcttttggcttaggattgacttggcaatgcggggtgccacacacttttaaacaaccagattttgtgttaactcagagtgagagcttacttatcaccaaggggatgtcccaagtcattcatgagggctctgccttcatgatccaaccacttcccaccagaccccacctccaacactggggattacatttcaacatgagatttgtacagggacaaatatccaaactatatcatttcaccactgacccctcccaaatcttgtccttctcacattgcaaaatacaatcatgccttcccaacagtccccgaaaatcttaactcattccagcattaactcaaaggtccaaagtctcatctaaaacaaggcaagtctcttccgcctatgagcctgtaaggtcaaaaacaagttacttacttccaaaatacgatgggagtataggcattgggtaaacattgccattccaaaagggagaaatcggccaaaagaaaagaactgaaggcccaatgcaagttcaaacctggcagagcagtcattaaatcttaaagctccaaaataacctcctttgactttatgtcccacatctagggcacactggtgcaaaggatgggcaccaaaggccttgggcagcttcacccctgtggctttgtggggttctgcctccacagctgctctcacaggttattgagtgtctgtggctttttcagattcagggtgcaagctgccagtagatctaccgttctcgggtctggagggcagtggcccccttctcacagttcgactaggcagtgccccagtgggtactctgtgtgggggctcttatcctacattttccctctttactgccgtaataaaagttatctatgagggctctgcccctgcagcaggcttctgcttgggcaaccaggctttttcatacatcctcaaatctaagcagaggctgcaaaatgatcttcactcttgcattctgtgcacctacaggcttaacaccatgaggaagctgccaagttttatagcttgcattctccaaagtggcagctcaagctgtacctggaccttttaaagccccagctagaactgaagcagctgggatgcacagagcagtggcccaagactgtgcaggacagcaggtccctgggcctgacccataaaaccatttagtcttcctgggcctcagggcctgtgactagaggacctgtgtcttagatttctgggatgccttcaaggcctttttcccattgtcttggttattagcacttggctcccttttgttatgcaaatttctctagcaagtcattgctacaaagcctacttgaattattcttccaaaagagccttttctttctctgccacatggctaggctgccaattttctaaccttttacgttatgcttcctgtttaaatataagttccacatttatcatttctttgctcctgcatctgagtgtcgtctgttgcaagcagccagggttacatcttgaataccctgttgcctagaaatttcttccaccagataccctaaattatcactctgaagttcaagctttcacagatccctagggcagggaaacaatgcagccaagttctttgctaaggcacaacacagatgacctttgctccagttcccaataagtttgttatttccatctgagacctcatcagcctgggcttcactgcccatatcagtatcagcattttgaccacaaccatttaactagtttccaagaagttctgaactttccctcatcttcctgtcttcttctgagccttccacactcttccagcctctgcccattatgcaattccaaatctgcttctgcattttcaggtatctttatagcaatgccctactcctggtaccaactttctgtattagttcatgcttgtgttgctataaaagaatacccgtgaccaggtaatttacaagaaaaagaggtttaattggctcatggttctggatgctctacaggaagcacggtgctggcatctgctcagcttctagagaggccttaggaagcttacaatcatggcagaaggtgaagggagagcaggcatgtcacatggcaaaagcaggatcaagcaagaggggggcagaggtgccacacaattttaaacaagcagacctcatatgaactcagagcaagagctcacttaccaycaagggaatggccccagccattcttgagggatctgcccccatgatccagccacctcccaccaggccccacatccaacattggggattacatttcaacatgagatttggttgggggtagatatccaaactatatcacgtatgtataacattttaagaaattgtcaatctcttatccgaaattttacatttctaccagtatacaagttatatttacttccttactaacacttgttatggtctttttaattttagctattctcgtgagttatatactggtatttagctaggttttattttaatttctctgatgatcaatcatgatgagcttcttttcatgtgcttatttgccatccatgtatcttaaagctccaaaataacctcctttgactttatgtcccacatctagggcacactggtgcaaaggatgggcaccaaaggccttgggcagcttcacccctgtggctttgtggggttctgcccccacagctgctctcacaggttattgagtgcctgctgaagtgtctgttcaaatatcttggccatttttatttgagttgtttgtcttcttattgagttataagaggtctttatatattttatgcttatttatttagttagttcgtttttaaagacaggatcttgttctgtcacccaggctggaatacagtgccatgatcataattcactgcagcctagaaaaaagttattcatgtatttagaaacaggtcctttttcagatacatattttacaaatattttctcccagtatgttgcttgccctttcatttcttaataacatcttttaaaaaacaaaagtttataattagaagaaacccatttatcaattttttaatatagtttgtgctttttgcattctatttaataatatttgtgaacccaatttcacatggaaattttatagtatgtagctttatagttcagagttgtagctcttacttttaggtctctaattcattttgagtaatttttcttaattatatgtataaacattaagaatcacttctttgcatattgctttagcaccatttgttgaaaagattatcctctcctcatcgaaytatcttggaaatcaattgaccatacatattggtttatgtctgttctctgtattctgttccactgatgccaataaccagctacctttaaaactgtagttttataatgtatcttgaagttaggtactataagtcctccaagtttgcgcttcttttacacaattattttggttattctagattcttgtcatttccatataaatttgaaaaactgctagtcagtttctaaaatatatactcgggcatctttattttaaatacattgtattgatcaatttggggagaattggtatcttaacaaagtgagtttgtcagttcacaaacatagaatatgcctatatttatataatacttctttaatttttctcagcaatgttttctagtttttactatacagacacatctttttccaattatacatggcattttaaattttcaattttgattattcatgctgctatataggaaaaaactttttattttgcatttttgttgggtgcatgtatatttaggacagttaagtctttttgttgtattgaatactttatcattatgtaatgcccttctttttttttttttttttttttttttgagacggagtctcgctctgtcgcccaggctggagtgcagtggcgggatctcggctcactgcaagctccgcctcccgggttcacgccattctcctgcctcagcctcccaagtagctgggactacaggcgcccgccactacgcccggctaattttttgtatttttagtagagacggggtttcaccgttttagccgggatggtctcgatctcctgacctcgtgatccgcccgcctcggcctcccaaagtgctgggattacaggcgtgagccaccgcgcccggcctgtaatgcccttctttgtcctttttgattattgttgttttaaagtctgttttgtctgatataagaatagcaacccttgctctttttgttttccatttggctgacagatccttttccatccctttattttgagtctatgggtgtcatttcacatgagatgggtctcttgaagatagcagactattgggtcttgattcttttttcarcttggcactctgtgccttttaaaaagcttgaaagtgtattatatattttatttatctctaaatatttgaaatacgctttttatatctgacgctaaaacgtgacaagatatttttgtttctggatgagatggtctaagctgtgggagcaagggccaagttatagtggctgtttcttttaattcattgctcaaattttaatttaatagttcatgttcaacctgggaaaatcttcagtttgaaatatgtacttgataaagtgtgttaacttaagagagctaaggctctattaactgccttactctcataaatgagtaatccttttatgtgacaggtgacttttattatcatcttcatttttataagtgacaaaaccacaatataagttgattaagtaattttcctaaagccacataactgatcagtgctagactataaattgaaattcaagaaattttggccacagagtctgaactcataaccacttcacgtactgcctatcagtcatttgattttacaggcttataattaaattaaggcttaaaattatcattgtagaataagtattgtaacttatgagagttaccatagccttaatacttcatttatggcaaatgtgaatgagtttttaggtcttttcctggattaaattttaatagatgagggtgaatgaggaaagatgctagtagaaaggccagaaaggtagcagaagactggacaaaaatttacttgttttccagtttcgtgtacgaatttctctagaaatagcaagcaatggttaggggacttggaaaattcacactttggggccaaagtggtgcagaggcacaatggcaacaatgggccagaatttctaaacctctaaaagaaacacagcctccattgagaattacatgtctaccacacacygctgtttttgatggtggaattaaaagagaagttgttgtaacatttcaaagaggtaaagatcactaaagaggtattttttctataatcttctgcttagattgtgactactaggaaatctacttaagaaagaagtttgttcaaatttatgagtttcttttttgaactttgagcatctcatatttctccagagctttaatctacttttaaaactatcttctgtgtttttatatcagttagtggtcagtgagtgcctcccccaactcattgattttgtccttgatggcagagcagggtatggattgacggtgagaaactgaaacattcctatcctataggaaatcattgcaaaggggcttggctcatggtatctgagagcttccatatcctgcttgttgctttacagtttctgtgtaccttacccccagtctggacacagtcatcattgtggagaattctctgaacataagattcagatcatgtatttactggtgccataagtatgcttttgtttggaggctttcctatactatagtccctaatgtttcatctgctctaatrtattcaacttgcacataaagaacttgaatgtctttgagcaggtcatacaacccctctgagctttatttttacaactgaaaaatgaggtgagtagaatatttctatattccccttttccagcattttgttctttaaagacttctatccataggtgctgaataatcttcyaaagtgattgctgactgttcaggtgtaattagtaatagagactggtggtttaggattcatgatttgagaactcctctttctctatagctgtgtgtgtgtgtgtgtgtgtgtgtgtgactttgtgtatactaaaaccttattctgtgtgctggaggaaggctaaggcagataaagagcagaactagggtaaaacattagtatatgtacatatgcatgcatatacatatatatgacttaaaagaaatattctgtattccatatatactgctgtcttaggattgcttcttctaatctaaaacatatttaaaacataatttttttcgacatttgagatgcttattgtaatgtggagttaacttttttccagaattttacaaagaggactttctgttttgtttttaatgaaataaacacacagtggatagttaaaatttgccttccaaacaaaatgtcatgatatctccctttttaggactggaatgtaagcagttatagaatttcagtatctggaatgactcatgatttataagccagctcctcttaagcagtgtattgttagattatttacaagactaaaattttaatgttaatttctttattgtggtacaataccatttaagcttttgaactcaaataaagatcatttttaaaaactatttttatacctctcccccaatttctaaattcagttttttctctttgttggattttaaagctaaaacaataacaagtctcattctttttataaactgtagcttaaaccgcaagcaataagaaaaatccttatatttaactatcatgtacttttatgtacctagtacacattactgtacttggcactgtaaggagataaaaaataaaaagaaacacagtagttactcatacacaagtactaggtgatatttagcaaatgacatgttacagaaatatttaaagtaatagccagatgctttaggattccatatgttataaagagctacttggattttattatttatttatttattttatttattttatttttcaagacagagtctcgctctgtcacccaggctgaagtgcagtggtgggatcttggctcactgcaacctctgcctcccgggttcaagcagttcttctgcctcagtctcccaagtagctgggactacaggcatgcaccacgacactcagctaatttttgtatttttagtagagacagggattctccatgtgggccagactggtctcaaactcctgacctcaagtgatttgcccacctttgcctcccaaagtgctgggattaaagcacgagccaccatgcccggcccggattttagtttgcacctctaattttgctacctcttcactattagcaatgctcagggataataaaaaagaaaccattagaagtaggatataaaatagcactttgagaactaagccagtaaaatttccacattatgcttttcattatacatcattaaaagaaaaccaagaaatttgcacagctaaggagtgaggaaaccccagaaatatgctattaakatggtcagacatacaaactcccaaagtggtagcaatttgttaagtcatattgttgttagttgtattttatactgtgtagagaaagactatatgaacagaagcagagtgaataacataaggcacagagtagcccaaagaaccggaaatttggtagaaatttaacggaactattcagattattatgagttagatttcatcatwatttggagaatatgtatatttcaaacctgttttctctccttttgctttgatgccatgctcaccaagcaatttcaagttatttaacttccaagataattttccatgtctaccataasatcgcctgcaaatacctcccccagatatattggtctgttggttggtagcattagtcagaggggctgggtttaattttgaaacagcaggtttccattatattatgaaatgaattattagcatattatactaaatgacattaaaatgctgtgttatggagaagtgaatgataagactttgaatacctgagagatttagtcatcagtttgcataaaacaatgtgatatatttctattcatttgcaacaatgacatttgtatcatgcttaggtattagaatgactctttgcagtgaggtgtgcttattattctgtcactgaattggaattggtttgtccattagtttaataaatatttgctgagtgcaatgaacatttactgagtccttatatttcctgagtattaaatatatttactgagtgcttaacagctgctcttaaaggagcttcggatacataagggaacaaaacagtatccttttccttatggaacttatgggctagtgaggagagacagacaataaccaacaagtgtgattaaataagttacatagaatgtgtagcaggcatacatatacctaccatacacctctagactggtatgaatactgtgtgagggaaaaaaaagagcctccaactgagaggattgcaggggaagcagtatcctaagaggacagctaagttttcattagagtaaatcagtgcaatgtataaatctagcaaaatgttaggaaaagttttcactaataaagtccgtcttgtaacatggacttccaggacaatactggaccttgttaaacacagaatgaagtcaaccagaaagtttgcaacaaaarcaaaactgaaattgcagttcttgacaatatacgtttctttgttcaactgaattttttgaatttattgctgactctatgtttagggtgtgtgtgtgtgtgtgtgtgtgtgtgtgtgtgtttgtgtgtctcccactaaggcaatagagttgatactggtttggcagttgtttaatatatgcatatttatatttaagactcaagcattaaaattactgttagggtcaaagcacaatggtaacttatacatgtgctctacaactgacatgctaaagacttaggaagtttttttcttgacagtctgtcagctatcacttatggttcttagtggttccaaaggctcatttgttccaaatctgatcctcataaaattgattatatatctataggtatgtaattgttttaaattttgaagcatggattttattaacactattacagtgcctgacactgtactattgactacacacatacatacacacacacacatatatatatatatatatacacatacatacatacacagacccctttatatatttgtgtaactgaaatagatgtggacatatataacataagtgtgtgtgtatttgtgttgcttaagtagatgagtgtaggtggatggatagatagacacacaggtatgcctagttgcttaagyagataagtgtagatggatggatagatagacatacaggtatgcctatccatcctctattgagatagagataaaaattctctaaatgctagattaatggcatagattgacatgcagtgggaatttayagaagagaaaaatcatcgtaaggcaggaccaagtctggtaatcattaaagaggagaatcttgattttgttcttgatggcagagcagggtatggattgatagtgagaagttgagacattctggatgatagagacaatatagacaaatcccagagacacaaggaagtatggtgcgtgtacaaaatgacatgagaacaatggtctaaggatactatgaagtttgtgaacagtgaggagattggaccagatggatggaaccaatttgttgatggttttgatttctagtttaaagaattttacccaaattcagtgagccctagagagacaacatgggttctacaattggtaattgacatagtttaaatgacattttaggaatattaggtaactaaacaggaattgagacgaggacttggaacagaaaaacaaataggatgctattgctaaactttaggtacaatttaatgaggtcatgaaagtagtgaggaagagatgagactgagggacattaggtaagaagagttgagcaatcttggtgattactggataaaggaacagattcaagaagaagattcaggacacagtcaccactaaaatatggtaacaatgactacattattatgaaattatggagtttcagtaagtttagttaattgaatgagatgagcaatgtgggtgccaggtttgatcatttatgtagaagaccatgctatttaatacatcaatgctgcaccaacatcccactcttccagctccataaaaactgaatgtgaagataattttttaaaccacatttgctattgttattctgattataaagatcatatatattaatgtagaaaatttgaaaatgaagtatttagaagacaataaaatatcacctgtgatttaaccttaataacattaaggcatggtaaatatttatcttctgaaagggaataaaaattccaatattatttttgaaacagtgaatggagataattaggaagatttattagcaagaaagtaacatttttcttttttcattatagagcaatatcataaaagttggacagatgaatagctagttgagtgacatgtacaataaatgagaaatatgaaaaattaataattaacgctgtaaactatagaaacttaaaattgaattgagataagcactgccacctagcaaaacaataacagacaggaataaagaaaagggagaaaagctgaaaaatgttacatgattcattctaagaaggcctatgagcgtgaactgctgaacacactaagctttcaaggataagggatgaagtacttcaaaagcaaaaagttttgatctcttgcttttcctgatggattctatttaaattgtatacaggactagcatcactatcaatgctatcaaatatcttgtgctttcaaacctgtgactgacagaattttttaaaagtatagatgtgtttttacctcacatagtgattgctgcatttgttaaataagttatttttaaaaacagattctaaaggacttgccaatatataacacagacctttgtatggcaatagataagattatgtaggcatgatgacaagactggaaagatctttgtatataaaatttattatatattttatcaatagattattaatatggatcagttagtaagcaagtattaatagtattaagtactttttgacgttctatttccttaccagattacatggggaattttaaaaaggcaatagttacttttacttttatcacactcaacatatatttatcatacagtgcttgatacaaacatggtagaattgtcaatatatgcttgtttaactgaagtagatgaatacacatatacataaacattgcatatatatatgtgtgtgtgtgtgcatatgtgtgtgtgtgtgtgcaatcaattactatattagagtgcaataggattcagagaaggaaaaaaattgttataaggcaggggcaagtttgggaatagctcattaaacttgagctttgtccttaagagcagagcagggtayggattgattgacagtaggaagtagagatattctaagcagtggggacagtatagacaaaactcagaggcagaatcaatttgcaacttgtgtaaatcatgataaatacaatggactaaagaaactactaggtgtatattgaacagtgagaagattggacagtcgagttagagccaattgtttgacagctttgggtgctagtttaagagatttaaactaaacccaacaggcaaaaaagagccaatatgggtcttcaattggtgactgaaatagtcaaagtagtattataggaagattaaagaattaggcagtatatgagatgggaaggaatttgaaacaagaaagattaaggagctattgctaaattctaggcatgaagtaataaagctgtaggaggatgaagaaagagatgaatctgaatggatgttgagaaagaagttagctgagtgttggtgatttaccatattcacagagtcaaagggaaggagagacaagaataagagctgactaaattttgagtataaaagtgagaatatttacttccrgcactgctgattagaatatattctggaaaaaactttcagaaaatcagtttttcaattttatttcctgtaatcgtcctaagaaaatcagaaatataaagaaacatatataaattgttcatatttatcttcataaaataattgaaataaccaaaaataatcaacaatcggagatatataataaagaagtgatagtaaagtagaagccctctcatctagcctggttgtatctattaattggttgattaatggaaaaatttcagtcaagtggagaatcattaaggtgatatgtacatgccctaaatatatttacttcaaacataaaaaggtacattcgtcatttttcgatgtagagctatgccctttcctctgagtatgattctaataatgattatacccattaaatattgtctatagtatccagtatccatttctttaaaatgaactaagaattcagtgacatctgccaaacaacttaagtgcataatttctctagatttttattactttttcttgttgttttgcccacctaattaagcagcaaagtttttaattactcaccttcttccattgccactccttagccactataaggacaggctcctattctgaagaatatggaaaacaattgcaattttaaacagaggatgcatgatctgaaatatattttaacagaatcactttggctgctctgtttgagaatggactgtggtgggggagggagaacttttgtgcactttgtattccataatcattctgatgcaaaaacaattgtaactctctttctagtgtctacatttcctgtgagccccagttgtgaatagcagaaatayggaggcatctaggaaaacctaggggcaggaggggctgggagggaataagacctttcaaggtgtttaaagaagggacaaagatgaagaagcaggcatagtttctgaagaggttttttggtttttgttgttgttttcatttacctaattagttctcaactgcagaggcacattagaatcttctggggaatttttaaaataccactgcatgggccacctgtcatatacactgatgtaattggcctgcgttggggcctaggtgtctctctctctctctctctgtctctctctctgtctctctctctctctctctctctctctctctatatatatatatatatatatataaaatatatatatatatawaaaatatatatatatatataaaatatatatatatatataaaatatatatatatatctcctgttctgtatatatctatatatctatagatatatatagaacaggggataccagtgtgtacctaccattgaaatcaattgttttcaagtcttttyaggtcttattctcagatggtcttgggtaagtggtggctgattgccttcagcatctagaacaaaacactctatggcctagaggaattccagctggcatctatgatcttattctcttgaggtagggcagctaaagggagrattatcttcatgttgagtctgatrgcagggtaatttgcttcatgtggaggcaaagggatattgttagwtttgcagctacattgggagttctaagtagccacatctcaggctaagaggaagtccagattggttcaaaccttttgttaattatcctttgtaggaatggaccaygcagtatccctcaaggaagaatcaagaatgtttccacagagaatatacatatttcatctctttctctgatgartggatgcccactgaaagccatgaattwctctyattagaccctgtagaatcccagtttatggcagtgacattaaaaacacctagtttatgacttggatcaggcagcctgtaaaatggcttccagtgatccctgctytctggtatgtatgcccttgtataataccctcctcatgagtgtaggcagaggtaacatcgcttttgaaactaggctatatatattmaaataaaaaaacaaacctgtggcttccattttgggtacttcatctcacactttctgatttcttgctycgtgggaaacagactgtaatgttgtaagcagtgctatggagaggtccatgtggttaggaagtgataggtcctgataacagccagtgaggatctaaggtggatccctttctgagttgaatattgagatagatgactacagccctggtctacaccttgattgcagcctcatgaggaattctgamcaaaaacactgtgctgaacyrtgcccaggctcmtgagccacataaactatgagaaaacaaatatttgtttcaagccattaagttttaatttgttacacagcaatagataactaacacatggaaggattcatcaagagaagggtttttcataagtgaaatgttattttcatctcacatttcaattattagaatataaatgaaagaaaataaatttkgataggctctcataaattcaatgataagaacttggaaaatgcaaccacatgataaccaggaagtaaaaggaaaacataagmggcatcttcccagaygagagtaaatatctggttccttgagaagtgtagtttgagaatggagaaatcagatgttaytggaaagaggctaggactrtattatttcttgcttcctgtcaagtttttcaactcaagagaaagtaaattttcctgacaaaccattcaaaattaaaggataggtgggagtayatgtgtccctgaaggaacaagtgaccttcaytgaaagcagcagcttggttgaataaatactgtacagaagtggaataaagagtagctgacaacartgctsaaatagttacacatgaagttttaatgagctatttcatattaagatacatattgagaattcaaaccagagakwccagttaatwgatattttcccaactctgttttagggtgatcatagaaatgatayccacaagttagtcatagtggcctgcatccatttcgatrtatcagtgaygtattytgattggccagtratcamccatacygactgttaaatatttttgttatcactcctatgcgtggtgaatttgagttctggttttctttagccttgtgttatttatgtgtaaagttgsattatgggargcaaakaayyttytgtgtctcattcacgctcaagtaaatggcagtggagtagggatgtaaaccaaactgcrtgataagccctgcaagtcattctgatgtatcrattttgcttactggtgtttaattgcagacattgtcatattaaygcaaccacaaatatattatggagtaagatgcaaaaatcacatgagtcttaagagaaaagaaatgttccgtctgtggtgggcccccttkgcattattctctaacttcttattttacacctctactattagagaaatttcagtagaaaatmgtaaggggcactgttttagagtttttcttgttataggattgcttttacyacagctaggtcccctcgcacatctttatgttctttggcagtctagagaaycagaagagcaaactctatgagatagaaaccctaagaatttacctccagcatcccttctcttctktcattaaaytgaatttgtagccaactcaaaggytgacaayttatactatggtttttartttttatattataatttatattayggyttatgtcaaaatgttttgttcactgctttgaaagtatcttttgtttacttttkttwtcatttcatgttttmattttttcttttctaattgttagaaactcatgtatttrattttatctttcaaakaacatttttaaaaggcttactctgcttatatgtatattttgcacaaakctttccattcataaacaaaaggtgaataggaatcagaattgaaaactacrtaatttcttttctccttttgagtcaaatcatcacagtatagattagtcattgtgtatgaagtgcattgccaakacatagtcacatttgtgtasaaatgtraaggctatatctcaacagaaataaaaaacmaaaacatrccaaagaccattagctaataatactaataatcgaagagtagaaagcatgtgctaactgatctagactcttgtgacagctgtatatctacccagctgcgtgaccttaggtgtatcaaaatctyaatttccyagactacaaatgaktaagagggatggaggccccttacagttttaatattctagaattctaaaggtgtgtaactagagcaaattttattttctaaaatttgcataataaatttaaaaataggagaaaaacaaataattaargtacatatttctagaagtcttttttaggtgacttayactaccaggaatggatttaccactaaatgttggttttgcctaattcagcattgctatgtaatttgatggaagtataactccatagacaaagagcatttggtcctaacatagcttgtattttatatgtatatacactatttctatttaartttctgtatagtcatgttttayccttttaaaatgaagattagttttagtgtgtattttcttttgtctataaacattcagtgaattcacactgaaaactgattatgaacagatagtctgctaggcactaaggaaacacatatraaaaactaagtccycctctgccctcaatatgctcacaagactacagttactgaagcctgacctcaaaacctagctagcaaagtccttgaawcaggtgatagttcagaataccattyatsctctctcccaagagtatatctgaggaagggcagttctttctagttttctrcatcctggtcgtataggtcaaccacaggaaaattaaatgaatctattgtttttgttgacctagccttttcatataactctcatctataaatgtattaccaaatactatttatgtaaagggacttgaatgacaaatattttgaaattaaaaccacagtggttagcataccttttaaattagataaatattgacctcccattggtgaacatataaagtgctaccaagatctgccwatgamagacttttgaagtggaaattcatcyttgtaataatcctgttatctgtaggctgacytcaagccttcatracattcagggccccttattcytaactgyatcttctattttgggcattgtgctcttgccatctaacaggaaaacaactttcagtgytgccaycttttgaacagsagagatttctaragattagaaaattactaaatttaaatatacatagttytaaaatatgatattttctaccyatgcattcaaatatattctaactttwaaatcctgtaaatacttatatttgtaatgattttacttatatgatccaattaattggcaagaatatgtggtraaagaktttttacatrtttgtattgttctgtgtgagacatctaytgtaagcattgcttcaggyyctyatttttgtctgccttccaggatttgctggcccaagtgctgtgtgctagacttagtgtcagtcasaaargggarggaaacttgcmgttgagccagacagttttgttattcctttaaaattaaaagcatatgaarcagatacagcttattaaggtttttttttwataaataamataaacttaaataacaaaayaataaagttcaaaaacaacttaaaatakagtttaatgctgtaaccataggaaaaaagcatgattatttgtgggaagaacattattaaaagccatattcccaaataygaattatacaaagatagattatgttacttgaaaaaaacttaaagatttctcaattttactttgagrawttataaaatgttattttgtggcaartaagatgaagtacagtattatcatcaatcactgttgctatcttatatacaagatttttggaaacatccttttagcaataccytttccacttgagcagcattagaaattttgttcttattwataggtataagcatgttctaatcctgtacttttgttaaattatctattttattgactttcataatagtttttttgakaattttttttctgattagagtttaagtagattataatttttcactagaaagcatttaaaakgctgctcattttccatagttagtgtggcttgattatctgacaaatcctgccagmagccygtaggtctgatayaccttatrtaacawcatctgyattattattattatagcagccattttataagcagatagraatatttaaataatcattatcagataatcaaatctaacatactcttaagggtaaattaatttaagaaaaaaatyacyrttactaacatcatgattktacaaccagttttamaattttttacaacctttagttactaaatctgatttttgtgtatacttttcaaatctttctttaatgcagtgtcttaaaacaaacataaatgcrcaagtccagcttgatcagtttttcagtagttttccagcctttcttgattactaaaaaataaaaggaaagaaaattttgagaagaaagaaaacagtccacttaaagaaatctccctgctggaactggttctttatataccatatrcaattaagttattgccataggaasaamgtgggctgttttttgttctttcttcgttttttttcctcttacaggaatccccttttgatttaaggcaacaaacatttcccctccgttgtgtgtccatttagctgatgcatatgtgttgtaatggttttccagaattagttctttgaagttacaatcttcattgcattctttctgttaaaacaaacaaacaaacagacattwtccaaatgatttttagagaggctcaattaaacgaagagtaagcagrtaatatttggtagaattgaaacatacacaactttttttaaccctcagattgagcaggcctaatgtggwttrttagctatacttatgtagtatatttgcataaaaaggtatcttaaatttgaaataaaaacaccacataatacacagctagttatgaaatatgtgtagctttttggaagttcatgtcaactattctttaaattaggacctatttccccctaagtaacaggcctcatattacttattcccacatcactcattctttaaccactggaaatttggtataattagcagaacctctgcctccctcaggtgagagacttgtttcacaactttatttacttctacattgtcttcaatggtaatggaagataaaaggttaatttgtttgttcatccatgcaaccatttgttcattcaattaaacctgtatcattatgcctagctgtgggaatacaaaggaaagccaattatattttattatggtgggatgaactgttacatattttgcattgtagtgaagtggggacaatgtgaataattacatttcaatgcccatgattgtgagattgatrttgatgaatgaactaaacatttcaagattttttcccaagaattttcatgtcagcaatgtgcaaattgrgtgaactttarcaaaaagagctttaatactggcaaatggaaattttggattttaaatatctaaaatgcacatggaattttagagctggaaggatccttagaggtcagttrattcaahtcattttacagatgaagaaaccaaaatccaaagaacaagccatttgtccaaagtcacacagaaaacattttttcttaaygtttgagtataaagtgttttaataaaatcattawattatacagttggagataaattaattccatttttacttttcagaaaggtgagatatttygacaaaaatgagttttaaaaattaagcctaagctatcaattatcaatacctttgcrtagagttttccttccttgttcattgcaagatagaattcactttccacccctttgattgccacaatyccaactgccactgtcctgatttccatgatatctgcaaggaatcacagaaagacatgtcaartattcgttcarttttgcaaatgatccacgaatggccatttgttcttatttctgttttaatcggaagtttttaaaatttttaatgtgattatttacwcagcccaagacccctgacccacaacasatacacacaaacaccaagatagtcattatataagggaagtgcaaacygatggttttttattttgtagaaaatrtgtctgtatcaaataaatagttacatatttgagttcagctttttattctctagaattaaatttctaatttactataataataatagctaatgtttattkaactcataccrcatkccaaggattattgcattgctcttatgtattaactcatttactcataaccrcagattgagacaggtagtcttgttatcccagttttacagatcaggraactgaagcacagagaaactaagaaatttgcccaaattcttatacctgataagtagcagaactgkaatttgaacccagacattctggctcttaatcattatataattacttttctatttggataaactttatcttaaaaattattgccaacagaatagctcttgaatrtactgaaagtgaagaaaattctaattaaagcaagtgtaaatgatggtaaacagagcctactrccttaaaaaaaagattgttttaaactgatagtattttgatacattaaaagaccatttaaaacaaaattatgaatcctgtttatataatacttcataactttatacctttgtaattaacttttaaatctttgttgaaatagtatttacaaaatrtgtttrcayaagaatggtaacttactattttcctttattatatatatcktccttaaatcctgtrttttaatgacacactaaataaagtaaaatctcaagatatttattaaaatgatgtaataattaaaattttaaygyacttttatgyaatttgctattaattacattttctacatgaaggtayagtcctgagacattcttttacctatgtctaacacagtgcaaagaaaagtcawagtgtcaattatctgtgtgattgggccttcaaaaactattttctaaaatattgacttaaakaaaaaactaattgttttgccccataccttyacttcattctcttatttattttttttacttcatttttgctacctggataataaaatttctattcatgtcattgggatttaatgtagcccagctaatatttgtcatttgcctcacatatatgttgcatatagaagccyttttcccaatatactatacttaacactagtcagagctcgtccagttgagagtttcacagctactcatctagaaattgggttttattaagaaaatgcaaatgaatggatattaatcttttatatatttattaagcattatcacaatgcatacaaccctactgtggttttaggacacaaattaagaaaaacwgccctggtttctgacaccagaagttaaaacctaatagaaacagcaaacacgtccatatattttgmagaattttgaagaacacaggcctgaataggctagagaaaattttaataattgcttacaagcacatgaaggattatgatgttgatgcattcatgwaacgttcarcacatcttcactgagagccarttctatgctaggcttaattcacagacaagccttgcccttttagagcactctatttggtaactacarcttcattgcagtaaaggaagcacaaaggraaataacatgcagaagaatactattaggttaaatttgtackaataaaatgaaaaatactgaakaaattcattgattcaacatatttgcaatacctccaaaatggaataaatgtatcagttaggttggtgcaaaagtaattgtggcttttgccattacttttatgacaaaaactgtaattacctttgcaccaacctaatatttaaaagacawatggaatagttggtttctaaagatcttagcattgtaaaatatcattaakaagtcaatattttcttttccttcaagtctctttactcctgccattcctccctttatttaatatattttcttttagataaaaagagaatgctgatgcacaagtttagagtgtctttcatgatcagttattagggactggaatctgtaatgtttgctggcttttcttttacagaacaawtgtaaaacataaatgttgactgayagagttattattaattatgataggcagacatcttccctttttggtccagtcatgacaataagttcatattgcccctctcccaaaacattttcctctatcccctgcctgtctattgcccactgtttctttactgcactttacaraggggatggctggatgtggtagctcacacctgtaatcccagcactttgggaggccgagtcaggcggaacacttgaggtcaggaattcaatactaacctggccaacatggcgaaaccccgtttctactaaaaatacaaaaaattatccgggtgtggtggcgggtgcctgtaatcccagctactcaggaggctgaagcaggagaattgcatgaacccagaaggcggaggctgcagtgagccaaaatggcgccactgccctctagcctaggcaacagagtgagactccgtctcaccaaaaaaaaaaaaaaaaaaaaaattagttgggcatggtggtgcattcctataattctagctacttgagaggctgaggcaggggaatcacttgaacttgggaggcagaggttgcaatgagccgaggtcacaccacagcactccagtgtgggtggagtgaggctctgtctcaaaataatagataaataaataaataaaaataaggtgatgaacatttttaatcttatccctccacatattagggttaaggataccaaaaattctttgtaaagattctaygtttaactgagatgagaatagacttatattcttaattgcttgacatatttaaaaaayaccattaacactgggaaatcaacatatctaaaagacaattgcttgggaagagcattaagcagtrttggcagaatcagtagcttatcaaccckattttctagtctattttgttccatgtcctacaaccctcttttattcaagaaaagctcaagaataaagaaattaacattatcactcttttgttcacttgcagtgtggggagtgatgttcctttcaatatgcacaaatatttatagaagtgttaactatgggcggagcgcagtggctcacgcctgtaatcccagcactttgggaggccaacgcgggtggatcacctgaggtcargagttcaagaccagcctggcaaatatggtgaaaccccatctctactaaaaatacaaaaattagccaggcatgatggtgggtgtctgtaatcccagttactcggtagtctgagtcaggagaatcatttgaacctgggaggcggaggttgcagtgagccgagatttcaccattgcactccagcctggacaacaagagctagactccatttcccaaaaaaaaaaaaaaaaaaaaaaaaaaaaacagaggtattaactatgaaatcctaccctccaaatcagaagccacgaagttgctcagaaaacataatagaaaaatatgtaatatgcagatattaagttagttaccaatataagttaattatacttggtctttttgtctacagtgtatccgttgcctcacataaaacaaatagaagaggctgtctttctttgtggatttccatttgtgcttaagagaagtttgttcacattaagtagcacccagtaaatttatttccaaagatttaaagcatattacatagatgcatcaaattgttgacataatgtccatgatrgcataatggtagagttcaaaaatataaataaaagagagagagaatcagctcatgcaatagaacatgaaaaaccaggcaatatgtcaagcacattgaccatttagccttgtcarcaatattgtcaataatagcacaaatttattatttaggatgtcacccttacacactagagactatgccctaaatagcttccctattttttatcctctggttcaataattcatgaatttatctaaacctttttgtckgtttattatttaaacctgtatcacacttggaatgaaaaatgggaaactttgatctaaattgcaattactttttaaaaaaattctctaaaatctttcataattttaggtgtccctctaatcttgtatttcagaaattgatactaattctttttttaattaccaatagctttgtgattttaaagtgctttaactttcctatttgaaaaattactttttagtgtctcactacacagaatccatgcccaccaatctcagcatcattaatatttctttttcctgaaacatttaaagctttatatttaaagktttgaaggggtatatattaatatggctgtgctagcrtgataactaaatattattttcaagttggaaaaaaagtggaggcagtggtttgatggttagccaatcagaacatttaatcttgtccttgatcaaatataccctctttggcatgttaaaactaagaactagtatcaacaaagaaaaaaacatttaaatttaaatacattttatgattttctgtcaagcctggattgttgagtgggaaatcttaactattatatatttttattatgtttaaggctatagattccattcattttayatcactaaaatacacygacatatacatatatgcaaaaaatatatcaatatatccaacatatacaaaaaacactgaaaacacaacaataagaaaaaaaaaacctagttaaaaagtgggcaaaatctggacacctcactaaagatacacaaagggcaaataagcatatgaaaagatgctcaatatcatagatcattaaagaattgcaacatggatgcagccggargccattatcctaagcaaattaacacatgaacagaaaactaaatactgcatgttttcmcttataagtgggagctaaacactgggtacttagggacataaagatggcaacaactgacactggggactactggcggggagtagatgagggaagggttgaaaaaccattaggtactacgctcagtacctgrgtgatgggagcaatcatacctcaaacctcagtatcacacaatatacccaggtaacagacctgcacatgtaccccctgaatctaaaataaaagttgaaattatttaaaaaggaattgmaaattaaaacaacaatgagatacctctgtacaactattagcgtgactaaactccaaaaaactaacagtgctgtatgctggcaaggatgcraagcaaccaaaactctttcattactagtgggaatgcaaaatggtgcagtcacatgggaagacagtttggcagtttcttaaaaactaaacatactcttactatataatccagcagtcatgcccccaggtttttgcccaattgaattgaaaactatgtccacacaaaaacctgaacatgactatttatagaagctttattcgtatcatcaaaaaccagacgcaacccacatatccaataggtaaatggataaacaaactatggtacacgtatacactggaatattatttagcaataaaaaggtattgagctgtgaagccacaaaaagacaaggggaaccttaagtacatattgctaagtgaaagaaaccagtctgaaaaagccacatactgtatgattccagccatatgacattctggcaaagrcaaaactttagagacagtagtatcagtggtggcaagggccttgaggagagcagaaaaaggatgaaaagctsaatcacaggggatttttaaatcagtgaaactattctgcgtaatactgtaatagtggatacatgatatacatttgtcagaactcatagaactatacaaagcaaaacgtggaccttagtataaactgatggcataaataaatattggctcatctgttgtaataaatgtgccacattagtgcaagatatttataatggaggaactgtggggggaaatggagattgtttatgggaactctattatctgctcaatttttttttttttttcgagacagagtctcgctttgtcgcccaggctggagtgcagtggcgggatctccgctcactgcaagctccgcctcccaggtttgcaccatttccctgcctcagcctcccgagtagctgggactacaggcacccgccaccacgcccggctaatttttttgtatttttagtagagacgaggtttcaccgtgttagccaggatggtctcaatctcctgaccttgtgatctgcccacctcagcctcccaaagtgctgggattacaggcgtgagccaccacgcctggcctatctgctcaattttttttgtaaatctaaaagtgttctaaaatacaaagtctactaatttttaaatgcagctgactttaataatataatatcattgagtgtagagaaactatttgtaccgacattttacattatttatttatgtccaaaatatatagaacatatgtgattkattaattactattaaaaatgtctttggtaatggattaagatcttcttacccaatggataacttctttttgtgaaatatggacagtaaagaggagtaaggtcataataaaaacacactttggaaattgtaggatacaaatactggwtatacagaccactgtttcacttgttaagtgtacagtmtctctcargtgtttgggaatggaaaacaagagccagtaatattttagaaacttgatctgattactttaattatgatatcctatctggatattaataaatatatacaaaaattcagttagtattttctttttccacagaaaaaataaaataagtgatacctggcagtatatgccaaatgcaaaaaaaaaaaaaccaaaaacaaaaaaacaaaacagcaaaataaataggaattcagaagaaagaagtggtcaagtggtcaacggaggatttgaggaatagatagagcttgaattagatcttgatggatgaatagagttgacataggtagaaaagatggaaacatgctaattgagagataaaagtactatgtgcaaggccatggaagcaaagattcaaaagtcatgttcagaagattgaaactagagctgtatgtctggaataggaagtgtaacaaaatagtgagagggtggaaaaagagttagggccaaattgtcaagggtcttgaacctcccaggatcaagcaattcttgttcctcagcctcccttgtagctgcaattacaggcatgcgccaccacgaccgcctaatttttgtaattttagtagagacccggttttgccatgttggccaggctggtctcaaactcctgacctcaggtgattcacctgcctcagcctcccaaagggttgggattacaagtataagccaccgtgcccgccccagctgtaaattttctgcaaattgtgtacattcttgggaattgttacaaagtaaaaaaaatatcaaattgtttttagatgttatgaaaaaattaataaatttaataaataataaagttagcataatattttatttgttaaatatctgctaatctgtatattttattttcaaattttactgtcactatcttaatattaaagtttaaatacatttgcaagcctttgaaattttcacaggctcccatctctgtgcctataggtcaaatgaataaaatgtccctgcccttaactctgaaatcttttcaaaggactaccctggttccttttcactagcaccaactttcttgaacacgtagccagaatctgctcatttttcttcaatttaacttttgcatcctaacttctaatctctttattggcgttctctcttcaarctcatgaataaactcctaattgccaaatccaagagttctttcagtaacactttattttatgcactgtttggctcacttcacactccttgttctattcctaattctcatgtttcactaatcatacactaycggagtgcagggtgaaaaaattaatcaaactgatcaatttttgtgtaaccaattctatagatcttttgtgataatttattatattgtatctatgcttaaaagtatgttttccataccattgtctgaaatatagtttattctatcttttatagtttgaattttaaatataaattcaaattatcttaaattcatctggaattaattctggggtatggtgtgagatgatactctaaaccaacagtcaggggacgggagccggggggaggttcaggatgaaactgttccacttcaaatcgtcaggcattagtgagattttcgtacggagcacgcaacctagatccctggcatatgcagttcacaatagggttcacgytcctatgagattctaatgccacagctaatctgacaggaggtggaatgcttgctcacccgcagctcatctcctgctctgccgcctagttcctaacaggccatggaccagtamcggtccccagcccaggggttgggggctcctgccgaaaactgatattttattccttgaaatagctatctagtwttttcaacattatttattaaacattctattcctttttttactgatgcctctcttttaccttttattgactgttttgtcccattgatttacctgtctgtcagctatataatctcattaatttattgtaggttaccagttttcaggtggttcattacatttacaagtagctctgattgtgttaccaattatacgtgaatatatcctctgaagctatgcagaataaatcaataccatttccacataacagcccttgaaagaggtgaagacattgatcatgcttcccattatccttagtttctttggccctttctcatacggtatgaattccagactctttaccagctacattatttactaaaaataagtatctcagcaagaactgggctgatatagatagcctaagacagaatagtgttcattattttccttgatatagaccataaatgtattttacagtaatacaatctcaccatctccttaaaaatattttaaatcctgtcattattttagagtttgaatataataaaaagttcgcctatcaaaaatacattttgttttaggttagtatatttttcaaggttatattataaagtttgtttaaatatgtattatatataaaggcaaatgtcaactgttcccctgcaacaaatgatgaatgttcctcattttctttacattaattatgtttttaaaaacctcatgatttttgaaaaaatacattttaaaatgacctcatacagcatgtgtagaattaaaagtgagttaaataaatatatgttgaaatataaatgttataacatcaaagatgacaaaatctagttttggaatctaatcattaaaattctttctatgctttaaaaaaattagctcacttatttttacaatttctttggtttccaaatgttgaaataagagaaatagttttattcttctatttgtaaatagtgctccataaataaaatattgctggggtagagagtcattatacccctccaaaacgtgagaccaactccaatatgattrtcacaatattttctgtaacatacaagttatttaacaagtatttactgagtgtttattgccagacccattcttggcactaggactgtagtgatctgaagaaaattatctaaaagttaactgtaaattgtcaaatatacatcaatttaaaaaataaaagcgaattttggagttattttatgcttctaataacttatatttaactcaatgttctttatactttctcttgttaaccaatggtttgttaaggttataaatttagcagcatatgacaatgaatgaacttatttatataatagtgaacatcatcatgacttcattaaatgacaaaaggatgarttaactaaactgtgagtaaatctgtctcatctttctaaattcctggcattcatatttgatatgtttgtggaggcactcaaaccattcttttctaaattgaaaaaatacaaaaatgtttttaaaaaatattcagttgaaaaaagattacagtatgcctttagttaaattaatcccccaagtacctttggaaacatgagtggtccacatacaattgcttaagaaatggtgagttttaattcagccactttaattctgtttataatttggcatggaataaatcacaaataactgatacatgagtatattaaaatgtatggtacccaaaaaattagatactcctttctcttatttgtcattagcaaatttgggaaatgtcttcatctgtaatgtcatgtaacttttccatctactatttatcattacawctgtgctttttttctacccatttgaagttacacgttttgattctagcccttttcttatgaggcataataagctttctattctcttcttgtcatatctttgccccttaagtcttcaagcttatgacagtataatgtcattcattgtgatgttcattccttcaatcatatgtacgcatttttctccccaactttctgagcaaagacttttaattgttcccaacttttattctctcctttttccatagcaatagaatttttagctgactgcacaaaataaactttccatttcccagtcttttttgcagcttaatgtggccatgtgaccaagttttagctgatgcgatttaactgaagtgtcctatggcaacttccaaaagtcttccataaaaggtacccagcagaagccctttatgctcacttttaatcactttattccaccttcctgctggaatttggattctaccttgggttatgagaacaaagagattatggaacggtgagctaaatggacttggaaacttccagatgtttttgtggagcagagttgtcactcctccagatgtttattgcatggagaaataaacaattttttaagccaaactgaatcttaactaatgcaccccaatttcactttacttcaaatgcgttcttcataaaatgtacataaaactccaggagcctattttttcagttattctaagctaacagccagaaagacaagtcttattttcaacactgttgttaatggccaggtgtttactttcacagctttttttttttttcacttctaaagtcatgagataaaactagaagaaaaaatgaaaacaacacctgtgctgtcatgtctttcactttcttatccagaacktcactgtcacgagggattccaagtttcttccggtgctgtcatttattcctgcatgtgtcagcatttagttagcttgatacgtcttttctggctgccctttagatcttgatacacgtgtcaggaagaccacagctccccactcagcaaactgtcaaacctgtgttcarctgcttcctagccaagaaattacctaatgtcagctagcttttctggatgctcattattgttacataaagcatgagatgctgttgtcactctcaaaaagaccagattcgccattcttgattagaaaatcataactttccatttttgaataaaacaagtcattgattacttaactatgttcagtactctacatatctgtcatctttcttctgtatataaattcattacatttgccatattattattattattattattattattattattattattattattattttgagatagagtctcactctgtagctcaggctatagtgcagtggcgccatctaggtgcactacaacctccgcctctcaggttcaagcaattctcctccttcagcctcctgagtagctgtaattacaggttgtgccaccacaccagctaatttttgtatttttagtagaggaggggttttgccatgttagccaggctagtctygaactcctgacctcaggtgatccacccacctcggcctcccaaagtgctgggattayaggcacgagtcactgtatccggcctcacatttgccatattcttaatgatggtttggattccctagcctctttagaatttttcttcttggcttcctttctgaattagtttttctactccctttaaaagtacttatcttttctaataagctgtagcatagaaaagagtatcaacaagacttttcactttcacatctactcaagaaaaacagtttatattatacatgaattggtaaccatctcaggcacaagatgtggaacaaacacaacaaatatgttccaggtgggctgcagtagttcccttgrtgtccttacatcctggaatttctcccagcaagctgtttgagttcttggatgtatttcttttcattctttctagatgacacccttgtcactgcatttctacttcattgatcttctagaaagtgatacataatactggaatgtaccaccttaatgtcaaacttcagcaaatatgatagatcacaaatactcatttatacttaacagcaatgatccaaattatttctatcacatttacacattcctcttgctatgcccattttttcaacttccaggcccaatggatgttgaggctaaagcaaaagaagttagagaagtcaaatatcatttcaaacacaggtcattttgagaattaaggtatcataaaagttaaggggatgctatttttactaggtgggagtgataatgtgttggagtttttatgaagatattaagtttgaagtgatagtggttttgtatatacttgtcctaaatttggcataagaaaatcactttgtgatctagatccacagtgaaattgtagctgtactagatatgtaggatcaacagaattgcttattggtaataaaaaagaaatttgctcagcaccaaaaaatttcatatctgactttttaaaatatagtgataatgatagtgttttaattttaaaaatatttaatatgtactcagtgttcccagtgttcccagtgttaaagaattataaggtgccacttaaagtattctcacatgtggtttttctatccctgtcttcctctttaatttacaatctacagtaacattttagaattccatcattttccacgctttgatcataataccgtggtcttcaaaagatggagcaacattagaatgtcccattttgattatggttgtatgcagggcttaaattttaccagagaattaagaaatatgttaaagcatagctaccatttctatttaatgccatcctctaatgaaaagatggaatcattaaactcttaattgtactgtgaaggtgagaattctttggtttgatgtggatttacattttctccattctctttatcaccatttctcattttgagtttgcttatcattatgacttcttagagtcgtaaaaaattgaaagataatgacaatatgtttcagccagtagcttctcaatctcattactgctattatcaatcacttttaaaggcataacttagttgtaaccagtgtcttgataatgaagattatttcattctctgacaactgctaattagttcttgcaaatgaagttccttggctactttttgtctgccttatagtaaaatcaaggaatttaagtaaatactttattgaattatttcaattcaatactttattgaagcaacacctaataatttaattcataagccactgttttggccttgactacagaaataaatttttcttgttctgactctaagaaagggagtaaaaattgtgccatgaaaagccaagtgatttgttggtctgagatttcagaatgaagtaaagatagtgcttataaatcacatataatgtattaaaattaaatataattgtaatgctccatatccttcaagtagaaatagaattaaatttaatttaattttaagagtatccctggaataaacagcagttttctgtatagacagtattcgataagtggtataattatctctaaccaagaaatgtttctctaaaagaaaatatgtttgaaaacagagtaatataattttatatcaactgttatagacaaatgtcttataagaaaataaatgactcaagtaccattttacatttatttcattcagtcttacatttattttacagatgttttatgagtcatttattttcttgtaaacaacttgtataagttacctccatcatgaaccaagtcaaaatcatgtaagatatatacatatacataaaacatgtagctgtatttttttaaggtgtcaacctgaaacataagcaaatgacctttagtaatgtatgcatgttattcaaaattgactttttcaaaagtgacagtgaaatagaaaaagcccaaattatgagcactgaagttgaaataaacttgttccatcagttaagcagagtgactgcttaacacggaagacaaacctcttttgtcagtgctagtattgggataggaccattaactggatatgctgtgcacatgttggctttgctgcctggagggaatgattcaatgtttgagttaggaaagaattgagttcactttctccacatttctttattgactttcactttgaaggggcaacacaaaggactctgtggaggtagtgacctccagcaggctggatacagaacctgcttccaggtttttctcttttcccatgaaccctgaagtccactattgtaaaaaaacacaatgatacatatggttgataatactaatcttgtcgttggatcactttaccctaagaaagcatgccctgtagctgttaaataacagatttaagtcagaaccttggaatacactaaaagaaattagaaaactaattgaagcctgcaagaaagaaacacaagtagataaattattactgaaacccagaaagtataattcccctcaaatyagcatgaaattcaaaatagttccacatgattgcataattgctggtatcaagtataactgaaatgtcctgcaacaagagaactgattccacatcatcctcattattagggaataaatcaaamatacttcttattaatcccatatatattttataatgatgtcaaaaaccatttaaatgacatgtctggttaaccaaaaatrattatgtcattcattcagggatttattaagaaaataaaacattagaaaatctttagaaagtacatcagcatgtggtacaattatagcaatactttcttttgaaagaatttaagttgcagcagcttgtttcagcagcgttagaactatatcagaatttgaagcaaactattcggttgtgcaatatacagtgtgatatttatccagtagcatattactgaagaatgtcatgggaacatcattgaactgtattgcacagacttatatttctataccaatttactgatcgttttccttatcatttatggcctctcaggaatgcaagggacccacctttctcctttgggccagagaagatatattccctgaatcagacaggaggaaatactctttgtttactctctaatcactaaagattctaaacttttatacagaaagaattatttgtctgacaatgtagactatttacatctgctaaatacaacactgtgtttttttaaaaatggctccaaaattatcagaataggtgtggatattatagtcccagaacatgtgagaaagtatcagatttttatatgaaatggaaatagttgaagcaatctcttcccaccatctagaaaatctcttccattttctggattttcctaaagtctaaaatatcttcagcaggaaaccagattttcattacataggatgagaggtaagtttcaaaatacaaatgtaccagggaggagttaacacctatgcataaatttatactgtgtataagtgactataccttctctgagagcagaatttgatggggctagaagaaagtgatcacaagggcactaagagtgaaattgaagggggaaaatggtcagaaaaagaagttatagaaactttcattaacgttttgttcatagctacctctaggagtcacaaagcatgttatgctacactttatctaattcagagacagcagcttagatgataaactacacatccactttctccctttattttaaatactaatatactccgtgaaacttaccatccagtagatatataatgtaatctttcttccctccctctttaacttgtgtctaaatgttctgctacccaggcataagataattctaaacattttggtttcaaatcatgctggtcatcagcatggaaaaattaaagcacgatttaaagtcattttggtcattggctttcttagcacttttaaagcatatgctctttgctagcagtctaaacaaggaattcttatgtggagtagttaatattttttcacagaaatgaaagtgaaaggaaaaagaggcagaaataaaaacatctgagtttacttaaaaagataattaaaaaatttaaaaagggttaaagacccccaagctcttaccagaaacaattatgtttcctctctatattaccaatgtatatccagccgttctcttctgtttccattgccatcacattagtccaggccttcattttcttgtgcctcaactattattatagtttcttagctagacctttgcctccagcccttctgactttaaccctttatgtattcataagatatatgttataaaggttactcttctgcttcaaaagtttcagtggtatactctrttaaaaacaaaagcaaacaaaaacctcttttatttactatccaaagctctccaaaatctgactccagcctacataattttctcccatttttcttctacaacttagaagatcctttgacttcaaacagatttactaattgtcttcctctcccatgcaaaatgtcagtctctacctgctctgcctaccagttcctggaattacatagaatgctctactcaagtacttcccaaatattgcctcatggactgattgcatggaatcacaagatgaactctaaaagattttcaggtttccagttcccgttcctcagaaagtctgatccaacaggtctgaggtgaagcttgataattagtattttaacagcttccacctacctgagtacccaaattgaaattccagtttctccatagtgattagtagtttcctaatctgttgtcatctattttactttaagaacatactgctgtactattaattagcacccacctctattgttctcttgttatttataaattttgcctgtttttaaatctaggttgtagactatttgaagagacyatcttatgcttcagctaacccccagtacttggtacagggatttgtatttgacacaccctcaataaatgacaaaaacaccatattaagtagtgtgtcaaattataagttggcatatgattgttattattccaagattaaagaattaacaagttttctaatcatactaaatgtcgaaaaactaaggttagattgaataacaaaagtatttgctaaatttccttctaattttcattacattttggagtttaattaaataagcacaaaattccttggttaatttaaataatactttatctcagattgtattttatgatgccaactcaaaaaagttgagagaaccccaaatatctctggtttttcaatcaattataggtctctcttttttggttttggctaaatctctcttgaatctatttatattttcaacatgcaacactcatattatgggtaacaacttacatatgttttctatgtactctgtaagatagcatatctatttatctatcttgctcctaacacattaacactttaagaagtaggccgggcatggtggctcacgcctgtaatcccagcactttgggaggccgaggtgggcagatcacttgagctcaggagttcgagcagcctggccaacatggtgaaacccatctctaccaaaaaaaaaaaaaaagaaaaagaaaagccagacatggtggcaggtgcctgyaatcccacctacttgggaggctgaggcaggagaatcgctttaacctaggaggcagaggttgcagtgagttgagatcgtgtyactgcactctagcctgagcaacagtgcgagactccatctcaaaaaataaaataaaaataaaattaagaaggacattctacttctaatatttcatgagttatccaagcctctgttcttatccatattatgattttatatacattgaatacagtccattatagtttcttaactagacatttataacattatagtttcttaattagaaactagttaaggtgtttattatcaccttaataaacatttattattctagatgatagccaaaatgttttttagrtatgtcatgtatgtcttacgttattcatttattcattctaattgcaggatgcttccattgtactgtatagtttttattaacgctaagcaaggagaatggcatctgtcttccagatgtagatrcaccacactgtttacacggagatactatgtgttctgttttgtgtcttacattcttcctgatagtgtccattactttattggtcatttgggaccactgcacattaagataacatttttatgggaacatctgaaatgatttattggtgtcatttttgcaagaaaatcattattcagtgacttttatcttgtataatttaaattttattacaaaattcartacattaaaagtcatctgccagttttttgcctacctatatataaatgttctgtcttccagcattttatcatcattagcttagttcatgaatttagagatgttagcccaacctacaaacttagaattttcactacacgtacatacttttagatcatttataaaaatgtcaactaagttggatcattttagaggaatctcactgttaacacatttttatttaaaatattaattcaaactaattccttttctgtttctcttttaagaaccagtgattctcaacatgatagamtagaggtgggggcagaaattgttgggcaaaaaatatccttcgggaaataaagtgtcagaatcaccgctttttaaatctacacatactctgtggagattctgattrcctaccctccctacaccctcgtttagaaaatccatcccctgcctaacccatccttcatgaggcttatcacagtagttagccaatgaaactaatagaattattgtccatacagcaggtgtttggggatggaaaaaaaaatcacaacttattcaaagccaggttttaaaaagtgtctcacctccgccaatgaaaaagatcagctttatcctaggataaaaatagtaactctaaagcaaacaaacaaawaacaaacaaaaaccttgtttgttgagccacatcaaatcagtttgaagwagtctaaaaaacgatatttctgtgcttataagagcgttagcaaatacttacaattttccccttacagaagctgccttgcctttcctcagaatctattccataaacattataagtactttgtagcagcatagtagtgaaacagaaaatcagacagaaggaactgtgtgagaaaggcacagaagcataaaacactgtggcatttgggggttaacttggtgtgcttgcaacttatacacagcgaacttccaggaaaagaaataagaaatataggcagggctagaccattaagaacttatgcagctagttgagtttggatwttttttttttttttttgagacggaatctcactgtgtcgcctaggctggagtgcagtggcacaatctcagctcactgaaacctctgccttccgggttccagtgattctcctgcggcctcccaagtagctgggattacaggcgcccatcaccacacccaggtaatttttgtatttttagtagaagtggggtttcactatgttggccaggctggtcttgaacccctgatttcaggtgatccacccacctcagcctcccagagtgctgggattacaggtgtgagccactgtgcctggccgaatttgaatttttattctgtagaggwtggtaagccactgaaaagtttagaaaaatacttctagcagcagtgtgggagataaattggcaagaggcaagaccagtgaagagattgtagtactgatctaagcaggagctgatggaggcctactccagggcaagaatcgtcaggattgggagagagtgaacttgtttcttcaaacaggttatatttccataaatggttcatatagatcctgaatctattttgagtgatttaagacacaaactctttaaagacctcaaagtattgttgatatttagagaatccaataatgctatatttatcatgacacagttccattctgccaaaattgaatgtataaagtgccttaggacctagagaataaaatgtatttatttattttgaatgtaatatcgtttataatttatcaataatctttcagaatayagtcatcctttctatacatgccaaagtcttcactagtctaagctgctttcataatctgatatatcatatcttatctttcaaagttgtattttaacttaattggaagtaaaataaattgaatgagagaaagaggaaggaagagcagtcatagaatctgtgagcaacagtgagttagctttcctcttcttggtaagagttactgtagcctacccttacctccctactctatactttccagttctgtgccaacgaaagtggatcatgcacaatgaatsaaagatacaaagttaaaatagaatcagtagagactttttaacaaattatgttagaaattatatttgcccatgctggaaaagagaattatgagactggactaaaaatacttctggactaaggccagctctctagtgagtacaaggggaaaaagcattgtgattaagaaatatcatccgaaaatttctaaatttagtaaatatatgttaggagcttactatttatcttgcaaaatacatgtttagaaattattttctacaagatattttaaataatgagaccactttcagtgtactcatatatgattaaagtacaaaaaagcaataatcaatctttttttcatcccagatcctcctaagtcatcccagatcctcacacatttctcctttcaccatgctctcatactgcctttaaatacaattttttttttgagatggagtctcactctgtcacccaggctggagtacagtggcacgatctcagctcactgcaaccgccacctgccaggttcaagcaatttctgactaatttttgtatttttagtagagatgggattttgccatgttggccaggctggtctcgaactccttacctcaagtaatctgcctgcttcggcctcccaaagtgctaggattacagagccactgcccctgggcaataatcagtcttaaagctatgtgtattagataaatgaggttaccctagtaaccatatgtagatagagagcttgcagttgtttaatttgaaattaaatcagtaccataattagcataagaaaattcaacttgaatttcacatggtatctctttaagttttaatggagtataaaaatttttcctcaaaaaaataaggattgctcttattctttttgatgctttgagaatgtacatattgtacctgcactatctgaatacatagtgtacaacttattctagccagtatttgcagggattaacttcatatgcctaaattaaacagaagtacgtggctctttcaaagagatagacaagacatctagcagtaagtaggagaagtatagagcatgaaatatgcagtttctcagattagctaaagtctgcattgaaaaatagacatgatgtcagataagccactcctctttttatagtttggatgatggccaaggaatatgtatttaatgtttttcaaatctgcataaaatgaagcagagttattgactgtatacctactcagtrtctaacattgtgcatggatttttacagggaatacaaaaaataaattgttagctctctatctttgaggaactaattgccttttgagataatgagacctgcaattagcccaaatgacaaggaagactctaagtggcaaagtagtaaggaagagaaaagatctgtcactagtctagtcgaggaggacttcaacagataggaagaagaagttcatcaggatggaagagatatttaagtcagggagaaacatactagaaggaaatagactaagaaaaatggcagaggtgggatgaagggtagtattttcaggggaaggctggccccacaagatgaatatcactcattctttatggtctacatggatgccagctatcaacactgagctttgacatagtggaatttggcttggacagtattcctttaagaaagaaaaattaaaaacaaaccaaatgcattctgaaaaagacaaaacaaaacataatcaaacaaacaatgttcttctttgatatctgcctcacacacaaagctttgccctctaatatgtctctgctaaggacagaaaatcatattgccaaaacaaagaagctgcacagtttttataagtgccagaggggttttagattgtttaattattatatacatgactggtatcaagagtcctatttttttcagactataatgaatacaatgtgtgtgggttaaaatatttgttttctgacttggctgttgctagaacatttttgggattggccagtactcccacctcgaatatttggtaatgatcgcctgaactgtgaagaaatgtcaaaatataagtagtaaaaacatagtccttcaaaaggaatcctggtaccacagatttagaatttgagctaatttgagcacatgcattcagactttgcagtggaatcagagatcatatatggacacccactacacaactaaaacacttaagtaaattatatgtcattccactaaaatcaaacttcaccttccataagcatggctatatgtttgtctcaacatattgttatctgtgggtggatcagtacttatgtactatgtaagtaattgtgcagcttacctacttctaggggcactgagttttttggactttttttttaaggcttcagaagtaactttggcaggtactaggaaaaatagtatcacttttcttcctctcttggggcttgcctcttccatgatacctgatgctctggcttgacattccttgcacaggttgtcacagtgctaacaaaaacataaagtttgttgttggtagagacaaactaggcagtggtgaggtgtggtgtcaagggaagaaagtgatagctgtggaaatttcgtctacagacagtgtgtgggtggataaaaatatttaagaacagactctccagaagaaaagaaatgtctctaatgtgtggcatttgcccatttacattgtgtaaatacctccaccatggccagttttatgcccatgtcaagataccaacatggtattgggaagagatgaatgtggagttggaaagagatgcacacaggagccgggatgagccatctccagcacaccaccagctacaagtctcaagcacagcttatgtcatgaactatagcctggttttggcccctgaaaatgtgtacagtcatttttgaaagcataaaataatagtgtagagaactatagaaatactagttttaattattcctcaaactctataaatttacataaaagcaatatttgcaaaatattgaagagataaaacaagaggactttaaaataattaagataaagatagaggatgggaaaagaaaagcacttaacacaatgctgaaatgcaggttcatttaaaaaatctcttttcactcttatatctcaaaaaaaagaaaagaaagaaaacagcactgcaaraatgtacaacacatggactaggaggttcagaaaattcatggaataaacatactaattacaggtgttctgattctaagagagtttttgaatttgttgtaggcatcacatggtgtgctgctcccctagaaagcacctaatgcagagaacctattgggagcctactcctccatgtttgaaagtagtcaaatgtacaaatctctcctcctctggccaggacagctgacatctgcacatcaattacaatgtggtgtgagaaacatacacgcacactctttctcctggacaaagattcaaagcattttgaaactttctgggaaactcagaagatattcagtaatgtttgtatttatatcactagagaaggaagatatattagttgagtattagttatatgacagtagattttgtgtgttttttaatagaaatgaaggacaatcaaaygaattgctttattgttctggatagcagatcaatatttttataagcagtggtcatttttatcaactagtctcgtaaaaaataattactaaatagagtagtagatgttggtcagtctagaaaaaatagacaaaatactggtgcaggggggaaatactttgaattcatctgcaagacttattttttgtttataaattgaatttatagaataaatttctaaaagacaggattttaggaacttcagaaatatccacaactgtaactaatcctattgcttttaggaaacattattatgaagttgattttgagttttgttttctgaagtattagattcccatttgtatgaaagtcagaaaatatgggaacataaagttccctctgatttctataaagacaagagcttggcaatggtaaaaagcaatttttagtcatcctgttcttaaagagtttcttctagtgagtattatcttaaaatgcaaaagtgtgttgaatcttaaattggtaaagagggaacaggaaaatcttggatgaaaaataatccaaataaaaccaaaacctttaaatgagaattaattagaaacacaagttaactatgctggacgtgcatgtttatgagtttaagtgacctttaaagatgactcaaagccaagtaatagcttatttgtggattatgactatttaaatgtactatttggcacgtgggggggttctttttctccagagtatattaattcagtataaatgaataaatatacattcaaaatctattgtcattggtacctgaggaccacttcaaaattcctgctctaagatcctactcatatcaataatttatgttagtgattataaataccttcacttgtccatcttatcaagctgaagccctacctcagcacctttcactaagttttcagagaatttttacatgttttatgtcatttgatctccccaacaacaatcttgctataaagtgaatattgtgcttttggggaaaaaatattatcaatcaagaaagtgatgcctaacgaaagataaataacatcagtaaaggcttaatttttctaacattaattaaatgtttaacttgtgctaaaattagcacaaaaatgattagattcatttaattgttttttatatcattatgaacgctttccaaaagtataccatttaactgatgactataaaaattcctattctctaatataatgtattaatcaattcttttaattttaaatatactaaataaagcctcaaaacttgtcatctattttctaaatactgaagtaatagacattggaaatctattgtcactgggacctgggaccacttcaaagattctgctctaagatcatactcattttatagactcatttttcaagtctgtactcaagttttctttcctcttgagaaatggaagtagaaaagtttctgttctctaaggaatttgataatrtagttactyataaaatgttatagatttttaagaaaaagtgactcaagtatttatattttactgaaaagttcagtcctcttgattttcctgttttagttaatggcatcataattttccaaaccattcagctttgaaatttgaatgctttttaaaaaagttatctctcataacccatatctaattaccrctttctatggattccacctacagggtagtttacacgctgatttgatttttttccatttctattactaacaccgttgttaccgcatttggaatattatagtattaaacgaactcttctctctttgcctactttctcctgattccaatgaatccaataaactgcttcctgctttcccaaagaaaaaacactgttaaaagttttagtagttctctactgttcatgaaatgaaacccaaacgtcttgctgtaaattatggagtcttcctattttgacaggcatggtggtgtagtagtaaaaatgatactggctttgagacatggctttaaatctagattcatccactcactagctctgtgattttgagcaaagtgactaactttttcaattctaagttcccttctctataatatgaaggtatctttttaaaaattaaattggattgaattgtaatgcacttaacacagtaaaaacagttgcctgtctttttctggtcttatttttcatcaacaaagttggactgccactgattctcacaactctgtatcttttgtttatttgtgacttcccatcacctgtcaataccctgttcatctttcaaagtgagactcaagttccttccctgatcctttccccttttttcttttcagaaattcacaaaataaagtatctctgactctttttagaaagaacacttatcctgccttattttgtagttactatgttagttatctctccttctcaaacatttattccttgagaagagaaaggcaaaggaaaaaaagtaattcttgaatagtcttatttttatatatatccagttgaatgcttgcatatagtagaaatgctgaatttattgaataaatggaaatataatggttgagaaattttacttcaagtatgttacccacatagcattacattttacattaaccttccttaaccctgtcaagaaattttaattggcagaaatgacttgtcatataagacactgtccagctgctttccctttccattatttctttcaacttctaaatagaactctgcactttgtacttctttcacaaagcattctattatgatcatcaaacacattttgggaactggggtaataattcaagtctcagagggaaatagggtaaaaaatgaaattctaaagaattaattctgaaatatagcatatctggaaaaaaactgaaaaaaatctcaatcaaatgtgtttaacaaaattataatacagagtctagacttacttttaacattttagaatgtcttataagttagtgaatggcagaagtggcaccaatatgcggtcacattaaagcatgtaacagcatgttgagctagttcttatttatgtcaatagaaagctcttctagagtgtttctgatactcccctaaacaacatagttcccattctgtagtaatttccaacacatttggagctctagagtgaaaaattaagaggagcatatttctgggtacaaaaagaaaaaaaagaaaaaagccatggttcaataatacccaatagtgataagataagctacttgagacaaactgaaaaatttcttctattgaccatacccaaagtggagcacgttttgttttctccactttaagcaagaaaatagcatacatttgatgtttaaaacaccaaaatcacttatttaagtgctgccatttaaaaatatgtctgtttagaaatataggacattagattaaaaattgttaaaaatatttctttaaagacttttatctaaatccaaaaacttttttataactgacgatggacctacccagaaattcagtaaagagtatttgtcttatctttttcagagtagtgcaattgagcacccgtatggtatcatgcccattatttttaacattgccttactacaattttattacttaagaaaacatacaatttgtttgaaaaatgctggggttttatgcatttttctgcacacagtattcatcatgaagtagatattcttaaaatgaaagctgtgtataaatacagattgaccttgattttcatgctagatgaattcataacaaatataagcgctatacattagggataccatggccgctttgttaacactgtgtattcaccacctagcagaatgcctgacacacaggtgaacaggaatatcaccagacttgaggtgcctgtcacattgcatgcatacaaatcacctgagacgccaattaacagcagagattttgactcaataggkgagggttgaggcctagagaatatgctttaaaacaagtaaagtaggtgatcctaatacaggtgatcccccaactacactttaaatcatactgctgtttaggggcaaggtacctgttttccatcccacctcactaaaatccctggaattggctaatggaacatggtgagactgaaggcctgcagagagtgctttaagaatatattatggctgggtccagtggctcacacctgtaatcccagcactttgggaggccgaggcgagcggatcacgaggtcaggagatcgagaccatcctggctaacacagtgaaaccctgtgtctactaaaaatacaaaaatttagtggggcatggtggcacgcgcctataatcccagctacttgagaggctgaggcaggagaatcgcttgaattcgggaggcagaggttgcagtgagctgagatcgctccactgcactccagcctgtgtgacagagcgagacttcgtctcaaaaaaataatataaaaaataaaataaataaagagtataattatggggaatatctagatcttggagacctcttctagtcttaaagtacagataagttaagtggaaccaatgttttctcattagtagggagttccacagcagaactgaatttacttgaggatatgctgataggtaaatattttctataaacagagcaggcactcaataaatattggctcttattattaccaggatttttacctaggatgatattagtgttttttcctttactttataaatgatgtgtttctggaattaaactggaaagggggaaaagagaagaaaatgcacaagagagacctaacaagtgccctgccccctatgaaacttctggaaatccatggtatatttcagggattccagtgcaatttatttagtctgtatttctgatgataaaatgctaactatataaccttcaataaatcattcactctgtatttcttttataaaagtatgccccatctatgttgtacattaattagaggtaaagcagagtttcaaacctacgcctgtctgacacatcttttctattacaccacactgcctccccagccatataaacttcctaggagatttgaggattcagtttaagagaatattaaaatgttctatcacatttcaagtgatagaatagtaggacttggtgattaaaaatgggagctagaagagatggaggaatgyaaggcttccactttggtcaactgagtaatatcagaactcttatgtaaaatgtataaggtaagagcaggattgagggggaagatcctgaattcaattgggaacgtgctgaaattgaatttcctggaggtcatcaggagagctatctagtgaccattagatacatgtaacaagagctcaagaaaaggaagagacatgaaatttcagatttcagattaaacagcacgtgggtcataattgaagtcatgagtctagatacaattacctcggaatgtatgagcagaaaaatatggttgtcatgagcagagtaacacatggtccctgacggttacatggtctacactgaactgtcctgcataagagccatgtgccacatgtggctactgaacccttgcaatgtgaatagttggaattaaggtgtgttgtaaagsaaaaacatgcattggattttgaaggacctgtacaaaaagaaagaatgtaaaatatctcattaatatttttatactgggccaggcacggtggcgcatgcctgtaatctcaacactttgggaggcggaggtgagcaaatggcttgagctcaggcatttgagaccagcctgggtaacatggtgaaatcccatcttaaaataaaaaataataataatgaaaatatgtatatatttttatactgattatgtgttgaaatgacgtattagattaaacagaacatattcaaattttaaaaaaagaaaaatacagttgttattacagagaatataaaatgggaaccaaacatgctactaccactttttgttgacctcaatgcaatattttaggatgattacytaagattatttataaaaattacatttccacagtggtaagagaaaggagaaaagtgattattatattagcagtacaatttttaactagagtaattttgtgaatttgggccctatggaaggaaaaccttttaaagtgataaaaatttaaagtgataaattcctgactttgaaatatgtaaaatattcaaagaaatttagttttatcatctttttgtttataccatagtaagcaaggcatataacagctaacgtttgctgagtgcttatattatcctgcaccctgtgctgtgattcacatatacagtattcattattttaataatcttgtaagcacatagattagatactatctcagtcacccaataaagaaaccaagattcagagagactgactcatttgcccagaaataataggatttctctcaaatctcagatttgaacccaaactaaggtatcttcattatatttcctaaagactgcatccaaaagagctttctttagttgcttaagttaaataaacaataataacttgtaactgcattaaaaaatctgcatagatctttttatgaagaaccagaaaataacatccagtttctctggcagctttttacttattaatttgtttaccaaacattttttcccatagcaagtatagaaatagatgttaacaagggttcattttaattttcacaaatatgaaatagtaaggtaactggcrtttaaaattctggttggggccgggtgcagtggctcacacctgtaatcccagaacagtgggaagccaaggcaggcagataacttgaggtcaggagttcgagaccatcctggccaacacagtgaaaccccagtccagtaatatttgtactaaaaatacaaaaattagctgggcatggtagcatgcacctgtagtgccagatactcaggaagctgaggcaggagaattgcttgaacctagaaggcagaggctgcagtgagccaagaccatgccattgcactccagcctgggcaacagagcaagactctatctcaaaaaaaaaaaatctggttggtattgaatcaaattttgaatctatgtcaagtagtgatataagatatcatattgagagaaagtttctcaaatagcattttttcactagttattaaacacagtctctcaaattctgagagcatcctggatcctggacttactggaagaaccgcatgtaaaataattcctaagagattacaaagtgggtcttagttttttcctcctaggtaaaagatttacttgaccgctcttgattgctatataagtattacttttaaaacttacttaacaagtgattctaaataaaatttaggagtattaatccccaataaaggcttcaaatttagaagacatgtttcatgatttgagacgtacataaaaattagagttcagtttggcttgtgctgtgtttcacttcatgtttactgaaattatcaaggtcaatgaatgtgtagtcagtacatttaaaggtgaattgaagaggaattctaagaagatttagaaaaaaatataaatactaaaattttagtaaagttgagatttcagaatttaatctcattgttgatgttataatctatatatacatatagatttaagcaaacatatatacatatatgtctgtcagcaatgcatagacttctctgtaattttgaatgttgcttaaaaatatatactattcaacactttacagaagaaaaaatactttatcattatgatactaattttgtgcctaataaaacttttttagtttttataatttcttctctcacaaaaccttagcctctatgatatgcaatatatgtagttgtcacactttctgtagaaattggcaagctctaattggttaaaattttaaatgaccgtattatttattttatatgtaagtatccatattcttagttaatattttggaaacaaatacatataaaccctaaaggaaattggtttttgatatactttttctaggtcatgggattatatctgacttaaaattttgattgaattaaactgtcatttaaaaaaaaaccagtttttagacatatatttccccactcacacacatacagatggcactgaccagggaaatatatttttgggggaaggagcattcaaaggagttgattagctgtagctatactaactatatctctagtttagtttttttcccaaataggttcagcccacatgyggaaaagaataactgggcagcttcagacaaaaaacctaagctatccaattgcctgtaacagattttacagtaaaacagatgaggtttatttttaaatgaactatcataacaaacgcagtgttattagttttgttaaactggatttaaagatcaagaatgtaattgaaaacctgtgatgtgggaatcaagaggcataaggaagtttttgttctctgaaatgtctttcttatccagactcttgctggctgcagcccttgaattgtaccactggaaactagttgctctacattaagcatcatattttcaggggcacataactaaagagtaaatatttctgagaaagtttacacattgagctattaaccattaataatgtcagtttataaaatggctctctaatggtgtagctggctaagaggaggggcttaaaaaatggcattcaggatggttttgaagggtcagtataagggaaaaaaaatatctttagcaacataatcagtgacataggccagagaaatgaactctagacagtcaggaacacaataaaaattccaagatttggaagaaagagttatcttgtattgacaggaaactgctaaaagatgatgaggagggaaatgaacacacttcatcagttgttcaattgttattcttctgtcacttgagtcttgatatagaaactaaattcactcttctgccattctaattccattattgcaaatttctttatagtgaatttccctgtaagaaggcatgtttattccacaactccgttttaatttgtttcttctcagtcttatggatttatacaactttggcacatgcattgctgatccattccttacgggctcatgcaaccacatttgtatgaatggcgcatcacagtctagtttgtgattgagcatgacattttctttgcatatgtctgtggagtgttccctccatacatttctaaaaacctgttttccaactcaraaattttaacattagaattcacaggatgacagtatctctaaagttaagtaatctttatggatatctgatctcgtttacatgtatctttatttataattgactatgatattgggatgaagctaacaaaatttaagaaagagaaaagcaaggcactgtaaatacaaaaagcaattgcacaagtatagaagcgaaagagacctaacttggcagcaattcatctgaaagggacctggacaagcttaagatgagccgacagtatggcatatttgccttaaactatattaatgggaaggcaaccttggctgccttaatagaagtataaggttgccaaggaggcagtaatcttgctgattctggccccaccctgtgcaatttggagcattgcattctgggtatcctattttaggtggtattcttagaggactggtgggtggtgaaaatctgagaaatcatgtttaagtgtaatggttgagtgaatttacattgcttagcctagagaagataagattaaatagaaatataactgtctttatatactaaaatcactgtcctatagaggacaatttgtaggtatagaagtaaaaaacatttactgatttgtggtcttattttagattgatttcatgattgctttattccatataaaaataactagcaataaatactaggagcccaatatgagcctatgcaggtggaaattaggtaacaagaaaaacttagacttagtaatgcagtctgagatagtgctagagtgagcagttctctacagactgaaggtatcattcaagtctctgtttgaattcctatctgtaagccagaccagcatttgaaatagccaaaaattacttatcaaggggatgagtgcagacagaaaagaatgttatttctcctatgaaagtgttttttttagtggcatatccatattattcatatgcaaaaaaaagagcatgaggaaaggggcttaaactgaagcaggagtaatttccctagatatgagaaagtatccagttgttagggtaatataatattggaatcgactgctaaagaaaattgtagagggttcattcttggagagcttcaagaaaagttttgccagttatctgtcttgggttgcttagactactgggtatttgggggagccttccttatcttatcagagtgtgactgagaggaaattgacagccacatgtattaaaagcaacatagtttattatatatatatatatgtacatatgtggatgttcatcaaaaaatagtatatgctcatcaaagaatatttggaaatcactgaaaaaaagtgaagagaataaccagaaatataactattgtaatctagtatatttatttttaatcatttttctgtgaattttgattaacttatgttaggagttttttaaaacaataaatatactcttttaaaattgctttttaaatttaagcacaaggaatttacccagtcactttaatgaacaattaatatacacatcagttctatattgtggttagttaaagcaaagaaatggagaaaaggaattaaaagagttaaatggaaagaaaggagagaagggaagagaaaaaagaataaggaaaagaaaagagggagaaaaggtaacaggaaagaagacaaatttggaaggagatgtagaaaaaacagaagagttggggggacaacaatagtgaaatgttagggagaaggttgaaaagaaagttctagtaatttatgatagatatcctgagataaccctcattcatctggccctcaaatatgttatgtaaataggagcataatatgtkgcttcatatttctgtcttttgaagttctgataagtttgttatttactgattataaatctgtatatgctctcggacattaaaataatttcaaactctcaaatcaaaagatatctggagcagcttttgaatgatgaagttcttctctggttgcagaagtaaaagctagatctttaaaggacacgagcctgaggattctacctctaccttatattaattggcatgaaaaacaaaagtcaaacctattgtttattcaattcattctcgttctgtgaatcttggattttatgttttcatgttttctccatcatgttggtgaccagttagttgaattagtttggagcaagcagtaatgaggacaaagtcattccacataaaaattttctcaagtattaacaattatccatgaattgattgcatgttttacccaaatcatcttcttcagtaatgaaggagatagctttgaaatctatcaatttgcataaatttaccagaaaattcaccccaagcaaatacaccactgatggtgaacatgtattttaaacctgacaaacaatacatcaacgcatatgctaccaagacttagtaattaaatcacattaagattgagaatctcttattctagcatgatttctatactagctgccatatttgactcttgtaatgcacatctgggtatctagaaacatatgttccaaatctgactctatcactaactagctctgtgatctttgcttacttcttcttaacctcacagaagctcaaaatgtatttacctctaagtaaagttcaaagtgataagagagtattttgccagccatgttacagagtttcttakttaatattctcaagctcttacaagtatcaaaagaaatamcawtatagtgcaagattatttacaatgggcctggtggattatataataacactttgtccacctaaattattattacaagraatackttttgaaagccttatatcagtgtaggaaaccacaggcttgcatatttgacctttaacatgattttattcagtgtttagggtaatgttagtagaatcacagtccatttattcaggatgagttcccgcacccccaaattccagtgagtgttctggttatacctgtcaaaatctctagaaacttcagaacttctggagtatttctctgccttttatctctcctgatttcttgatatatctgtgtattgcttttccttctctttagtgagcactccttcctcacttctccccctgcttgtrtctttctccatttacttcctaacatccttcctttaattctgtctctcccatttatccttgttttgtgctatcttctctttttataatatgaagttaaaatatgttttgaagcattttatctgttcactaggtctgtgttaccactttctttgcatcatattctccagctagacaggacagagatccccattcctcactgttgtcctaatgcatctgcacctttttttcacattttgttctcttctttaaaaaagctctttaccctctatgaaatcctccaaccaatccttccttcaagcaaatgcacctttaccaggaaattttcctttcccagttctttacctccttaggtgcacccagaaatattctctttcagtctccttatcactcctttgttcatatgaaacttactagcaactatcgtaacttaccaaattatttcctatggcagtacattaagggtaaaagtcacattgtttatctttgtatccattattacacaatstcacctgtacatcgaaggtgctctatgagtactgaattgaactgcactaatttaaatcttaatgaactagatctaattgccctttgattccatgtaacattcagttaagattttctaagatgagtggctcttaacttaaaaagaaaaaagtgttcccatatttatcagtgagtgaagccttcctcaatgaaaattgttgtcagcctactcccaattataatacactaattacttcatctttacttaaaaggtagtgaattatttaataaaacattgttatttagaaatacaccatagttttaatgtacaagaaaactaacattgtaaatatgtctattccagtaaggaaaaaattcatgaatttatataaaattataatgtagatggggaagtctgatacttgggcatttttaacaagaagttattaatgatagtatagatatgtttgtctagtaaactttctatctaatttcaaatgatcatactaaattttagtttgaaattatctgataattggaatctggtgataagagagtttcaaatacactcttttactattatttcttggctaacatgagcaggactttaaacagatacctgcagtttttaaaaactggacagctattatcatctgaacttgatggatcatatacttttctatattttatttttttctttcaattgacataataattgtacatatttatggtgtacacagtgatgttttcatatatacagtgtatagtgatcagagcagggtaattagtatgtccgtgatctagacatttatctgaaccaaactaggagaaaattaacaaaatataaaacagcttaagcaaaaggtccgtttgttttagataaaaatgttctaaagaaaaaacaatagaaaacttacatttcaagtgggaaaaatgtctagagaggaaaatttagcatgataaaaataagtttgccacaggaacagaaaaccaaatactgcatgttttcacttataagtaagagctaaacattgaatactcatggacttaaaaatggcaacaatacaaactgggaactactagcaggaggtagagatgtaggcaagggttgaaaacttaactattgggtactatgctcagtacctgggtaatgggatcatacataccccaaactttagcatcacacaatatacccaagtaacaaacctacacatgtactccctgaatctaaaataaaagttgaaaaaacaccaaccattttaaattatgaaattttagtctggaaagaaaaggattattgaggatatgtctgaaatctatataataattaggactttaaccaaatgaatatgaattcatatatgaatatatgaatatgaatcagaatgaatatgaatacatgaatatttgttctaaagtattttatttaagtttacacacaaagcttctaattaccagtattctgagatgtgataaaaacaaaaaaagagaggctaaactttatgcattaggttgtaaatttatttttttagctcaaagtatatcacaaaaacattgattcaagatggcttaaattgattcttgaatgatagattcatgcagagtatttaaaaagctggagatatttgcaatttatttctagcctttgagacagaccmcggaacatatgcacaaagggtccttggtctgcagtcagcagcagaatattaggctaagaaggttcctgattcaacttagatctgcttcattaggcttcattagataccaagttatttcagcttgagataaaccttatgttctctcacacacatagcgttttaactgaatgtaattagacccacgtactacaatctattgatgttttgaagcagataatttcaatgttatttctttgtctacttactttttatcctaaaaawgtttttaaaggcaaatatgtgatcatctatattcttttttactttttcatactataaaacataatctgttactgtttaaaccaactttggttccgtgcattttcaaatcttttcatagtagcatgttttactgaaatgttaaaatgttaaaaagaagaaacactgggctaaatagctggattgtggccttccattctccgttttttcattgtcttgagagcaatcataaatccttatgagggagaatggatactataatgaaaaattaaatagtacatatggttctcattgatgagttttctgctatcccagcaatgccactgcctaccccagcattgcttccaacactgccgtaagatccttataagaaaggtgaccttgcatccttgtttgcccagcacaatgttagtttacacctgctattctgatgtgtttatttacagcacaatcttttactctcaaaagtgttccagtttggatgatagattatatgtagaagcatgatgtaaatgtttaacaactgactctcagggaaaaaaagtgtacatatatatgcacacatagttcattacaaattctactgatataaaggaagcatagcacacaagcatataaataataaaatataatactcacaaaatgctttcactatttctgtttttctctgaagccaaaccatggttgtaatagaggaacaactatagttctgacaataatatttgttgatgttttcatttatgttaataagtaagaagaaggtaaatgaatgaagatgtatattggaacttcactcacttctcaatgatatgagtgacttctttgctgaattagatcatagtttttagagatactagaaaactattttctcatttttgttctattcacaatgaaacagttatagacactaaaccttaagtttaatctacattattaacatttttgtatcattcgcttaaatgtagaccatcaacaaaatagtraatcaagccctgatttgtagcattggccaatttatgtggtgtaggtgctcttatcatagttgggtccaagccaccaacaaaacatcactgaacagagttgggaagaaatatacagacgcataccattatctagtatttccatcatataaatacattagaaataacctcaaaaacatatataatagtaaagaaattcagtagtaaagagttttgagtatttattacttttcttttaatgtaatttatttcattctaagtttatgtaattaaatgtttaataatggctgtatttaataagttaacaaaatttttgaaaatttaacaattggctctcatggaccagtacaaggagcttcagcagaccaccraatatggtcaccctacttataactaatcccatatattcaaacattcattggctacatattttcaaacacttaatatgtgccaggaattgtgctagttttgtgagatgcaatacagcagagttcgagatagaaactatttctgccttcacatgatttccaacagcctttgactctcccacttccartctctttttcctaatcaacctaatcattagtggtgtgagcagcacatatttggtgaattgtagtgacttagtaggtatataggtgtcgtgtggaagcacaaacggaattaaaaagaagaaaagccagtggttgggtatttgaagtgtctagtgtaaatagtaacaaattagaactgagctttttctgtcaaatgtttaaataaccatgctagtagatttcctttacctgcagctttataatggcaggcaacaataaaagacactgcatycatgtaattagtgagtaactactctatgcaaagcactattctaatgctgagatgggagtgagggataaggaaaggggagagagtgacaagggaattggaaaagaggtaatataatagatggaaagacctataatacttccaactcctggttctaaagtctaggagaatacagtaatctaaggagaaaatcataacagtaatgccttatrtttgtatactgttttacagttctcacattttactctcacaaggtactcagcagtgtgcaggggtggactgaaatggccaaggggagcttcgtggagagttgagacttaatctgggccctgaagaatgggtagatactgagaagaaaaattctagtcaatattgtcatgcagagtgaaaaagtatggatgtttatagtctaggaaaaatagtgaatagattggctggctagaatagaatctttccattagcaaacagtagaaaataaggtaaaagaaaaaaaagagccaaatgatagagtttcttaatgatgagctgagagaagccttacaatacctttattcactgaagtttttattgcttcttacttaattcaattacttgaacacattatttcctaatgtgctggacactataatggatcttttgataaaaagatgaaaaagaaaagttccccgccctcaaggagctctagccagacagacatatacaaataattataatacttgagcactacacaaaatgataaaaataaatgcataagtacaatgagaaggttgctccctcctcctactgaccactgagaaacactgtatgcaattagtcatgtgactgataggaattcaatgagataatacattttctttaaaaactttacacaatactgctattaagaataataattatgaaaatgtgtaataaagaataagaattatgaataaaataaaatagtattataatcattatcattgttatttgagaggctgaacatatgaaatgatgtggagcccctgagaagtactgctgtggtgaatcagaagaaaattataccatgtcatgaaatgcactctccttttctctctatatatggaaatcctaactaatctttrtgtcccactttgtctgtaatgcttcctggtctactttcctggtctacttcagtcctctggagctcctgttggaactgtggccaataccatatgatttagcatttaatgtctctctaattttatttttattttacttcatcttgtgttgatattagttttatttctaaaattggattcttaggggctgaatccaagacatatgttatgctttctaatcattgtatcccctaatgagcctataacactgcagacttaaattgatgctaaataagtatgaattgagtgtttaatttgaaaatctaagttgtgggcacccaggcaacattggcagtattgtttggtgaggcctctgacctccttctgcagtctcttccacttctgtattctcttctccttttaaggtaatctcatgttctctgtgttctacccaatcaaatcccacattcaggaaattatcttatttactcattcattttaaagttgtaagctattcataagtatttaagtgttatgttttggtggtaatttacactttgaaagataaaacattaagccaaaaagaatgaatctctaagcagtaagcaggttgagttttcttgttacagttttttccatctaaaccaacttataaccagtatcatcttgatagaaaacttaaaatgttaaaatattagaatgtttaataatacctcagtaatcaacttcagaatgttatataacaaaacaactcaatgggtggaaagagcattggcttttcatttctgkagagccctgagttcaggtcctgactctgttgtttactagaaccaaaccagtctctgactgtcaaactgagcctcattttcctcatttataaaatggaattagatgagagaaatcatgtaaagcaccaagcactgtgcctgacaaatagttaatacccaataaagagaagtttttattctcccatctgtttaataaatattaatgcattaatttggttaattttattttagctgtatgactgtacaacaatatgttcattttagataattttatgtaaataggacattaagtagtttcaatttcagtttcaattaagtatttggttttatattatagatggccaactataatcaatttgctgatctctttttcctatatatataaacattggcttttcactataaatactttggagcaatattctacccctctatgatgactcttttacttataagaaatatatcaactttttgacatttggtgggagaacaaaaggggaaatgatccaaattgtaagagtgtataaacagaaggaaatcagctaagcttttggtgttacaaaccacagtaataatgcatattgtttacacagtgggtttaactaaaagtatgctgaactaaaaaccagaagacttcaattccagtccaaaccaccactgccactaattcgtgatgtcattttgaaaagttatcttttcgtgactcagttccctcatcaaataaaataagcataatagactagatcagtgcttcttaaacttttattggaaacacagatacttttgataatgtgataaacgctttgaatcctgtccccaatatttgtgcatattttttcctttccagtttccctgagggctatctgcaaacttcatgtcaaaatctctggactctatgatctcatggcttccttccagacctgtaattccagagtggagttgtctttgtttcatacaaccattagtgtgattttaagcaagcaaatcatccagtttctttctcaatgctacgaagtggggtattaacacatggtataaggtttcctccctctgtctgcagtaagagaagagagccacgttcctcctgaggagaccctaacccagattagcagttccaataaggaaagctatctacttctcaggcttgttcagaaacaagcttattccacaaacttattgctctgtttctcttctattgttgctttaacttaattttatgtgtacttagaatttcaacttgactaaaaattcttcagatgcaaaaaccatgcatggtagttagtccgtggtttggccccaatgatccctaacacttagtattcactattcacacccttgggtagttccctccccccacgttttactattttactagggttagtctgtgtgaccaataaaataaggcagaaatgatggtacgtcacactgcaatttccatcttaaagattctctctctctctgcctccctttctctctctctttctccctccctctctctctctctctcctacccctctcattgctcagtctgaaggaggccagttgccatgttataaggacactcaggaagcctgtcgagaggcccacatagcaaagaggaagttgccggccaacagcctgatagaaacagaggcctgccaacaacaatgtgagaatgctttatatagatccttcagccccagtcaagacataagaagacttcagccctagctgacagtttgattgcaacctcgtaagagtccctaagaccaacccactcagctaagctactcccaaattcctgaccctctgaaactgcaagataataaatactgttttaagctggtaaattttaggtaacttgttatgcaacaatagataactaattttctctctctctctttttctctctcttttttctccctctctcttatctttccttctctcaccttaccacccactctctctctcagttgcttagcactattggtaacatttaacaactgtaatctattcaagaaatctggcctacctctcttcaatttatatttataaaacaaatacaaaaacaaaaactgaggcctaggakagtcaactatttgcccaaggtcattcagttaattattggaagaaaaaggattaacacccaggttccataatatatgatacagtattatttccttgtcctcgtgctccctctcactttcttatcaactcaatctactcctatgctatatataatgtgtattaatatttatacaaaataatgctattggtgtgataagctaagactgataactctttggtgaattttctagcctacttttctcccttttctcttctgcaattgacaatctggtccatttataaatccctgtatcaaagactgggtggaacaaagcaatggatattcattgtcacgagttaatttcattgctttgtgggtagttctggtaagaggatttggtaagaaaggttaaatttttaacaaagtaatatttgagttattaattgatattaactatccaggtcatttttgtgaataatgtaaatgactgtttttgattagttagtgcttctactattcttcaatggctccttatagcctatgggtaaagcttcatattccctaaaacaactttccaagatatgagacttccctgcagtcttatctcttcctacttcctatcttgaacttggtactcctgaaacactaattcccatacaaacctactgacacacaactcagctttttcttcatgtactattttccaggaagagataccctttcttctgactcccttccccatttcctaccctcttctctagcctgattcactcccacykgctctttgagatgtggttaaaatatgttttttgagagtattgccctttctctcccaggttctgttagctggcctccactagagtcctctaactccctgaacatacctttttcacagtacttactatattctactgaaattgactctttggtgttggtatccacacataggctgaattttttcaatggtgggtgcttgcattgtgtatctgtgcatacacagtacataataygtaatatatgctcagtaaatattgcaataaatagtattctaattgctggaaagagccactgcaactttcagaatacaaaccttctaagatattcttaagacactgaaagaacctaaagttaatcaggtcacaaataatgcatgtctggttttcagaaaaatattgagaaacagagatatgatttacccagaatcacaccccaaaaaaatccttaaaatagaattccagatatactatctttggattaattcatcatttttattccctttcttttgcctcttactttttgtggagcgcagtcctaaaaggattaaaaataaactaaggacatggacaaaagaaagaacctatttgccagtaaactgtttctttttcaccatccttcagacatgcttgttaaaacaaactctctgctgtttcttttatttgtttttgtgttgctttgtatttggatttagtggctttagggaaggaaattatctttaggcattcctaaatatgactaagttatctgagattatctgaaattaaactgtatatatacaatttaatatataatatatgtagtgtctggataattattattatgcattctataacaattttccagaccctaaagaacagaagtataaatagttttaataaatgtcaggaatgtgtttaaaatacaaccaagttaaattttgtagcatcttagcaatgtgtaagcaaaataaactgaaggttgctacgccttctcaggggaagacagatggatatattttgtacaaggaaacttggagtaagtttttatttaataagctgaagataatgccaagtattcattaggtcatattacagagaagaaaacttcagttatttgtatttcttcagatgcaaattatcccactgcttgatacaaagtaatatgcgatgttttaataacaccagtgacagtatagtgatacatgtgatgatactaaagctgtgctttggagttaaacctacttgcattcayatcccaactttgacagttactagctatgtaacctagagcaagttacttaattctgtgagccaaatctcccccatctgcaaatgagcataagtctgcccacctaataagagccctgtgaagattaaattaaataatgtatataaagtgtttaacacagtgccaggcacayagaaaccactcacacatttaatttttgttgtagtagtcatttttgttatcttaatactaatggcccatgttttcattgagggaaaaaatttacttaagaatgtctcatttttcctctacacagtcttttagtaaccagcttgtgttgataaaaggaaagctggaaggtttaaagcaagattctatatatgaacttcttgctccttaayatacaatgatgttaatcacacaatggactcatcagacctactatgcaatatctaatctttgtaagttaactgactactcaaatattttcagaaaacaatcaacattgtatgcaaaggtttttgataggatcatctgaaacactggctaattttgaacaccaatctttcttcactaaaatgaacaacatctaaataggaagtaaaacaggcccatgtataattttaaaacagttagaatttatataccagcaaacttattaagctggccagtttcctgagggtcttttttttcttccgtgaaatgaagtaactgtgtaattgcaagcttacagcatggagatattttgagaattaatcagaatggaataaagtactctgtaccaatttcaatattggcatatgtatttttaaagaattaacattaattatatacttacatttattcactcaataaaaatgttcccagttgtacattgtaagattttgcagactaaattaaaagatttatggcaacagtaacagatttacttctatacagtgcagtgattttagtggtaatattaatttgaatatctaataaactactaaatagtacttcaaaacatcataaattttaaattacaacatagcaactatgatatagatttatgctcatcttctttggggtatctattattattcaatatctggccatcttccagccagttaagagaaaatttgaagaccaaatttggccagaatcttttcaaagctgaaagcacttctgtgtgcctgttaaacatccaacattattttataacacattatttatacaagaagggaggtgagcctaattttgcaaaaacaaagacatatcagtagttttatgaaagtagcatacttcatgaattagagggcataaaactatgcacagctgcttgactactgagtgtcttgattacatagttgaaacaggtgatccagtgctcatggtagtaaaagtatgtcttatcttaaagaatgtggtagataaccttcataattttgtccttacatgccaaacatatgactcaaaattatttttctcacattttagaaactgttagggaaaaaactccataaagattacttcgattttacagtgattatttgtcaacagctgacataggtaagttacacttatggtcaaagattgaaaaggcattaaaaagtaaaaaatatttcattcatttttttcacacttatgccttttccccatgtacccccctctcacttcatacacaacaattttaatgtatacyattttgtatgtgttcgaaatgaacattactgttttgtatgaatgtatttttattgttgtaaaatacacacaacatactgtttatcataaaaaagtgaaaaatatgcagttattcagaaaaaatatattattccaattgaattatgcctttaaaatttccctttaaaggaaaaacattgtatgaactttgagaaattggttctcttttttattaattaattattaattagttttttattaattattgatgttttcccttgccagattgagcatacacagtgaacaaattcacagtctatgtttttagatttaatttaagttgctggtagttatgtttttaataaacatagcaatcattcgaagcatgcaaattaataaagagtaaatgttcttatatttttaatagaaaaaaaacctttaccttggtgagtttagcattgatacttggaaagatgttaaatcacttttcatttcccaatcttgcagtactgttactaccaaacatctacaaaaagcatttcctctgaggataatacatctgtcctctatcttttgtcctttcatccttcaggctatttcctctcagaaaagatttccatgcccttctccttgtgttgggtttgacaacctgcgatgtgccctaaacttactcactctgacttggagttctcccttgactcccaactgttaattctgtaaaagcatggactgtatatttgcttactattgcattcttagtctagcaaaaggaggtataaataacttggttgaattaattaaaaaaaaaagtcattaacctttaaaattttgcatatcttcattattcatgcaaacaaaggmggaaactatgtaacacctacaagtgaccttcctatgagagctgcctcaatatgaaccagataaactaggcctatggtcagaagtacagttagagaccccgtaagataccaaaagactcctgaagatcaggctactggcactaaaacgaattgagagtggattcaccaactttcttgacttctccccagttctctcttcctatgcatatgccctctcctcccttcagtgctgatcaccaactccaggatcaatattagtaggcagacccctgccccaaaattatcagtccactgcttgttttctagtatagctcatttaattattaaagactttttctctttttgtctctaatgcagatattccttaaaccaatatcaactatgaattactgtttttttctgtttatagtttttggcatgcatggattagctggcagtcaggtgggaacaaaaatgggtgtcatggagggccacagctcctctagaattggtcttcactatgccctgccaatcaaccttccagtgtcaccagtggtaactgtgtctgcttatatagttggcctctacaataaaccaaattttccaccagttccttgaaatcacctagaaagacattaaatcaaattggttctggaggccatttttttttagtgatagagaatgagagggaagtgaggtgtatttctcttttatttcagcaaggcttttaattcttgcccactttaaattttcatgataatttagtaatctatttcttatttacatctaattttaaatgtgtaataaattaaaggataaatatattgagtgatcactaatctttctcccctcttttaccctttcacctcttacactgggctaagtgctgctgcttctaccactggaagattaaaaaaaataaaaagtaagatatggtacttattttctcagaactgacattctagtgacagtgccaaatgcaaacagaaagaatcataagacaaggcagatgtgctgtacacaggtagaaaagcaattggggcacagaaagagaataagaccattactggctctgtattgaaaatctcaaataattgatttctttgaagaatgtggagattaattcattaaatttgtagtcctttcatcagattatgttaaatttctaaataatttttagccagtaaatgaaacatttctttattgaaataattgaaatagcaacaaattttgctccaactactttttcgaaaagtaaaaatttattgttttagatatatacagtaagaatttttcaatcatattaggatcctaaagcatttttaggttatagcataggaaatgtttttggttagtttatcggtggcccaaataatagctgttgggcatcatttcttgttacaggagggtggtcctataaatctgctcagaactcagaaagaattttaaattaggcttaaatcccactgcaaatccctggatttctgtccagtattcatgcacaaaatattactctaatagtccgaaatcatatataatcttctgactttggcatacatgcttagttggtcattattaaaatgttggttcaggtcaattgtatagtttttttatttgattcaaacaatttagtggcaacttcgtttagttcttgacaacaccaaagatagatccttagacaatagctctcaagttgaaatttaataaaatttaaatattccacccaaaccagggactaagaatggaggtgagggagaggaggagtgttatgttgtcaaataagtttaagaaatcatgtatactcttttcctagagttttaaaaattctcattagtatagtatagactcagagaaattctgctgaaagaaaattgttcaattttatttaacctaatatttctcagcaggttagttagagaagctgtgctacaggaaacagccttaatatctcagggggcactagtgttataaagaaacacagtttggaaatattaccttaagaaaattctgcaagctgagttcattctgaatttggtctcaaactattttcttagcattacttacagttacatctaaagttcaagtagccagataaaatgggaaatattacaatagaatataacaaatgtgatatttgaggatattgaaacatgtcttatttctcttacattaatcttaaaaataaattcagtttcagaataattctgataaataagcaaagattattacagttttcggcacaaaatcaaccaagagattcaaacctatttgagtaatacctgtaataatttattatcatttcaacccctctgtattattatctgaaattgttatttcaatttctagttaaatccaacccccagcattttagtggttttgtttcttccttctactatcttgtcattccattgtctcattctttaagtgcatcaagaaagttagtggggctatattttatgagaaactttgcttcattttaagtttacagaagatttaaaatccaataatttttatgtaaagtctttttccttttctcttttgctctttttcctcctgttcacaaagatattttyttcctctttatttttagatggacactagctaatgactctatcaagtactcatgaccactccagtagaagagattactttcttctggagggaagttaagcaactggagaatctctagagccaattctccccagtatacatcaaatttttttcctctgagaatgatgttgcctgcctaaagacaaggtttacttgggcatgggtactggataattctcctctctcactccccatcttaatcactttgtctttacatattactacacaaaccctttcatacacatagttaaggaactttaatgacatttttgttagtgaatttgacacgacttctctactaaagatatgtccagatataatctcaaatgcagataaaaaacttggtccaaaagcggttaaacattcagggactctttaacacaattttscaaatcatgtggaaggcagaggattttcatttacaacctatttgaggggtaaaaatgttagatgttgtttagtaaaggagtttatattaaagtctatttcattgaacaagagtcatttttctccatattacttaagtatacataattttattgtgagatatataaaatttaaaaatggaaaagtattgtattccaatagtgatgttagagaagttattgtgctaccaaaaattgtgtgatacaaaggaagaaagctatgatccttagaaaataaaaaaagctttgccctaatgttgtgcatcattccagtcttaaaaagagaacagtcctctagctttatgtcttttctctgatctggatagacccttgctatggtttgaatgtcctctccaaaactcatgttgaaatttaattgccattgtgatggtattaagagatgggaccattgagaggtgattaggccatgaaggcttcaacctcctgaatagattaatgtcattttctcagaagtgagttatgaagagaatgggttgttagaaaaaatgatttcagccctgtctgtctcatactctcttactctcatacattcttgcccttctaccttccaccatggaatgacacagcaagcaggcccttgctagatgccattaccttgatattggacttcccagcctccagaactgtgaagaataaatttcttttctttataaattatccaatctgcagtattctcttatatcaacacaaagcagactaagccaaccctctagaattgtggttctctccccctgggtttcctaggctagaggttgtctccttaaacctctgcctttgaacttggttgtgtggccatgagaggtgagatcctaatctgggagcatctgagttcatagtcataaggtggctcatttaagtgcagaataagcagacattgaggcctgtacttcaagtaccctactgcaacaccactttaaagtgtcagaagagatgcagacctgcctgtcattgtgaggctgtggtacagaacctattcttccctgcagctaactcattcaccaaagcagtcttcttaacatagtagctacagagctatcatcacgtacatttccaggccagttcaccaaatgttggagccactaagatttgtcagagaggtcagatgagcccagaagaaccctcttggtgcataattcagagatttatgcctaatcaagcctatttcaaaatcctctagggttcaagttaactttgaatccctctacagggtctgaaacattcccaagacccctgaggtggtccaggctgaattagaattcttgttctccataagcagtggtttgcaaccttagctgcactttagaatcattggagaactttaacaaatactaatgcctggtccttcccacctttgtgagattctgacttaattccccagtaatctaatgtgatccccttagtccagtggttctcatccctggcagcatgtcagaattatctggggaagcttttaaaattcctgatgcccagactgtacctcagatcaatttaatgaaaaattttttgtgggtggaamctggcatcagtatttttttaaagttccccagctgattgtaatatttagacaaggttgagagatagaaaaatgtagaaaggcaaccctttcaatatatctaagagctgacttcttccattctctgtaattcacttgggcctctgaatgctctagaactgtaggttaaagagttattgtacagctgagtcataagggtcagtctagatgaggatttacaaaagagaaaagagatgataagagatgcactcgtggcaatgaatgaacttattagcacttcataagtgccaggcacatgtgatagccaaaaagaaaagattataaaattaaaaactaatcaaagaatggctaatattttcaaatctgctccccagcagtttatccattcttcataatttaaagccctaacaagttacttaagggaatgcgggtcaccagttctacaagattctaccttgtctataattgctaggattttggttcgactgcgtagatatgttacttattatctatttttttaaaggcaggggttgtccttacattgctatttttgattctgataatgtgaattattgttcttttagataacttgctaagaactgtttagaatataagcaaatttaccatctccatattcagaggcaatatgtgtatttgctagcttctaacacattattgttaagtaggagcctatccaaagaattgttgacaaatgagtcgctgaaggttttgtagccaaagtcaaattcagcaacgctgtgtttatttgccttttgccaattgttaggccatatcccatcacagtctaacagtccaaaagagaatattgccaaatcattggccagttttcagaatggctaacccttttcttgctatggaactaacagtgcttcattataatcaagtgaggcaatttatgacaagaaattcttaaaaggagtagatgatattgactattattgggaagagcacaactttttagtaattggataccaaaagcatgaaaattatcctgagggattggattctgtcttccacatctgtctctcaaggcggtcactgagtgcccagtgcactgctgctttctctcactcggcacctcaataytcagcttaaagagcagtgttatttctgtcaggtgcagaatgatagcctctgtctgctgttggactgcctggtgcagcagtaatctaaattcaccctctgatcttgtccccatggggagagttctgacaacaaaagtggaagtatcgaccattcatttcacccttttatgatgttctcaatgctcttcttcttctgcagagaaaatgaatatttacttcattttgaatgtgtactttggagggacattttatgcttttagtattcttattattagttaaggttagatactagtttcatcacctggaaacccactgttaggctaaatgtgaagccaccagagagataagtaaaggggagagactttctgcctcctgggtaacagtagtacacaatccttatgaccagttctctagtagcagcttctgtcccctcaagagtcagaaatgtggtccagtatctcttggcctctcatgaattcccccatcttcatagttcttatttatatgtctactaatacaagtcttatttccgttgggttccttgatgcactctttctgtaatatattcattctaatctaaacttaaaatattttacaaaacaacacagtaattaaggtaagactaaagtaagtgacaacctcacaatccaggatagcttaagtaattttttaaaattccctaaagttatgagacatgagcagtcacatccacttgcccaccactcccttttctttctccatgccctccaaccatctacccgagcccaaaacattgtggaagcagaattatacatctagatattttacttctcctgctagctccaakccatatttactagtatcttaaaaaaccacattcctgtgtggaagcattgcttctgctggtgaagtgagtagtcctctgaagcctattgacattctcaggtcagtcattcaaaaaaaagtcatgagaaaagattggggactttcttttggtaaccagaagaataattatattttgcatagctggcatattacttttcatgtaaaattttatcttccaagacactaaaatctatactaacttaaaagacctccaaagaaaggtgattgacatgacaacctgttgaaaaaatttaaggcatcaaaacattgaaaatgaaattctgagtttgattctgatctttaatcagaatcctgctgcatttcattctagtagacaatccaattacctttttctctcattttaatgaaaataggaaggaaacattctttcattcatttatttgtccattcattcaattaatgattgaggaatgtaaacaatcttcaaatgtcataatttcaagtttccattcttgttattttaaacaaattctgagcattttttgaacctagatttcctaatatagcagcttcaacttcacatgtgtcaattagcacaattggacattcactcttaaaattattatagtaaggctacccttcaaataataggaaatggctatcagaattttcttctaacatgttattctccatatattcttcattgtagcatttccctctgtacctaaggacttcctatagaaaaaaaagagtggcttatcctctttttaactttggagaaatcttactgactccttctccaataagatagccacataaccttacgacagttttagggtttacttaaaggattctgatgaaagtttccctttccaggataattaacgatatcaagaaagtataccatatatacagcctattaaaaagtttatagaagtaaaaattatttacatgatgtgtatcttgtctttttagtacactggtattgtgacattctaatttataacaatatagggcgacttcctttttttttcttttgtgctatagaattggtgttagaggagatggtttacaaaattggctttagggttactcaaagttagcactaaattgtatttcaaactataaaataattttagcattttatgcatgtgtactacctgagtttcattgtttcaagaaattttaacacaaacaaaataaaatttacatatgcaaatgtattccagttgaagatattgttgatcctaaataattatgcatactattcattttcactggattttacatctacttttttgctttttcattacttggtaaaaggattcaaaaggagtagtcagcatgtagaattccacagttaaggtttggtaaccttattgctataatttgaaattagttctgacagcttatcctattactttcatctcattcgttgtgtgagataattatacaatgggtatttaggtttctttatatttatgaaatatattctgtggtttaaaatagaatagactataagaactggaaagtatcatggaaatcatctgtacctatcccacattttatagatgaaaaattgagggtcagaaaaacaaagaaattgtccccagatcattcgtagacagggagttgccccatgtgtcataatttttacctaggctctgtcgtctccaccaggttttattatccatgatattattattgatatatattatccatgataatatataatattgttattatatccatgatattatccatgataaatctgagcaacttttaaataaattaattataagccaaattctgttgcttatatagaagtagatatcaaaaaaattttctccaaatagtcatttccttagataaactttagtataataagaatgatcttctagaactaacatgatacctttattaatctcagtaataataataaataataataataaaaccataactgtccagtcattaaaatggccttaacattctatatcaattatggttaaaaagaaggtcttctcattttcatattggaaacataattctctgaaattcccattgattggttgattagttcagaaccctaaaagtcattcagtaaacaggcaacaaaagtttgagtaattgctgcaagcctggcactgtgatttgcacatgtttacaccagtctccccatgcattctttttcaaatgactttaaaacaattaatatgaaattatatattaataacaatgttttctgagtgctagtaatgtaaacaaaatttatttttactaagtattttaaatccttaatgtacatgttgaggtgtgtatcttattccattacatttaatactattgaagttggttattcatcataaccattaaatgcaaaacacaaccctgatattttaacataagaagaawaactgattcttgggaaaaatgtaaggctttaaattgaaaaacatggaattaccatctcttccagcccacttttttcccctcacctttacatttttcttaagatagcacagaacttttatgacataaaagatttagttaaggaaaacgttaggagagatctgtttttctgcctaagttgataagtcatcaacttaatacaagctcattatgactcaaatgaataaggataccacagattcccttctattttatcattatacacaattgcaaaggaatgcatatcttagcacagattaagtattttaatttacatcatgaaaatattatttcaaagaaaatcaaattaataaaaataatttccctactctttaaactagtgataaatagcttttagtgataatttatgaagttctaaattagatatcttaatgagttttgcttagacaatattaagtcacattttggtgtgaataatattatttacattttgcttaacttatgagcattttcaggacaaggagtatatattttcaaattggcttggattatcaggtccaactataatgtaagtagatttgccctgttaaaagagatatttttaggggcatagttcaacatagttcaatttagagaaattaggtgacattttatttaattttttttccaagaagcaaaaggaagatgagaaaacatrtcacctgaaaattgatccattaacagattgctaaggttcatgagcagtacttaaaattacttactgtaattattcttcatctcttgggtcccttttactttgcctcttttatcgatcctcaggtaccactgtgttcgacagaagagtcttctcactcttatatcccctccttccrtgtaatcataacttcttgtgtgtcgctcagggctggaacagttcacatttgtagccatttgctctggagtcatgtcattgcaagctaaagatatagtacccactagacagataatgtgaaagcatgatctgtagagcaaagttggcaggatccatgtcagtatccatttgtgcattatagtgtagtgctccrggtkttcatgaataacataatgaaaatgaatcttgagttgattgttactcctaggtcattgacctcttcctatctgtgaattgtagattgatttaagaaagagtasttgctctttccaaattgttagccttatccttttagttcctgataacaacacaggattcctccttaaataactctgttgataaatcctcataaaaacagttcgtagtaagttcagttgctgtgacgctgtttgctatttgacttctgtttgcaatgagagattaagaatagggaggggaggagagaggaagataaaaaattgtatgtgtaaattttagtgggtaagtagtagcattagaatacagtataggttattctttgaagatacatttaaaacagccttcacagaggatgtcaaaatctttaccactttatgtgtagatttataaaatttatgcatgagtagagacaaaacagaatatgacygtaccattcattccaattgctattttgtgagaaccatrctgcactcagaactattgatttaaattaagtttttacaattacygctaacaaagtgtaactgctttctccctagacttcttyattatatgcttttacattwgtggttaatcaattattttctcctgaactgcccaggttttttaagttaaatgtcaggattgctctggagaacttcaaccttatctttatgttctacagcataattactatagttacatggctcaaaaatcttgtaactttactttcctgctcagtactaaaatcagaaaaagagataaacttttagaaaacattcagcattgttttaaaagacaaataacagtaacttacttgttttgttgctaacagctggatatataagaattccatgtctgttgtctgcctggtgcaacttgagcctttctactgtagctacaaactatttctcagctgaaaagttctccagcagaatcataattgtttccataaatcaacaggcagaaggattttctctctgtgtgtgagcgcgtgtgtgcttgtgtgtgtgtgtgagccttttattcagggcttttcgataaatacctttgctgacctcattggaagcaattaaaacttagccagtgagctgttagttgaatacaacagcgagaataaaaggaggcttgtatagtattcaatggtcatgagagggagctatgaacatgttttatgcttaaatctacaagtgggtacctactttgtagaaacagatctctggttctgaagcagttagaaggggaaagggaattttttaaaccttctttgcaatatagcagttgtattatacttggaaaattattcatttgaacatatatatagggttttttaatacttagaaaatcttttccatagctttatgatacatgcatttcttcaattacttctttgtgctcagaatgttagaacaaaactggtatgtgttaactaacatatgagtgccttaaagcactgtgtagataagttgaatattatcacatcatacagagacaattcattgaatatgaatataagtacaatttttatgtattatattcctaggctgaaagtgagaagatctagattcttatttgtgttggaccactaatgaccagtatgacttcgggcaagttacctgctgttccagagtctcagctgctacatttgtaaaattggtgtattggtctaatgcctctatggtgctttacaattctgtgatctgtgacttatactcactactaatataaggaacagggcacctacttttaaaagctgttattctttaaaaaggaggaaatggtttcacattgattatcagtgtttgatttttgcctcaataagaatattggaacaataaatgttaatttagagatggaattataatatgtattgctaaggtaaataagtgaaagctattttactttccagcatgagttctctcctttacttcctgttctgttatacatgaagtagtgctcaagtgttgtattagattcttggtgtagaataattgtgttgtctatctaaatcagtattaagaaagtatattaaaattatctttttcatgttatatactcctcaaaacacacacgcgtgcacgcgcgcgcgcgcrcacacacacacacacacwctctctctctctctctctctctctctatgtgaaatgcactactttaccaccaggtggtgcatgtagaccaaataggaaaaggaaattaaatctactcaactggattatagtttatgtgatttctctttgtatctgtccctttagggaacagaatgaagagcacagaatagttcagatgtacccagttactcttcatatgccaaatgttgaatgttccacatttattaaagcagagggggacagactctttgatcattgcatctgttgaaagctagaaagctgaaaacatcctatcatgtattctctaaaaggaggaagagaaggaggaaagaaaatataatgttattgtgttctgaatcacactccgctagtttgggaggtaacaataatgagcaggctyagaattcctaggacttagatattgcttctaaagaaataaaagttaycaatagtaagtttacagtgtaaagatattcaagagctactaaatccatttgttccatactgaacctacagtttttaaaccaagaaatcagtaagtgagaagtccacatttgctaactaagtgctaaatacttaaatgaaagaaatggatagtttgttagcaaagagtgcttagtgcctccttaatatctgctacataggattaactgtaaaatgggaaacaaaagaataaaattgtgatctatgaaagtgcattagatgctattacactctgtaatttggaaatatgatccaagtaatattaatgaacagattaatatcaacaagggaactgtatcaatggtttaaattctttgattatcatttttattggagaattattaattcaggatgggcccacaattcattaggaccacagctataatggagaaccaaacttagatttcactgtgcccttattatgcttatgcttctaaatgaattctccaggaactaagaataactttaggcaactgtagatggggtaaccctctggatgttttaagttatacattggcaaccgtttgttgctcttgttttaatagacctatagtgatagattaagcacaggaatactttgaactattgtcttttttttgttatttgtagattgaattttcttttttaacacaccattgctggcttcaaagaattaactggcccagcatggtggctcacgcctgtaatcccagcactttgggaggccgaggcggatggatcacaaagtcaggagatcgagaccatcctggctaacacagtgaaaccccgtctctactaaaaatacaaaaaaattagccgggcatggtagcgggcgcctgtagtcccagctactcgggaggctgaggcaggaaaatggtgtgaacctgggaagcagagcttgcagtgagcagagatcgcacaactgcactccagcctaggtracaaagcgagactccrtctgaaaaagaaaaacaaaactttgcctcgttcataatcatgtataatataatcagtagaagggaacataattaaatattttcattacttttcattcttacatcttattctgttccatatcctgtcagttttcattcttccccaaaacatagataattctttttattagtttcttgtgtatcttttcagagtttcgctatgcttrtacaggcaaactggatacatatgtttgtgtgtatatgtatatacacatacatattattttttacttttaccctttttatacaaaaggtagcacgtcatatgcatttttttgtatttttttttaacagaaaaatcttcctatctcattatttaggaagcttctcacatttttgtttttgttatagctacagggtattccaccgaatgggtatatcacagtgtatttgagcagcctcctattgaggaacatttaattttcttcagtacttttctattaccaaagaaatgctgtaatgaataaagacaaaatatgtcattttatactacgaaaataaatctataggatcaatttccagaagtagactgcctgggacaaaaggtattaaaaaaaagatattgccaacttatcctccacagaggttgtgctagttttataatcccaccagcagtaggtaagagtactcatttatttcaaaaaatttattgtgaaaacatttggagttttattagtctgacaagtgaaaatgccattaaattgtagttatcctttgcatttctcttcttatgagagaaggtaaccatcatggacaagtgctacaaagaaaagatacatagtgccatgartatctataataagtggcaatatgtaagctttccctgcaagaattccactaaagctgcaactttacagcatgaatgggagttaaccaggtgaagaggtactatacaaaaataaaaaataaaaaaawaataataataaaaaaacctgtccttttcacagtgaaacacaggtttggtcccagtagagagaatgagaagggactgtggtgcatgaagaggttggagaggcaggcaggatctccatgtgttttattaaggcatatgatctgtattccaggagcaataggaagccattataatatggtaagcagaagagtgacatgatcagaattttactctgcctctgttctggtcaaaacttaattcctrttggcagaatgggcttatgaaatattaaactgtgttcatttatcccatttttttctgttcttcatattttcaaaaagatattggaaaggaaaggttgagggaaaaaagtcataaatgcttsctgactagggtaaaacatgaatccctttcaaaaggtcatgccaagcgcactgaaaataaaggaagcactagagtgcatttgagaagcagcccagggaagctatcacagagtcccatggacctgggagcatagagaaaatttatggcccccatatttggggagccatgcttgtatatttatctgtacacagcaccaccgcacatagcagaggcagcaatactccagagaatcagggctgcctcatgtgtctgaacaaataggtccataaggacccctcataaacattcccatattttaaaataattctggaagtaggagggagttcagaactgtagaaactgtgtgaacagagtgaatgaataccccagaagaggaatcagggtagacgaatgactcaacacccagatgccttagctttggccatacataaaactcttgaaatctatcccatcttgaaacagaagagggaaaccctagaataactgaagttaagttttttaccaaactggaagagcagaattctcaaaattaaagctaggttgatttatatttataaatataaatttatatgttattctttgcatatctgaaattgtggtccaacacatatttctttttttttctttttttgatcttttaggttcaggggtacatgtgcagatttgttatacaggtaaactcatgtcacaagggttcagtgtacagattatcaccgaagcactaagcatagtacctgatagttatattttctcttccctccctccaccctcaagtggaccccagtatctgttgttctctgtttgtgtccatttgttctcactacttagctctatttataagtgggagaatatgatatttgatttgctgttcctgtgttagtttgctaaggataatggcctccagctccatccacgttcctgcaaaggacatgatggctgcaaagtattccatagtctatatgtaccacattttctttatccagtctaccattgagggcatttagattgattccatatctttgctattgtgaatagtgctgcaatgaacatacacatgcatgtgtctttatggtagaatgatttatattcctttgggtacatacccagtaataggattgctgggtcaaatggcaattgtgtctttagttctttgaggaattgccacacttctttccataatggttgaactaatttacactcctatcagcagtgtgtaagtgttcccttttctctgcaagcttgccagcgtttattttttgactttttagtaatagccattctgactgatctgagatagtatctcactgtgttttttatttgcatttctctaatgattagcagtattgagcattctttcatatgttttttagacacatgtatgtcttttcaaaattgttcatgtcctttgcccactttttaatggggctgtttggttttgcttataaatttgtttaagctccttatagatgttggatgttaaatctttgtcagatgcattgtttgcaaaaattttctcctgttctgtaggttgtctgtttactttgttgataatttcctttgctgtgcaggagctctttagcttaattagatcccatttgtcaatttttgcttttgttgcaattgcttttggcatgtttgtcatgaaatctttgctagttcctatgtccagaatggtatttactaggttatcttccagggtttttatagttttaagttttacatttaagtctttaatccatctttagtttatttttgtacgtggtgcaaggaaggggtccagcttcagtctgcttcatatgactagccagttatcccagcaccgtttattgaatagggagttatttcttcattgcttgtttttgtgagatttgtcaacgatcagatagttgtgggtgtgcagccttatttctgggctcattctgttccattggtctatgtgtctctttctgtaccagtaccatactgttttagtactgtagccttatagtatagtttgaagtcgggtagcatgatgcctccagctttgtcattatttttttaagagagtcacccagactgaagcgcagtggcataatcatggcttactgcagcctcaagtttctgggctcaggtgatcctcccgcctcctgagtagctgggactacaggcatgcatcaccataccaggctatttttttgtattttttgcaaagacaggatttttccttgttgcccaggctggtctcaaactcctggcctcaagcagtctgcctacctgggcttcccaacatgctgggattgcaggtgtgagcaactgcacccaaccagctatgttcttttggcctaggattgccttggatcttcaggctcttttatggttccatatgaattttaaactagttttctttagttctgtgaagaatgtcattggtagtttgataggaatagcattgaatgtataaattgctttaggcagtgtggccattttaatgatcttgattcttcctatccatgaacatggaatctttttccatgcatttgtgtcatctctgatttctttgagcaatgttttataattttcattttggagatctttcacctccctggttagctgtattcctaggtatttgtgtgtttgtgtgtgtgtgtgtgtgkgtgtgtctatgtgtgtgtggcaattgtggatgggattgtgttcctgatttggctttcagcttgactgttggtgtataagaatgctagtgatttttgtacattgatgttgtgtcctgaaactttgctaaagttatttatcaattcaaagagcttttggacagagactatgcgattttctacatagaaaatcatgtcatctgcaaacagggtagtttgacttcttctcttcctatttggatgccttttatttctttctcttgcctgagagttctgactcggacttcaaatacgatgctgaatagaagtggtgagagagggcatctttgtccaagacatatttctactacattctcagagatgtccttacactatgaatttatcttcctcttttcttctgtccaccccattccataaatcagcttgaaccctgggtcatgccatataaccaatcttacttatttccttgattcatccatctaacaaatatttatcaaatagatactcggtgccagatgttgttctggccttttggagatacaatggtgaatattctggaagtgacctctgccctaacagagcatgcattccagtgagagaacaaacataaacaagtagattggtggggggtggggggtggggtggatcttggtgtgttccaagaactgaatgaaggctaatatgaatgaaaaatggaaaaagtagtgagaggtgaatgaacctgaagaggtaggcagggaccagatcataatgaactttgtaggtcatggtaataggagattgagtttattctaagtattaatataaaaggaggctgtagtatggacacgtcaacccaaacttgatgggcctggtcaaagacagtagtttaaactctggcataaaatcccaaaagtaattgagcaagcctgaggtccctataaatcctcaattatgtaaacttgtgcttacccttggcataatgccctaacattttaaaactaactgtatataagatacaaagtatgagtcatatgttcaaaattgtggtgtgctggtgactcaaatatataaatatctcagtttacaaaagttacttgactcttgtatctctgagtctataaaaatttatgctttaattttatatttgtaagaagttatctgaaatgctaatctaaatttaaagttcttaaaattatattatgaatttactgaattgtgatacaactttagacctagagcaaaatctctagttggagctactagtttgggtttttttttccacttgtacatttctatataatgaaagcatattatgtaattcattctwgattgtcttgattccccttaagttwctgcttaactttaggaaacaatcaatttccttgagtaagtgctttacattggtacctagttttgacagcttcatgccattctaaatgttgaaaaatgttctcacagagagaattttgcttcatccctagaaggacatcatgacaaacacaaagaccttgtgcaattgaggttattacattgttagctctaaattgtcwttatttggttctacatgaattgtctatgtagcaaggcagcaaaatgaggggtaaaactagcaatagcaatttttcttttaaaaatgtttcctggatatcaatgtgttagtagcaaaactggcttaattttcaattcattagctttcaaagcatgttcaaaagtgagaaaaagaggcagagtaaaagtaattatgatagtaaagaagaaaaagaaagttagggagtccaccaccttaattatagagctacatccatgaaaagccaagtattcagtaaaaatttgtatttgtgtaaaactggtggctatcgcaataacttatgcatgagaaaggaggtttatacttctgcttaagctcctcttcaagctaaacgttatttctatcctcagctacaacttatatttttccctcgatagtttttaayattaattcaaacatagtgagtcctccttattcctctaattaattccaaaaaatgtcaattctaccacaacttcttctacacctgtttcttcctatcaattatcactttcacatcctagatcaagttattgttatagttcacattaattctattcctaatccacctctttgtatcttctctccccaatctccaatccattttaaatgttgttatgagattaatctttctaaaatataattgcaaccatgttatttctctgccccaaagtcatcagtaacatccccatttttcctaaataaaactctacttttctttttccaatatgcagactactgtttccaatgccctctatgatcctcaacatcccccaaacactaggctctctcacttggtttggggtgtagggagatttcccccctccctccccccacacacttcacctcttggtagagaagtggactaacagagaagaaatcccccttacaaattctctccctctctaccttctctccctatctccccatctctttctcttatatattcagtctgcatgaggracccaagagttgtgtaaccaattatcagatatttcctttgaaattttacatattgagtttttaatgatgcaataaagtccttggtcctagttaactgataactcagctaattactttaaatcaacacttactctgtattcgaatagtgtgcattatgacatactgttcaataagataagcaaggtccctgacttagagcttaaattattggaggagggggtggataatagatattaaaaataactctgatggctatttcaggaggaaataaataggttactatggtatcatttaacacagaaaggagaaggatgtttcaaawctcattacaaaatgtctttctgtagaattgctatttaagctcagatctgatacatgagaagaaatcagaagtggaggtagagcattctagataaaggtaacaagagcaaaagttctgaggtgaaaatgagcttgttgtgttctagaaaccaaaagatagtataactggagtatactgaacaaagggaaagttgggcaacacgagaccaatgtacataaggcgttgatactaacattaaagactttggatttgatcctaagtataatagattgtaattagcaagtataatgggtataatcattctgaaaactttttggagaatgtttgggagatggcaaaagttgaaataaggagactggttaggaggccataattgaaatacaggtcagagattatatcttagactaattatggtaagggagatggaaaggagtagttagatgtatgttggagactgttattagtctgttcttatgctgctgataaagtcatacccgagactgggcaatttacaaaagaaagacgtttaatcgacccacagttccacatggttggggaggcctcacaatcatggtggaagacaaggaggagcatgtcaggtcttacacagatggtagcaggtaaagagagagaatgagagagaagcaaaagctgaaaccccttacaaaaccatcagatctcgtaagacttattcactaccatgagaacagtatggaggcaactgcccccatgattcacttatctcccaccaggtccctcccacaacatgtgggaattatgggagtacaattcaagatgagatttgggtgaggacacagagccaaaccatatcagagacaaagccttattcaatgtaagagacaaagaggagtcaaggttaaattccagatgtccaatatttgtaactggataaatggtgatgtcatttgctgagctaagggagactgggagaagaccaggattagaggggaaaatcagacaactggaaagtttggctgagagaaatgctatcacccaagggccaattcattctggatcagagagatctggacctttttactcctttgaatgagaaccaagaagcatcttgaaattcaatttccacacaagtgtggaaatagaaacaaaatctctttttaaggatatctggtgcaaaaggaaagtttttcttgtgcagtattgactatgcattttaatgaaaataataagggccatcctccctcatttttctaattaaggatgtctctgacaaccagcatatcataggccccagtaatataatacatgatatcggaagtcaaactatatcatgggacgttattgtgaaaacctaaaactgatttattctttgatttcagctataaatgggtttcaaagttgccaaaaaacaagtcaatgtacttygtgttcaaatcaattcttgtgacactgagaaaaaaaaaattttaagaataacagtgttgatattttgaaaaaaattaatccttagtaccctctctggttattttacctgaaagaaaattgctttcatattcctgaaagctatacttctttccatagaaggatgttagcagagaaacatagtagtagagttgctcatatcagattataacaccaccctgtattgcacaacaaaaagaatatgttaaaactaaaatattgtctaatgccaagaaaaaatggctaatttggcaaaaattatattaatcattttatagtgcccagaagaacaacaaaataagactgatttttttctaatataattttttggctacacatgattatagctttcatttcttagcctaagtagtttggaagttggaaacattgtagcatgagcttagaaagctgctgaataagtagaaatacaaaattatagcatgttttagacgaaatattgcttcttaatgccaagtactgtatgtgtaataaatcaaactgtcacctggtttaattgaatcaataaaagaatatggaaatagcttattaggttatctgcaaatgaggatgtaaaagtactgaaagatgtttgaaaattgctttctctctaaaatatttaaaattccccataacaattgatatatcctattatttgtgcacaattttggaaatgtctgcgaagcaaaaaagacaagtttgaattcaaagcccaatttgaatggtaacaaattctgaattgagagattccaaatataagaacttccgccatatttcaaattatgctaagaatacatggtttattaggataatatttattatttttgccttgaataaataaaattaaaggggataattctagttcttagtacaaccaaaggattaagtaaaagtctatttcaaaactggtaatgaaatgttttatatgtactcatcctttaccttgattgccttctttatgccttccattccattttataccactcagcatgtcgacatattgtgacaataaatatactttatttccaatgtcatcaaatatgaaaccagaatgcaaactcagaagtatcaaaaatatcattgttcattttctctctcaaaaaggtggacaagaaagaatgaaatatataaaatttttggattattttagcatacctagaatatattttgatttaaaaggggactttttttctttcaacaatgttcctcatctcgttagtacttaatttatcccttttagaatgagaaatcatctttttttctgtttttcacttccttggtttacagataaaattatattatgctattaccctggtgataccaaatatttacaaagatttggggattttttggggggttctattttcaattctgcaactgttttttatcctatccaacctccttccctttctctgcatttttattttccacttttttatatttttttcctagctccctctctcatttgcttactttcactccctctctccctgcccaccccccccacacacagatacacacacacacatacacacacacacacacacacwctcaaatgctttttctgtcattcccatgcttcaggtttctagaaaactcattaggtcattcttatattaattttctacttgtttatcattttttcaatctagtcttgaaaaacacatctggtttccattctaatcagtattcctctgagagtagcatcatgttatagaagtcaaagaattctcaaataataacccataatggttcaacttctggtaatttaaacttttatccagtaactttaaaagagctattcatgtagtctaacttggcagccttttttttaagataaaagtttatggaggtggggtttgtgtgggtaatcatttaaagaaacaatatttggaaacctttttcaaaatgacaaattttttaaactaaacatggaaaatgattcgctattttcaatagctattcatttctgagagttcacaattgaaatgacacaacttatgtgctgtgtaaatgaggtgatagtgaagactatgtactgaaaaaagaagacaaaaacattagaactactaaaaaagagcaaatagatgttaagtgagaaattattgaaaactacttacaaaacataaagctatgtgcattatgagaggatatagtattcagaggcagcatgaaacaacgtggcctatggggagctgtcagggttcaaacgatttgcaatcagacattctgcatttgaaatattgttcttaataattgtgtgacataggcaagttatttaacttctctgagtccatcacatgttacaagaataatagaggacaaatttccacttgaagaagcctaaagggctggagagtggatgcaaaaaataaatagggtgctttagaagatccgaagtgagagtacagttgtgaaagaagataattagataattctagtgccagcattataggtgagattgagcagaaacctcatgtgggaaggtgagcctgaaaagaaatgagaacaagggaaatactagagcctgaatgatcctaataaacagtaaaagcagagatgaatacagtagaaaacagaaagagactaatcttctggcatatatctctattttatatattaaagccttacataacacttactgcatgccaggcagttttctaagcattttataaagttaaataatgcagtcatattaagttggcattatttttatcctcattttgcaagtgatgaaactagtcttaggtatagtttgccagaacagggaaagaagtggaataaaatttgaggtgacttcagttctccagcaaacattgctagaaagttaaacgagagatagttttgtccaggaagaaaatagtaataacaataataattacaacaacagcatttattgagcctttattaagtgccagccactgtttcaagtttctatatatctctcttttggcatatatatatattcctatttatatatacatatatataactatatatatatagaaagagagagagaaggaacagtaataaaagagtacaagtactcctttatcctcattttccagatgaagaaacaaggcacaagagaatttaagtaactttcacaagttaataaagtttgaaataaattggaatattgatacagaagggctaatctgaagcctgagcctttagccactattactttcaacatacggtttattttcataaagggggtggggagggtgtccctagcatgcttcactttttcaagtgtgccgcatcttaaagtggaatatgcttgttgacatggtcagttcacatgtaaagaacccaaataagaagccctccaatactgaagtgaaacttgctaagaaagaaagcatactcatctccagaggactctcatgccagccatccataatactaaactcaatctttaatcatacatatgaaccaaagatgacaaacatttgcagaaaagaagaaagatcaaagtgaaggcaccaagaaaactgatccttcataaaggcaatccaagaaatataaaatatgtatttcaaattcttactagaatttatatactcattcatttttaaaatattcactatacacctcctactatgtatcagactctgaattgtggtagtaaatgccatggtgatataaccccacccctccacccccagaaaaaaccaccacaacaacacatgttacttgctcccatggagcttatttgaaattatattgcattattttaaaagcataatctgacagaaaatgaagcagaaaaaaacaggattaggtatcaagactatgatagcagaacaaataatttggcagaatggttaagtaatagactgaatatggctaaaaaacaaataaatgatttgtaatgtccagcattcaaaattagaacaaaaaacagagaggcagaaaatagagaaatgttaaaggatatggaagatcaatttagatagtttatcttcacttcaaaacgaattccaggaagaaaatatgaaggaaaagcgagagagcaatgaacactttacaaaattgaataagaactcaagtgatcaattgaaatgacccaccaatggctaagcataatgagtgaagacccatgtcatggtgaaacctctgaactcaaacaataagtagaaaatattgaaagtttctaaaaataaaatttgcacaagttgcttacaaaggaactagaatcagattggcatcagattatatcattaggcagcacttgatgctagaagaaagtacagaatacctacaaagatttgagcaaaatgatattaagctaaaatatataccagttaaaatattattcagatgcaagtataaataaaaacgttttcttgcaaataagaacttcaaatgtttcccaactttagaccctccctgaaataattactgtggcaaaataaaaaatgtttccaagaggaaatgtgggatacaaaacaaaaaggatgaaatactactcaacaataaaaataaactatttactggtatgtagaacatgtgcatgaatctcaaatgcattatgctaagtgaaagaagccagacccaaaaggctacatgctgtatggttccattttatgttctagaaaggcaaaaactataggtacagaaacagattgccagcggatgtggagtggggatgagagattgacaacaaccgggcatgaaaggattacttgggtgatggaacagttctatatcttgattgtgggggtagttacacaatcatgtacttttggcagaactcacaaaactaaaggtgaaaattacagcatataaatgatacctcatatataaatacatattatatatatattagtactatatataattaatataataataatataatatatatattaaatacatatrtattagtacgaatgagggacaaaacagcggagagtaaagaaactagttaaatatatatttgaatctcagtgttaaaattttaaaaataggggagagggcaagatggcagactagacaaagccaggtggaacagctgccaccgagggactgagatgactggtgtattcctaacagatcttcagagggaaggcaccaagtgtggtcacagggaaaacacagaagctgggctgaagtgggaaaaagccaggaaccctgccctgggctrtggtgcaccaggacttattcctggttcccagcgactcaaggagaatgggccagttgaactggcaaggagcaaccggctctcaccatgggccttagtgcaggaggagactcctaaaccaccacagacactcaagttgacagggagagctgcttagaaaagtggtagggacagcaagccagctgatgtggagcccagagggtttggcatgagagcatgtgtagcagaacacggccagggacagccaycctcctaggcttggcttgctcccataggagacattagccccaggagaactgtcggacctgaactctgcaggtcagtcttgcccatcagacggggccagtccaacctgagcacttcttggtctgctggcttctcctgggcctccagccttgccacatctgcttgcagggcatcctcgggtgttctggggtcctgcctcataactcctgcactggtggatcatgcttgactggtggagagcgccagtggggcagtccccatggccagcccggctgctctgcctgctccctctccacactgtgtcttccctcaggcccacagcaaaccccaaacatgtaccggcacacatgcgtatgggtgggttttgctttccttgccctgccagtgtgtgtgtgtgtgcacgtctctgtgtatgcaccctgccctgccactgctgggtcagaagtgcactccgctcccccacggcactccccaccactaaccatcattgcagttggagccttggccggcacttagccagctagccagccccaccccggccagcaccccaccctcccgccaaagctgctgctgtgggagtgaagctaagcatggagaacagcagaccctcccccaccctgagtgatcacgcctgcctgcagtgcataaatcacacatagtcctgtgccctccagcgccccaacaccgtgccaacactatcaacagtgcaaccgcctgcagtcaccagcagggatgccccccaacccatcagtcctggagccatattgcctctgccactgtgatgaatgcccatatgaaaacaggaaccctggcatccagtagcaccctgcttcagccaacgagtgtgcaccccaccacatttctattgctgctgctgctgctgctggcatgtgtgaacaaaaatggatcctgctgtcactgcgctatgaaaagctttgaccgacaccacccatcagaatgcagtgaccagtggtctgggagcaactcagctcccccaggacagtggatttctaaccttgcggagccagagaacaaagtcagggcccaatacaagtccctcagagttagagctcgcagtccaggagttgggagctgagcgttggccccctggaatcttccagaaatgaagccagttggttaaatctaccttataccacaatcaaaccttccgggtcatcacataggataaaagaaataaccattcaaaggtcagcacttcaaagactgaaggaacataagcccacaaaaatgagaaagaaccagctcaagaaccctgacaactcaaaaagccagagtgccttctttgctccaaatgactgcatcacttctccagcaagggttctgaaccaggctgagatggctgaaatgacagaaatagaattcagaatatggatagaaatgaagatcattgagatgcaggagtacattgaaacccaatctaaggaagctaaaataaaatgatgtaaaagctgacagacagaatagccactatagaaaggaacataatcaacctgatagagctgaaaaacatgctacaataattttacaatgtgatcacaagtgttaataacagaatagaccacattgaagaaagcatctcagagcttgaagactggctttctgaaataagacagttggacaagaatagagaaaaaagaataaaaagcaacaaacaaaatctctgagaaatatgggattatttaaagaaaccaactctatgactcattggtgtccccaaaagagatggggtgagtacaagcaagttggaaaacatatttcaggatatcattcataagaacttcctctacttagctaaagaggtcaacattcaaatttgggaaggcagagaaccccagtaagatatttcacacaagaagatcatcccaagacacataatcatcagattctctaaggttgaaatgaaagaaaaaatgttaaaggcagctagagagaaagatcaggtcacctacaaagggaagcccataagactaacagagggcttctcagcagaaaccctacaagccagaagagattgggggccaatattcaacattattaaagaaagtgaattccaacccagaatttcatttctcatcaaactagctccataagtgagggagaaataatatccttttcagacaagcaaatgctgtgggaattagttaccaccagaactgccttacaagagctcctgaaggaagcactaaatatggacgggaaaaaccattgccagccactacaaaaacacacagatcagtgacactataaaacaaccacataaacaagcgcccatacgaaccagctaacatcatgatgacaggatcaaatctacacacaataatactaaccatgaatgtaaatgggataaataccccaattagaagacatagagtggcaagctggataaagaaccaagacccattggtatactgtcttcaagagatgcatctcacatgcaatgacacccatagtcttaaagtaaagggatggagaaaaaactaccaggaaaatggaaaagtgaaaaaaaaaggagttgcaatcctaatgtcagacaaaacaaactttaaaccaacaaacataaaaaaaagacaaggaagggtgttacataatgataaagggttcaattcagtaagaagacctaactatcctaaatatatatgcacccaacacaggagtacccagattcataaagcaacttcttagagaccttcaaagagacttagactctcatacagtaatagtgggggactttaacaccccactgacagtattaatacagatcattgaggcagaaaattaacaaagatactcaagaactgaactcagcactggatcaaatggacctgatagatatttacagaactctccacccaaaacaagagaatacacattcttttcattgccacatggtatatactctaaaattgatcatataattgaacacagaacattcctcagcaaatgcagaactcaaatcataacaaccagtctcttggaccacacacagcacaatacagttagaaatcaagaataagaaatgcattcaaaatcatacaattacatggaaattgaataacctgctcccaaataacttttgggtaaataatgaaattaaggaagaaattaagaagttctttgaaattaatgagaacaaagatgcaacataccagaatctctgggacacagctacggcagtgttaagagggaaatgtataggactaaatgcccacataaaacagataaaaagatctcaagttaacaacctaacatcacaactaaaagaactagagaaccaagagaaaaccaaccccaaagctagcagaaaacaagaaataaccaaaatcagagctaaactgaaggagattaagacacgaaaaaacattcaaaagatcagtgaatctagcagtttttttttgaaaaaaattaataaactagatagactgctagctagaccaataaagaaaagagagaagatccaaacaaacacaatcacaaaagacaaaggggatattacccctagctcacagaaatacaaacaaccatcagagaatactataaacacctctgtgcacataaactagaaaatctagaaggaatggataaattcctggacacatacacactcccaagactgaaccaggaagaaattgaatccctgaatagatcaataacatgttctgaaattgaggcgataataaatagcctaccaaccaataaaaatgcaggaccagattcatagctgaattctaccaaaaggtacaaagaaaagctggaccatttctactgaaactattccaaaaaattgcaaaggagggacccctccctagctcattctgtgaggccagcatcatcctgataccaagacctggtagagatacaacttcaggccaatacccttgatgaacatagatgcaaaaatcctcaaccaaatactggcaaactaaatcgagcagcacatccaaaagcttatccaccatgatcaagttggtttcatccctgggatgcaaggttggttcaacatacacaaatcagtaaatgtgattcgtcacataaacagaactaaagacaaaaaccacatgattatctcaatagatgcagaaaaaaggccttcaataaaattcaacatgctttcaagttaaaaactctcaataaactaggtattgaaggaacatacctcgaaataagagccatatatgacagacccacagccaatatcatactgaatggacaaaagctggaagcattcctattgaaaatcggcacaacacaaggatatccactctcaccactcctattcaacatagcattggaagctctggccagggcaatcaggcaagagaaagaaagagtattcgaataggaagagaggaagtcaaattatctttctgtgcagatgacatgatcctatatctagaaaaccccattgtctcagtccaaaagcttcttaagctgataaacaacttcagcaaagtcccaggatacaaaatcaatgtgcaaaaattgctatcattcctatatacaaacaataggtatagagaaccaaatcatgaattgtgaatgaattcccactcacaattgctacaataaaaataaaatgcctaggaattacagctaacaagggaagtgaaggaccttttcagtaagaactacaaaagactgcttaaagaaattggaggacacaaacaaatggaaaaaccttccatgctcatggatagacagaatcaatattgtgaaaatggccatgtggcccaaagtaatttatagattcaatgacattgacattcttcacagaattaggaaaaacttttcctaacaatttatatggaatccaaaaagagcccaaatagccctttctctgcaaaaacaaagaagagccatatacacatcatctctgtgtctttctatcatgccctttgcttgtcttgcagtattttattgtacaccaagcttgtatacaaaagaactatagagtctgaagatgatgttacttgtcaccagaggtggttcttccttttctcatttaggaagagggactgagactatgatttaatcagtggttgagctagatcagagctggaatgcagttttggtaagattttttttttcttctttttattatactttaagttttagggtacatgtgcacattgtgcaggttagttacatatgtatacatgtgccatgctggtgcgctgcacccactaactcgtcatctagcattaggtatatctcccgatgctatccctcccccctccccccaccccacaacagtccccagagtgtgatattccccttcctgtgtccatgtgatctcattgttgaattcccacctatgagtgagaatatgcggtgtttggttttttgttcttgcgatagtttactgagaatgatgatttccaatttcatccatgtccctacaaaggacatgaactcatcattttttatggctgcatagtattccatggtgtatatgtgccacattttcttaatccagtctatcattgttggacatttggcttggttccaagtctttgctattgtgaataatgccgcaataaacatacatgtgcatgtgtctttatagcagcatgatttatagtcctttgggtatatacccagtaatgggatggctgggtcaaatggtacttccagttctagatccctgaggaatcgccacactgacttccacaagggttgaactagtttacagtcccaccaacagtgtaaaagtgttcctatttctccacatcctctccagcacctgttgtttcctgactttttaatgattgccattctaactggtgtgaaatggtatcacattgtggttttgatttgcatttctctgatggccagtgatgatgagcattttttcatgtgttttttggctgcataaatgtcttcttttgagaagtgtctgttcatgtccttcgcccactttttgatggggttgtttgttcttttcttgtaaatttgtttgagttcattgtagattctggatattagccctttgtcagatgagtagtttgcgaaaattttctcccattctgtaggttgcctgttcactctgatggtagtttcttttgctgtgcagaagctctttagtttaattagatcccatttgtcaattttgtcttttgttgacattgcttttggtgtttagacatgaagtccttgcccatgcctatgtcctgaatggtaatgcctaggttttcttctagggtttttatggttttaggtctaacgtttaagtctttaatccatcttgaattgatttttgtataaggtgtaaggaagggatcaagtttcagctttctgcatatggctagccagttttcccagcaccatttattaaatagggaatcctttccccattccttgtttttctcaggtttgtcaaagatcagatggttgtagatatgtggcattatttctgagggctctgttctgttccattgatctatatctctgttttggtaccagtaccatgctgttttggttactgtagccttgtagtatagtttgaagtcaggtagtgtgatgcctccagctttgttcttttggcttaggattgacttggcaatgcgggctcttttttggttccatatgaactttaaagtagttttttccaattctgtgacgaaagtcattggtagcttgatggggatggcattgaatctgtaaattaccttgggcagtatggccattttcacgatattgattcttcctacccatgagcatggaatgttcttccatttgtttgtatcctcttttatttccttgagcagtggtttgtagttctccttgaagagatccttcacatcccttgtaagttggattcctaggtattttattctctttgaagcaattgtgaatgggagttcactcatgatttggctctctgtttgtctgttgttggtgtataagaatgcttgtgatttttgtacattgattttgtatcctgagactttgctgaagttgcttatcagcttaaggagattttgggctgagacaatggggttttctagatatacaatcatgtcgtctgcaaacagggacaatttgacttcctcttttcctaattgaataccctttatttccttctcctgcctaattgccctggccagaacttccaacactatgttgaataggagtggtgagagagggcatccctgtcttgtgccacttttcaaagggaatgcttccagtttttgcccattcagtatgatattggctgtgggtttgtcatagatagctcttattattttgaaatacgtcccatcaatacctaatttattgagagtttttagcatgaagggttgttgaattttgtcaaaggctttttctgcatctattgagataatcatgcggtttttgtctttggctctgtttatatgctggattacatttattgatttgtgtatattgaaccagccttgcatcccagggatgaagcccacttgatcatggtggataagctttttgatgggctgctggatttgttttgccagtattttattgagtatttttgcatcaatgttcatcaaggatattggtctaaaattctctttttttgttgtgtctctgcctggctttggtatcagaatgatgctggcctcataaaatgagttagggaggattccctctttttctattgattggaatattttcagaaggaatggtaccagttcctccttgtacctctggtagaattcggctgtgaatccatctggtcctggactctttttggttggtaagctattgattattgctacaatttcagatcctgttattggtctattcagagattcaacttcttcctggtttagtcttgggagagtgtatgtgtcgaggaatttatccatttcttctagattttctagtttatttgcatagaggtgtttgtagtattctctgatggtagtttgtatttctgtgggatcggtggtgatatcccctttatcattttttattgcgtctacttgattcttctctctttttttctttattagtcttgctagcggtctatcaattttgttgatcctttcaaaaaaccagctcctggattcactaattttttgaagggttttttgtgtctctatttccttcagttctgctctgattttagttatttcttgccttctgctagcttttgaatgtgtttgctcttgcttttctagttcttttaattgtgatgttagggtgtcaattttggatctttcctgccttctcttgtgggcatttagtgctataaatttccgtctacacactgctttgaatgcgtcccagagattctggtatgttgtgtctttgttctcgttggtttcaaagaacatctttatttctgccttcatttcgttatgtacccagtagtcattcaggagcaggttgttcagtttccatgtagttgagcggttttgagtgagattcttaatcctgagttctagtttgattgcactgtggtctgagagatagtttgttataatttctgttcttttacatttgctgaggagagctttacttccaagtatgtggtcaattttggaataggtgtggtgtggtgctgaaaaaaatgtatattctgttgatttggggtggagagttctgtagatatctattaggtctgcttggtgcagagctgagttcaattcctgggtatccttgttgactttctgtctcgttgatctgtctaatgttgacagtggggtgttaaagtctcccattattaatgtgtgggagtctaagtctctttgtaggtcactcaggacttgctttatgaatcttggtgctcctgtattgggtgcatatatatttaggatagttagctcttcttgttgaattgatccctttaccattgtgtaatggccttctttgtctctcttgatctttgttggtttaaagtctgttgtatcagagactgggattgcaacccctgcctttttttgttttccatttgcttggtagatcttcctccaaccttttattttgagcctatgtgtgtctctgcatgtgagatgggtttcctgaatacagcacactgttgggtcttgactctttatccaatttgccagtctgtgtcttttaattggagcatttagtccatttacatttaaagttaatgttgttatgtgtgaatttgatcctgtcattatgatgttagctggttattttgctggttagttgatgcagtttcttcctagtcttgatggtctttacattttggcatggttttgcagctgctggtaccggtggttcctttccgtgtttagcacttccttcagaagctcttttagggcaggcctggtggtgacaaaatgtctcagcatttgcttgtctgtaaagtattttatttctccttcacttatgaagcttagtttggctggatatgaaattctgggttgaaaattcttttctttaaaattttgaatattggcccccactctcttctggcttgtagggtttctgccaagagatccgctgttagtctgatggacttccctttgagggtgacccgacctttctctctagctgcccttaacattttttccttcatttcaactttggtgaatctgacaattatgtgtcttggagttgctcttctcgaggagtatctttgtggtgttctctgtatttcctgaatctgaacgttggcctgccttgctagattggggaagttctcctggataatatcctgcagagtgttttccaacttggttccattctccccatcactttcaggtacaccagtcagacgtagatttggtcttttcacatagcccccatatttcttggaggctttgctcatttccttttattcttttttctctaaacttcccttcttgcttcatttcattcatttcatcttccatggctgataccctttcttcyagttgatcgcgtcggctcctgaggcttctgcattcttcacgttgttctcaagccttggtgttcagctccatcagctcctttaagcacttctctgtattcgttattctaattatacattcttctaaatttttttcaaggttttcaacttctttgcctttggtttgaatgtcctcccgtagctcagagtaatttgatcatctgaagccttcttctctcagctcgtcaaaatcattctccatccagctttgttctgttgctggtggggaactgcgttcctttgaaggaggagaggcgctctgctttttagagtttccagtttttctgttctgttttttccccatctttgtggttttatctacttttggtctttgataatggtgatgtacagatgggtttttggtgtggatgtcctttctgtttgttagttttccttctaacagacaggaccctcagccgcaggtctgttggagtaccctgccgtgtgaggtgtcagtgtgcccctgctggggggtgcctcccagttaggctgctcgggggtcaggggtcagggacccacttgaggaggcagtctgcccgttctcagatctccagctgggtgctgggagaaccactgctctcttcaaagctgtcagacagggacatttaagtctgcagaggttactgttgtctttttgtttgtctgtgccctgcccccagaggtggagcctacagaggcaggcaggcctccttgagctgtggtgggctccacccagttcgagcttcccggctgctttgtttacctaatcaagcctgggcaatggcgggcgcccctcccccagcctcgctgccgccttgcagtttgatctcagactgctgtgctagcaatcagcgagactccgtgggcgtaggaccctccgagccaggtgtgggatataatctcgtggtgcgccgctttttaagcccgtcagaaaagcacagtattcaggtgggagtgacacgattttccaggtgccgtccgtcacccctttctttgactcggaaagggaactccctgaccccttgcgcttcccaagtgaggcaatgcctcgccctgcttcggctcgcacacggtgagcrcacccactgacctgcgcccactgtctggcactccctagtgagatgaacctggtacctcagatggaaatgcagaaatcaccatcttctgcgtcgctcacgctgggagctgtagaccggagctgttcctatttggccatcttggctcctcgcccccagttttggtaagattaacccacattttgttctcctctgttctttggacatggcattcatgggccttaaattaagaacctggaagtttctgaatcctcagccatgaaaatttagagagattcaattctatcctttgaatgtgttgagtttaactctttaaacttcgataccacacatcttcaaaatttaatatatgtcttgatgagaagaccaaccaggtatttgcaagactgcctcgtagtcgctgtaagaactgtaaaagacatcatagagacttcagaagtttctgacccagccctgcctcagcctttcaaaacaccacataactcagcaaatatcctgtggtaaaaattagctgccatgtatgtgatgctgctttaaatttttataactgcctgcataattgtccaaagttctgatggttcatctcttccatagtaatgtacttctgcctatgctaaccctgattctcagcagtactcagaatccgtagatgctttcaagggatgaaaataactgagagtgacagctcacataggactcttccctctagaattttagcctctcccttgcccgttgtttccagtgtccttaaaatagcatttttgtaatatctctacttttttctcattattgaagtggaaacattgcctacaagaactactatatcttactgagaagcaaaagtgatttttttaaaccatctttattcttcttacaaaaaaaaccttaaaaccccctagaaaagttgaaaacaaagcaatagaaaaagaaaataccatgtaactatttaccaaaagaaagctaacatggtaatattcatatagaataaattaaaatttaaggaagaagacattggtaagtattaatatgtgtgtaccaaaaatattggctagaaatatataaagcaaaaatgttcagactctcatggattaactgacaaatccgtaacaacaatataatattttaatcctcctctcttaaataacagtagttaactctgacaaagaattgttaaagaatatttattaggagaacatttgtaagtttggcatgcgtgtgtgtgtttgtgtgtgtgtattagacactgcattcaacagtcaagactatacattcttttcaagtgaaggtacaaatggaacaattacaaacattttccacatactgtcataartgaaatctcagcaatatatagactttattaccttcctactgctcctaactcactgaagtcctttcttccttacctaaattaaacatggctaatcattatagttatttatttgcactcaccttcaactcttttgcaattcttccttttcagttcactgaaaaagccgcaaacctaattaaagataattctccacacctgaatttgtgcagctaactgtatacagaaattatacaaccatgccgaatagtctcattttaaattcataattatataactcaaatcggccttaattctgtcagacaatcctactgcattccctattactttatttctcccatgcacctagacaactacttccacctttatttctcttcaactctccagcactacctccccatcttcaatctcagatggtgactttgttttctacttcaattagaaatttaaagcaatgagaacctccacaaattcccaccaccacatctacccaattaccagcactatgtaccatattctctgctttcccttttttgctcctacctaaggtcagcttttcctagcatttcacaaatatatcttcatttactcctccaattatcctatgaactggtgttgatggtatcattttacagctggggggaaagcttcaaagtcaaatcattagagaaggactgttctagctctgtgttctctatccccttgttactcaaaggtgattccacagatcagtatcatcaccaatacctgtgatgttattgggccccagacctaattaatccaaaaaagggatgcattttaaaaagattctcaagtgtttcttatgctgtttgacatttaaagaacactcctgtataccagtctgtccttccccatgcacattccactatagtatagtggcaccaattatttaaaaaataaaattggttcttagattatgttttactagaactcagtccttctccaaggtactaattcaagccctccataaattctgtttgtttcttgcaaatgaagtttctgatggtgttccttcttttggtgtgattgatttgattaagtttggattcagttagtcgcagtagtcagggtaggagcttggtggtagccagatcaaagaatttggaatgaccagccttgtaagagccaatccttattgtattcattcattttaactgttaatttctcattcactgagaaaggacttggtttaattaacaacagaacaaaattttgcagatttgatcttggtatatggacttattttaaggcatattgttagtggtgaagattgggaacccacctgtggaaaaaatttgagagcctataatttattttttaaaataatggaattaaattttagtttyttgttcagtgcagaagtctgacttacagtaaacattccgatggaaatattttagtgaaagggtagggaactgacactacgtcattaagacttctgctagcatttttcccattagagcacaatggctccaaacaaagaggaaatgatatgggtgaaccacagcaccctccatttacactaagaggaaaacacattgaactctcatgaaagttttctctctttcacatttgagccctctccccacattttgaaagaaacctgcatttcaaataaagtgtacatacactgacctcactcaccaaaacataaattttgttatcactttgattgcattatttcaaggttttaaatgtttaaattaaaaatactccactttatacttctacagtaacaggtaactatgtactcctttgctcctcttttcttcatgattttcatagtggtaggattggtccattcctgttgctattacaaaaaactacactcagttaacaaaaagtttcaagcaagcccttggcaaacatttcaaaatyctctcttccaattcaaaatcttccaatagactatcatgttacctttctccattacaaataatctgtggggaaattaagtctatgaccatttgaaataattaggctcattaagagcttatgacttaaggggtaaagccacatcactcatgtcattcattaagcaactataatatttaaatgaacttataattacccaccagttatttcaatcatcctcaaagatttgagttcaacgcattatttcttgacagatgcatttttaaaagcttcttacacttggataaccactccatcttaatgtcctttgctctttgtcttcttcacrttcttaaagtaaggacactcagggtggtctgttcattgtcttgccttgttactcaacctcacttttatatacactccactgcctgaattcattttccatgtttgaacccatgcaaatctaatcagtttttaagtaagacttcactgactacctcattgcacagtctcttttgcatcctcatcgcacagacatcttttgcaggtccttccccatgcacattccactgtagtatagtggcaccaattatttaaaaaataaaattgattcttagattatgttttactagaactcaatccttctccaaggtactaattcaagccctccataaattctgttagtttcttgcaaatgaagtttctgatggtgttcagttcacagtctcttttgcatcctagaagtttcatttctgatgcaatatatttgcccctttatctcatattaaatttataatagatgttgaatttttccacaagtatgacctgtaatatgttttatcatctcatttggtcataattgactgttaaaggctgtattctttacttgtcttgaaacttgcagtgtttttctcgttgtctactgttactaaaccacatgtgggtctgcttgcctggcacagtaaagccaaatacccacaccaacgtttgcagtaagagtaaggagggcatttatttgcagggtgccaagcaaggagaattgggcagctaatccttaagagctggcctccccaatggcctataagcaagggctcttaaaagcagagacacctctttttaggaaagcagaagttacagtcaaaattgtaaatcaatacttggaggttatattaatacattggtttggcccaaaatggcaggctatcttgaagtgggggctcacaggtcataggtggattcagagattctttgatttgcaattgcttaaggaagtcaaggctttgtttaaaaacttggggtcatcagaagggaatgttgaggtttgacctgtgggcattactctctccaggcccgtcaggaaaaaatttagaacaaagaagagcaatcagatttcatattccctttatctgaagtctgtgtgactgtggttggccttttccatctgatgggggtctgggtttctgaaaaacaactcagggacatgtgtcatctttagtttctatagggaaccaaacatcttgtccttcttgcttattgagttgctgatttacttctcgaggctagctatatgcctggaatttctcttgaagggactcaagccttttcccttattttcatgcttgaggtgtcccagcaggcccctaagaggggtctctgttctgtcttactacaagagatatttcttaaagaaatgtgtgaataaatgaataaatggcaaatagctgatttaggctggagaaatatttgtggtttttttcctgcttaatagaggtagattaatttgatctatctcctcatgtcttaattcatataatctaaaataaaggacataatttgaatataaattaaattttttgaaactcctcacttttacaaatgaaaaagttgagacccaattggaaagtgagttgccggaaactacatatgtagtctgaaaaatttaaactagaactagtcctgaatcttcatcccatggtcttcctaaggacagttctttccaatggagataccaggttaatagcagtgtctcggttgttaggctgtttcaaggaagggataactgaaaggtatggcaaagcacataggtcagttcatactggttgtcacatgtttaaagtttttgttagtattaaaagaatggacagtatatttgtatatgtatttaattatgtatatgcccattttttcacataaggtttattttacatagctgtacataaacatgttgaatacaacagcataaaataacattttaaataagcagataaggaaaagaggattcaaaaagtgagataggagggaggataaaagcctgaaatgaggttagaatgtgaaattctgttgaaaaaccttttacttttgctagacttggcccatgaattagattggctctgagcattctgtctgtcaaggcagagtaaatgacaatgccactttggataattgggaagtatccaaaaacaaaacaatgtgcacatcaagtacacctattccttatactaagaacaaatagtatttttttcttgtggatccctatatcaaacaggatagacagaattatgctatagtgacaaacattagtaaaatcttagtggcttatgctgacaaaggcttatttttcactcacactgtgtgtccattgcatataagatggggtctctatctaccacagtaactcatacatacaagccaaaggagacttcatctcatttataatcagtgcagcaggtggaagagaattgggtggcccrtatagtggttcttaaagcttccactcggaaaagacacatttcatttgagctcaaatttcttcatttcatttcccagagcaagccccgtgttcatacttatcttcaatgaacttaaagacagtttgcagtccaaccttgtgccttggaaggatgaaaaggtgaatatttctgaacagcccaactgattaccacactctccatagagaagcactgcgtaaagtaatgagttatgttgacatagaaaatacggccagaactgagtctatgacattgcacgatgttgaccaagggcataaagacaaggcaaaagctggtaaaaatggttctaccagtggctaggaaaaatcagttctgatacatagctctttattggtctaccttaattcaggaattgtttcagctttcctaaagaaagggataaaagttactcctaaatatatattctctcaacaaagcttttatatgtatgaactaatagtgagtttgcatttatatcccttaagaaataatattaataacaatacttttttcttctttttaaaaattcaatagcttttgaggtacaatggttttttttttacatggatggatgaattacatagtgctgaattctgagattttagtgcacccatcacccaagtagcatacattttacctaatgtgtagttttgtatctctagccctcctctcaccctcccggctctgagtctctaaaatctattatatcactctgtatgcctttgcatactggtagcttagctcccacttaaaagtgagaacatatggttttcagttttccactcctgtgttacttcacttagaataatggcctccagctccatctaagttgctgcaaaagaggtaatttcctttgaatggctgagtagtccatggtgtgtatgtgccacattttctttatcccatcattagttgatgggtacttaggttggttytacatctttgcaattgtgaattgtgctgctataaacatacatgggcaagtgtctttttcatataatgacttctttctttgggtagataccccacagtgggattgctggatcaaatggtagttctatatttaattcctcaagggaccttcattacagttttccatagaggttgtactaatttacattcccaccaatagtgaataagtgttycctttttcccacatccatgccaacctctattgttttttgactttttattaataatggccattctttcagaattcattgtgatatctcattgtggttttaatttgcacttccctggtgattactgatgttgaggactttttcatatatttattgaccatttgtatatcttcttttaagaaatgtctattcatgtcctttgcccactttttaatggaattatttgtattttttcttggtaatttgtttgagttccttgtacattctggatactagtcctttttcggatgtgtagtttgcaaatattttctcccattctgtgggttttctgtttactctgtcaattatttcttttgttgtgcagaaggtttttagtttaattaggtctcatttgtttatttttgtttttgttatatttgcttttgggatctttgttataaattctttgcctaggtcagtgtctagaagagtttttccaacgttgtcttctagaatttgtatagtttcaggtcctatatttgactcattgattcatcttgagttgatttttgtataaggtgagagataggaatccagtttcattcttcaatgtgtggcttggcagttttcctagcaccatttaatgtaataaatgatatcaattccctaacttatatttttgtgtactttattgaaggtcagttggctgtaagtatttggcttgatttctgggttctctattctgttcctttggtctaggtgcccacttttgtatcagtatcatgctgttttagtaactgcaggcttatagtataatttgaagtccggtaatgtgatgcctccaaatttgttctttttgcgtaggatttctatggctatttgggctcttttttggttccatatgaattttaggattgttctttctaattttgtgaaaaacaatgttggtattttcatgggaattgtattaaatctgtagattcctttgggcagtatgatcatttgcacaatattgattcttccaatccatgagcatgaaatgtgttttcatttgtttctgtcatctataatttctttcagcagtgtcttgtagtcctccttgtagagatctttcacctccatagttaaatatattcgtaggtattttatttattttttcctttttgcagctcttataaaagagatcacgttcttgatctgattctcagcttgatgctatacatcaacaatgatattgttgtacattgactttgaaacctgagactttactgaattcgtttattaaatctaagagtcttttggaggagtacttaggatgttctaggtacacagtcatatcatctgcaaacagtgatagttggacttcctcttttccagtttcaatgtcccttatttctttctcttgcctgattggtctggatagcacttgcagaactatgttgaacaggagtggtgaaagtgatcatctttgtcttgtttctgttctcaggggaaatgcttacaacttttccccattcaataagatgttggctatgggtttgtcatatatggattttaytattttgatataggtgccttctatgcctggttcttataaagggatgctgtagtttatcaaatgctttttctgcatctattgggataataatatagtttttgtttttaattctgtttatgtgatgtattacacttactgacttgcgtatattaaaccatcccagcatccctgggatgaaacccacttgaccatgatgaattacctttttgatatcctgtgggatttgtttagctagtattttgggggggatttttgaatctatgttcataaggaaaattgatcggtagttttctttttttgttgtgtcttttcctggatttggtatcagaatgatactagcttcatagaatgatttagggaggattccttccttctcaatcttttggaatagtttcagtaggattagtaccaattctttgaatgtctggtagaattcaggtgtgaatccatctggtcctgggcttttattttgttgacaatttttaaattactgattcaatctcactgcttcttattagtcttttcaaggtttctattcctgatttaatctaggaggattgtatgtttccaggaattcatccatttcctctaggttttctagtttgtgcacataaaggtgttcataatagtcttgaatgattgtttctgtaattctgtggtgttggttgtaatgtctccagtttcatttctaattgagcttatttggatcttccctcttcttggttaatctagctaatggtctatcagttttgtttatttttttcaaagaaccagctttttgtttcattgatcttttgtattgttttgtttgtttgaattttatttagttctgctctgatctgtgttatttcttttcttctagcttcaggtttagtctgttctcgtttctctagttccttgaggtgtgacattaggtcatcaatttgggcactttcagacttcttgatgtaggcatttagcactataaactttcctctaagcactgcttttgctgtattccagaggttttgataacttgggtcattatcatcattcaattcaaataatttttaaatttccatcttgatttcattgttaacccagatatcagtcagaagcagcttatttaatttccatgtatttgtatagttttgagggttccttttggagttgatttctagctttattccactgtggcctgagaagatacttgatataattttgatttttttttttaatttattgagatttgttttatggcctattatatggtctgtcttggagaatgttccacgtgctcatgagaagaatgtgtattctggaaatcttgggtagcatgatctgtaaatatctttaagttcatttgttctagcatgtcatttaagtccactgttcctctgttgactttctgtgttgaagatctgctagtgctgtcagtggcacactgaagtctcccactattattgttttgctgtcaatctcatttcttaggtctaatagtgattgttttataaatgtagatgcttcagtgtttggtacatataaatttaggattgtaatctcttcttgttgaattgatccttttatcaatataatagggactgtctttctttttttagtgttgttgctttgaagtctgttttgtctgataaaagaatagctactcctgctcacttttggtttccatttgcatggaatacctttttacacacttttaccttgagtttatttgaatctttccatgttaggtgagtctcttgaagtagatatttctattgtgatttttttatccattctgccattctgtatcttttaagtggagtatttaggccttttacagtcaacattaatattgagatgtaaggtgctgttctcttcatcatgttattacctagtttttttttttttcattgtgttactgttttatagacccagtgagttttaagctttcaagaggttctattttggtgcgtattgggcttttgttttaaggcttaraaccccttttattaataacaatattgattaccatttatacaacctttacaatatgccagacactgtgtttttgcatatatattctcattttatccacttaccaagtttataaggtaattattataatctccaaattatgtttgaggaaacaggcttaaaggaattaatttgcctaaggtcacttaatcaacaaatggcaaagctggcatttaaatttgtgtccgtctgactccaaagcctatgtgcttaactaatatactactctgcatcagaaatgcaggttaaggttacatgaatgtactttaaacaattggtcaagatggagttagatccactctcctaataaataggagaggagaaaacctgccctgataagaaaccttgccaaacctttctccaaacctccaaaacccttgagtgacattgtcttaggagataccttcagagaagactcaaatgctattagagcacgttttacaggaagagcaaggtcctgaaattctctgccattggtgggccattcactttgaatataattgaaatgtttttcatggaaaaaaactggagccatggtctgaaaaacagaatagtatgtattgaatcatacatataaaatattgttccaataaatgtcccaatcaattaaaaatcttgtcaaagtaattataaagaacatataaaacacagcaagaaaataagataaggagaaatatttaagggaattattaatactttagtacatattgttgtcattttaaatcttggatctataatcttaactattactagtcacagcagaacagtttataaggcatttytgtgccacagcttatttatactttgagtagcagaatgaaaacaatgccaatctggtataatatgactgtttaattctgttggtaggaaagtcacacacacaagaatgttttccaattccttgaaattcccaagtgatcaacaactaagaggatcgctgtgttcctgtggcacttccmtattgtttttatgctatagagctattatgttgcattgcagctacctaagaatacatctgagactcgtccccaccccatccccacagacagtgagccctgtcttcatccttgtattccaggcattgagcataattaacactcagtaggcacttttgtaatgaatgaatatggatagaatgagtgataatatatagcagtttttgctactagtgctcaaagagtaaaatacccttgagaaattgaggagttcatacaagtttcttagtcaaagtttttttggttgtaacacaaatcsgcttgaactgtgtaatggatgttaaaatgaggctgtttctgttctagtttcttctgaattcttaaaggctgatgacattaataggtacatcctaaagagaagtcctaccttgcaggatattaacccaccttgaacctataaaacatggcaaagaggaatgttgaggaatcaagagaattccttaggaggacagaagtaactttggaatactttttccctcagtcccagtgaggaacacattgggatgttaaaccaagaaacagaagctgctggctcctcattcaaagccaggtgtctcctgtatttggggggagwatgacaaatggtagagaaaactatggcccatcattagcacgtgagattatgagtctcaacaacctggcacattatctttttctttgtttgtctttaaatagcatatcagcatttctttgattgctttagtttctggtgaaattaaaaaattatttgccaatcgtattccttttttataacttacttcttatgtccgtcatctgttatctactgaggtttttgtttcatctgtcattctgttagaaatattttttgccagttttcattttgtgggactgtactttttgcctagcaggacttttgaatttttacataataaaatataggcatacctcagagatattgcaggctttgtgtaagaccattgcaataaaacaaatattgcaacaaagtgagtcacacaaatgttttggtttcccagtgtatataaaagttatgtttatactatattgtagtctcttaagggtataatagcattttgtctaataaaaagtgcataccttaatttaaaaatagtttactgctaaaaaatgctgacacagagacaggaagtgaacacaggtgttggaaaaatggcaacaacagacttgctctacacagagttccgtgaacattccatttgtaaaaaagcaatatctgtgaagtacaataaagtgcagttaaacaagatatgcctgtatattaatgttttactgtgtaatctcatcttttgtagacttctccaccacctatacatatattttttctagtttatatattgttctgctttttttaatccagatttaattttccartccatcaactgtttattctttgttagggagctaagattacacaagaatggaacacctcaaaatgtttatgcacgacagcacaaagtaggaaaaaaagacaaggagattgaagtaaatgttaaatgaaccgatttacatttctaccacaatgagaacttaaaccttgcttctgagtttaatggctttttaaaattgtactcagcatctacctatgattgttgctttttaaaaggttgtgaatttcattctcattatggtaaagatattctcaaaacctttatcagctacccatagagtcttttctttataaggcctccataaaaaaggagagctccatcttaccctagtaacaagaatagctagctgggaatcttcacagtgattgttcttttttatctcatagacactgtgaagagtgtaatgaataagatgtccttgtttattaagttagctgttaaaaacaatatgcattttgagaatgattcctggcccattttgttgccacttctgcttttctctgtcctttcattacacttaaattgcatgctacttttgcagtatttaggtacctttgtaagtggacaagtcatttctacatgaatatggggagaataagaaaaaaagggaaagaaatttcatttcaatatgtggtgtggtagagatcaaatttactttttcctaaacagttaacatttgccttatttctttttattcaatgattcatcttttcttaatgattaggaaygtcacatttgctaaatagtaaacgcattaatatttgcttgaaactataaattatgttactcttccctaatgattgcaatacctaattttatgtccacaccatattatttcaatcattattgttttatacattttaatatctgacagtataattcttctatcatgacttttttcactacttcctgcatattgtacctatactaaaatttttaatttgcactttagaataagtttgccctgttcccctccccaccaaacaatcatatatagattgtttagaattgtatttaatatttataatttatttgggggagaacttataccttcataatttttattctatacatttagaaatatcatgtgtatctttagtttgtaatgttctgcatctaggtcctaaacatttcttaaataatwtcttcctacatatttcacatattttaaaattaggcatgagattttaaaatattttattgtctaactggtcaactgctgacatttataacagtgataaatttttatgtatttgtaatttgcaactaaactctcctacttaacaatgcttattaaaatgattatcttgtgtttgcttggaagaccataatatcacgtgtaaaaacaaaaaacaattagtgttgtcttcctcattctaatatttacacctcttatttatttttattggcttactgcattggttaggatttacagagcagtgttaaataacagttgtgatggtgggaatatctactaaaatttcagctactggcaaatacaaagtaccttataaatatcactgaagcaagtaaagagttaatattttacataacaaaaaataatttttacatgagaagaaatataaaggtagctattacttctcatggatgtcaccaaggaaccatgtttcttatgtcctcctgcttcagcatccttagcatgttacttttatattgtcacaagataattgctgtatctcctggcattccagccacacaggacaaaagagaaaggacaccaggcatatagtaagccttttctttatcaggttttgcctttttatttaggaaataaaaccttccccaggggtgatatgatttggatatgtgtgccctccaaatctaatgttgagatataatccccagtgttggagatgggcctagagggagatacttggaccaggaggcgggggcagatccttcatgaatggcttaccaccatccctgtggtgatgagtgagctgttgctctgagttcctgtgagatcagttgatcagttgtttaaaaatgcatgacacctcccctcccccttgctcttgcttcgtttctcaccagatgacacatgggctcctcctttgccttttaccacgattgtaatctccctgaggcgtgcaccagaagcagatgctggcactatgtttcttgtacatcccgcagaaccataatccaattaaacctattttctttattagttacccagcctcaggtgtttctttacagcaatgcaagaatggactaacacaaggggcttctgccgacatttcattgaccacagctgtgtcacaaggggccaattaaatcaaatcaaatccaattcagaggagttaagtagctcmagtgtttagcttgagtagaaaaaaataaagggcagaaaaaaaataaagtagaaaaaaaagtaaaggwctttgaagtggatgttaaatgagccaatttacataactaccatagaaagaatccaaactttgtccctgattttaatggcatgcatcaaattattctgcatttaagtaatattttgaatttttatttcaagatgatttctttagcatgttagagacataaccttcttttatgggtttacttagtgtttcatttggaatgaatattacattttattaaatatatttttttttaatcaacgcaaaactcctgcttgagaaaagcagagggaaaggtaaagaggactttgtcttcaccttaggtaccagcaaagccatggcagggcagagcaccacgtgggctcttggggtccccagttccaggatttgactcttggacagcatttctggacctgcccttggacagaggggagcacgccgccctgaagggtgaggcccaggccaggcagcattcaccacaaactgactgaagagcttgtgggccttaagggaacttaggtagtagtctggcagtactccccatggcctggggtgtcagtggctatggggtgaggcgcctctgcctttggaaaggggaagaaagagaggtcctgtggtttgagtgccagctcagctgtaatacaatagaataccagttagacttctaaggtttttgacactagttcctgactcctggatggcacctctggacccacccagggcctggggtacctcaacaccctgaagggtaggaaataggccaggatggctttgccaccagctgattgtaaagccctggggccttgagcaaacataggcagtagccagggagtggttacagccggccttgagcaagacccagtgctgtgccggcttcaggtctgacccagtacaatcatagtggtggtggccacagtggtacatgtgtcactccagctccagcttcaggtggctcagaatggagaaagaaaccctgtttgggagaaagtaaggggtgagaaaagagtctctaccttgtaatccagaggattctgctggattatgtctaaaatcatccaaatacaaataaataaaattagaaatgaaaaaggaagcaatacaactgataccacagaaactgaaaggatcatcagtggctactgtgagcaaatatatggcaatacattggaaaatcaaatttctagacacatacaacctaccaagattgaaccataaataaatccaaaacctcaacagatgaataacaaatattgagatcaaagtcctaacaaaaagtctcctggtaaagaaaagcccaggatctcatagctgaattctagcaaacatttaaagaactaacaccaatcctactcaaaatcaaaaactagagaaggagggaatacttccaaatttactctacaaggccagtattaccctgataccaaaaccagataaagacacatcaaaaaaagaaaactacagaccaatatctctgattaatattgatgtgaaaaccctgaagaaaacactagcaaacaatacattagaaattaaacaatacattagaaagattattcatcagatccaagtgggatttattccagggatgcagggatggttcaacatatgcaaatcgatcaatgtaatacatcatatcaacaaaatgaaagataaaaatgatatgatcctttcaattgatgctgaaaaagcatttgataaagtttaacatcccttcaagataaaaaccctcaaaaaactgggaatagcaggaacatamctcaacataataaaagccatatacaacagacccacatctagtattatattgagtgaggaaaaactaaaagctctaagatctagagcatgacattgatgcccactttcacctctgttattcaacatagtactggaagtcctagctagagcaatcagacaagagaaagaaataaagggcatccaaattggaaaggaagaagtcaaatgattgttatctgcagatgagtttatcttatatttggaaaaacctaaagactccacaagaaagctattagaactgataaattcagtaaagcttcaggatacaaaatcaacaaacaaaaatcagtagcacatctatatgccaacggtgaacaatctgaataagaaatcttaaaagtaacccatttacaatagtcacacataaaattaaatacctaggaattatcaaagaagtgaaagaactctataatgaaaactataaaamtgatgaaatamattgaagaggacatcaaaaaatagaaatattggaaaaatattcaatgttcacagattggaataatcaatattgttaacatgttcatactaaccaaagcaatctrcagattcaatgctatycctatcaaaataccaatgatattctttacagaaatagaaaaaaaaaatcctaaaagaacaccaagaaaaaccaaagctatcctaagcaaaaagagcaaaactagaggaaccaaaacagcatggtactggcataaaaacagacacacagaccaatggaacagaatatagaacccagaaacaaacccacacacctacagtgaactcatttttaacaaaagtgccaagaacatacattagggaaaagacagtctcttcaacaagtgatgctgagaaaactagatctccatattcagaagactgaaactacaccgctatctcttgtcatagacaaaatgaaatcaaaatgaaataaagacttacatctgaaacttcaaactacaaaactactgcaagaaaacatcagggaaactctccaggacattggtctaagtgacatttttttgagcaacaccccacaaacacagacaatcaaaggcaacattgacagatgtgatcacatcaagttaaaaagcttctgtacagcagaggatacaatcaacaaagtgaagagacaacccacagaatggcagaaamtatttgcaaactacttatctgacaagggattaataaccagggtatataaggagctcaagtaactctatgggaaaagaattgaataatctagtcaacaaatgagcaaaaggcttgaatagacatttctcaaaagaagacgtacaaatggcaaacaggcatatgaaaaagtgctcaacattattgatcatcagagaaatgcaaatcaaaactgcgagataccatctcaccccacttgaaatggtttatttccaaaagacaggcaataataggcaaggatatggagaaaagggaaccctcatacactgtttgtggaaatgtaaattagtacagccactatggaaaacagtttggagtttcctcaaaaaactaaaaattgagctaccatataatctagtaatctcactgctggatatgtacccccaaaagaaaggaaatcagtatatcaaagaaatatctgtactcctgtatgttgcagcactgttcacaatagctaagatttggaagcaacctaaatgtccatcaatagatgaaagaataagaaaatgtgtacatatacacaatggagtactrttcagccataaaaagagtaaggtccaggcatttgcaacaacatggaagaaactggagtgaaataagccaggcacagaaagacaaacattgcatgttctcaattatttatgggatctaaaaattaaaacaattgaactcatggacatagagactagaaggatggttaccagaggctggaagggtagtggcaggctggggaagaagttgggatgattaatggagacaataaaaaaaagtagctagaaaaaatgaataagacctagtatttgatagcacaacagggtgactatagtcaataataacttaattgtacatttttaatagaaaagaaaaccaccccatttacaataccatgaaaacaaataagatacttaggaatagattagcaaaagtggataagataaggcttatccactgaaaattacaaaccagtattgaaagaaagtatagaagacctaaatgaatgaaaaaacctcccatgctaatgtattggaagatttaatattgttaatacaatactccccaaaatggtctacaaatgcaacacaatgcctattaaattctagctacctgttttgagaatggtrtagaaattcatatggaaatgcaagggaacaagaataaccaaatcactgttgagaaaggaagaacaaggttggaagactcacaattcctgatctcaaaacttgctacaaagccacattaatcaagacaatgtggtactggcataagggtaaacatataggtaaatgaaatagactggagagtccagtaataaatctcacattcatgggtcattgattttctagaagaatgttgagaccattcaatgtaaaaagaatgattttttcagcactgctgtgacaactggggtattcacctacaaaagaataaagttggacttgtacctcacacaatatacaaaatttaactcaaaatggattatatacttaaatataatagctaaaaatataaaaatctcagagaaaacaggagtaactcttcgtgaccttgatttaggaatgagtcttagatatgacaccaaaaaagcaacaaaattaaaaataaataaattgaacttcatttatctctcttttcacacaaagtattgcaaattttcctggccttctcttttatgggacatttttagatatggaactgtggaaacatggtttcaatgaggaacacatatcaataataagttcacacaatcactaatacaaaggaggaacacatcaataataagttcaaacaatcactaatacaaagatggttaagaatttttatgacagtaccagtcaagactgtcaaggtttggttataaaataaagatagtctcaattccttctaattttattattctcaataagcatagtttgtactccacatacaattaaattagtctcaattttatatcatcctaaaagttcttgtgtagataaatttacatatcatgggaaaagtaatttatcagacggtatgctctaagttttgcctgtgaacccatttagtggtggatttttaaaaaatgtttttcattctataggaaagatttttaaatgggtcaataagtttcttcaccagcacctttgatcaaatcttaagcttaaaagctactcttttataaaacatatgtaatgtttggctccacagagccttaaatacatcagtttcttattcagatacttgtcactttggttcttataaaaaaaaatagaaatgctttaaaaataataacttgtgtcttgcatctataacttgcctgagcaatgatttggtccttagagatacaaatataattcatagtaagaaataatggataaaagtaactcccaaaaatgccaaaataaagtaataataagatggcactttccttgggaaccaagtgtgatatgaatcactaatttattataacataaaaaattttcatgtttttggatatactaaatttggtgcagagttagtgaaacctaacgatgctagcgatctacataastatacacttcatagttaacaaagtatatgtataaacacttggactgtataatctctctgtgaagttatttataattatgtatattatgttaacattacttggagaagcaattctaatttagagcattgwgaaggtccttaatctttcagtttgccaatttgaaccatgaatttcacacagagaggtgggaggatggatctgtaagtaggtatgtagagagatataactcatttgagatttaatatatatacaaaccaatgactgggcctgcagatgatcagattgaaaggacttggaagtatgcatataaagatctgaaacagtcagagaagcatgatcagaaaatacacacaataagacattaagaatatactcatgaggccgggcatggtggctcacgcctgtaatcctaccactttgggaagccaaggtaggaggatcttttgaggtcaggagttcgagaccagcctgaccaacatggtcaaacccagtctctactaaaaatagtaaaaatcagctggccatggtggtgaacacctgtaatctcaatactcaggaggctgaggcaggagaatcgcttgaacctgggaggcggagcctagatggcaccactgcactccagcctgggcaacagagcgagactcagtctcaaaaactcatgaatatgcaatagtttatttgaaatactcatcattttcctatattattggacaaaattgcattcacattttattttttatttgctaagatcacatacattttgcctaatggatacctatattttctctatttctcctggcatttcttttctacccctctctccaaggtacattccaactcttgagcttctaaaattattattactgtgctattttggtgcattctatagttcttatttatgaggcttattggattccttcctagacttcattggaacaactaaaaatctcgggaattctgaccatttacaggatttaaaagtcgactgtaaaattatatcaggcttgggtctcaggtattctctttgtaaatgactctgaaagatctgatcttgaagtaatctagcctcaaaaattcttgctttgataccaactatctttataaagtagagcttttatctggtgtggttggttaatggaaaaaccagttacccaaatcaggaatcatggaaaatgatacttgtatcttttagcattttaacttaaaacaagttaaatattacatcatttgtctgtcttttaatgcaggtatgaggccttttcttgaattaacttgcatttcaatacaagattaaaagtctctttctgagagtagttctgattttaattacatatattctaaagtgtatctatcagcaatactttttctgtttgtatagtttagtcaattattgtattaatatttgtgacctacacttgacctttctttaatttttccaacatataggagttatttgcatttcaggaagactgttagaataaaaactgtaaaagtggatagcaataaccatacttacttacatgtctcccttttagaggggataacatctctaaaataaataggggataattatggaaatgaaattttcccaatgaaagtggaggaagactggaacattttttcactagtgaaatttctggagacttagtaagaacagttaagacattttattatagttttatcagatagagtcatttttggattttcaggtaatattcccaagctttcagagatgctgagaacagaagaagcactaaaactataatttgggggaatattaacatttttccctaaaactaatcaatgggttagaggaaaaaaagctaataaatataggcattttaatgttattgattagtcatcatatgtagatgagtttctttgcaatttttatttgactgtttttctccttaaattgttttgctttactattttgccattgccttactcccagcttagacaccttgcctcatattaatgtatactactatctgttaagtagcaattccacaattaagctcaggtgatttgaaaagtaaactttttattgtgtgtacagtgaacatggagaggttcttttatttttttaatgatactggttcatagaagactagaaattaagtaatatcatatatattaagtattatatgtgtatttaagaattttcaaaattgagcaaattttgaagaaaaaaatatggtttattacttttcttgcccattctaattctaaatctaatattctttctactcaaaatgtttaaatgtaagttccttgctaaccaattctttaatccctggtggacataaatgcttacctgcctttagtatttcaagctaatgcctaatatttcctaaygtctaatgtcaaaaatcaacccaagtaactttctttaactcttaaaaggtttgtcatcaacattacaatcactagatctgattagtctacctggtaactgataatcagtgccagagtctagaacaaacctctcagatcaccttttttctcrgatgttaagatacacttaatacctagcttctgcttttaggctgattgacatacctgattaaatcacatggctctcttttcctttaagaagtggcacgaatccctctgtaccctcatgcatattcatgccrgttgaaaggaaaggtcaccragtctcctcttatctgggtgtattgtcagaatatggaaaaacaggactctgacaggcagaggcccaggttgcttattgcatttaattagagggtcattgctttggacttagaagcaaaagacccaatttatgtcctctccttctactacttagtaaatagtagcttaaacaagtcatagaacttgcactttagtcttctcaactgtaaattatggaaaatgtttcttagctcactgaatggtttgcgaggatgacataatgtaaataaatgaattttatttcatttatttataagtgaattttatttcatttatttataagtgaattttatttcatttatttataagtgaattttatttcatttatttataagtgaattttatttcatttatttataagtgaattttatttcatttatttataagtgaattttatttcatttatttataaatgaattttatttcatttatttataaatgaattttatttcatttatttataagtgaattttatttcatttatttataaatgaatatttacaataataataaagccctattgagtaaaaatatgaaatatttatttcctctttgggacaagttgtaacaatgtcttaacactctttatccatgtttgcctttctccatgtttagggtgcattgttaaaaggcgaaagaggtatcatgctttttctgtgaaggaaaaaaataccagaattttaaaaagtattttattttctgttttaggtatcgacttcaatattataaagattctgaacaacccaagagcatatacgttgcccatatccaaggaagaatcaagattatcaagactagcaacaaaggtttggagtataataattatgaaaaaatttcttacttgtttaatttgcaatatatttgcaattgactgtgctgtacataggcaatgctggttaytacattcttaccatatattttggaaaagaatttaatggtcaaaagagatttgtttgaggtttaatcttaatattaaaaagttttattttcttctgaaaatatccccatttctaatgaaaaatatcataatatttatcttttttcctcacaacatgtcttgtcactgtttctcctttggytgacatacaaaggctccatctggtgtttgcacatgaatatgatcttaataagcagcaaagctgcaggcaaaacttcaaaggagtatcaacaatagttgacctgtccttacttcttaagccatggtcctagaataattgaccacatgtagatactgttactcttgagtcttgaatgcttagtttctcgacattcttgaaggtgccttgcaggtagagatttcatgtactcaccaccatgtgttgccttagccaaaatttgatgagattattgacctgaaattctgaatttgatatcttaatttgttagacaattagattttaagttggttacagtctttattgytaaaattttgtctacatcatcttatccagtctgataagataatttatttaaaattaaaaattatgcctatataaaaaccactttctgaaagtcagtatttatgtttttcccggtatttaataacccaagtttaataaaatatcttcytactttattctgaccttcacagtgaggctaaggatggtttgcaggcacttcagatattaactggtgatgtatagaagtcaattttgaatcaatgacaatgtcactccatttcctttggggcaatattgccagatttagaaatcagagataagtaataaaaattgtatatctggtcttcagcaaacactaaaaatggtctctcgtactttgtttagtagctaacacatgggtttgtaacagattaaacaacctttttcagaggatgctgctaacagatagaaattggaaatacatctttagtagtatagcacattgctgcattttttgccctgtcccattgtactagtcagcttggactgccagaacaaaataccatggactgggtagcttaaacaacagaaattcatttctcatagttctggagtatgggaaatccaagatcaaggagccagccaatttggttttctggtgaaggctctcttcctgccttgcagatggcctcttccttgttgtgtcctcatatggcagagagagtgagctctggtctcttcttcttcttataaagactccaattccatcattgacaacctcatctaaacctaattacgaagagctctgaaatcatattgcttcagcaatggccaaactatttataagtatttcttctggaaggaaaagactctgaaggccataataactgttttcaaatatgtagagagctactgtaggaaagcagaattagagtttttctgtatggctcaaaaaaagtataagttttgccaataaataagtgaaagatacagggatatagatttcagctcaagatgaaaaattttccaggcaccgaagttgtccacatgctaaatgggtgcctgtgggtttctagtccctgaaagtgacactgggtatgagcattggcagaacacatattcaagcctcaaaaatcaatgtttagctttttacttattgtagcaattatcctttaataaattttctgagaaattaggtacccaaatcaccccttggactttctatttcatcctttatgatcattcttaagtttatggagttgcttgattctttgaatttaggctaggttgacttgacaataaaagtcttgtttcatggaatcttaaagtgctctgacaaatttctgctattatctttcatgggatgaatggaaacattagggtttctgctcattggtttggctatttggaatgtccctagcaagaggtttttggtcaacttgcgacattctgctttaaaaaccaaaacaccaggccgggtgcagtggctcacgcctgtaatcccagcactttgggaggccgaggtgggcggatctcgaggtcaggagatcaaaaccatcctggctaacacggtgataccccgtctctactaaaaataaaaaaattagccaggcgtggtggtggacgcctgtagtcccagctactcggaaggctgaggcaggagaatggcgtgaacccgggaggcagagcttgcagtgagccaagatcacgctactgcactccagagcgagactccgtctcaaaaaaataaaaacaaacaaacaaacaaaaacaaaacaaaaacaacaccacgggattgcatttaatacctatttgcctcttacctggctgaagtactcttaaaaaccatgaactcttatagaggaaaaagggctgcaaactgtgattttcttaacttaataactgataactgcagaaaaataacagaaatgtctatttctagaattttagtaagatagaatgtttatcttatagtacccaagaaagaaacaggaagagtgttgcaaaacaactatctagacaggcaaattttttaaaaatctaaactgagcttgggctagttttgcatacattttgaagattgagctatacgtaacccaatgtgaattatcatgggagcttaaaatgaaggagtgatttacatcatagaaaacatgtctgatattgacattaactttttactagcaaagaattgctattgattatgatagtcccattatttgaaatggttctgtagctgctaggaattctgaaacatattttttgcaaaaacctatagaataaaaaagtgaccataagcaaaagaaattcaagagaactttttgtatcaataaaagcaaatgaaaacaaaattttatttcccyacagtaagtggaatcaataaaaaatctttcataatggtattacaaagattgaggaaaacttaaaatattagtagttgctatactgacatttctgccataagaagggaataatagaatcttggagtaattatatttatggttattgtattcttgacatagaatttttggtcaacaggtttttttttttccatcagcacctctatgctatcccactgccttctggcctgttttgttatgataagaagttagttattaatccttttaaagttcccctatatatgagttgcttactcttgcttttgaggtttttctccttgtctttattttaaaaaactttgtctgggatgtgctaggtgtgaatttattctacttagaaattgctgaacttcttggatgtgtttttcataaattttgaaaattgagaccatcatttgttcagatatttttcctatgccttttcctggctttgttcattttcttcatttttttttttttttttctgttcttaagactgaataatgtctattgcctatatgcaagtctgatgataactcaaaagagtagaagagccttactgcacgtacttatagactcatactttggtaaattcctctaattaagaagatgctttgtagaatttcctttattttaatatatcaaatggtaactttatgctaaatatgaagttatattttattcacagttttttagaaacacaaaagtaatcgttgtcttgattattttcttcctcttacagtcgcactatagtagtactggtccagagtttaatcgtgttctcttcaattttggaggtcagagtccattgattttatattatcttaagatgcatgagctggctggtatttccaaagcacctaagaaaaccaagattaaactcactaagatattccaggaaccatatcctttttaaagctttgctttaatataatttctttcaaaaataatattcaaaacatttcactgaatgtctcaattgagaaacaaattgaatgcatgttttatcaatgcttctgtttagtattaatatttacttatgcttaaaactttggtagtatgtttggcttttctttattagatctaatgctatgattttgcatgtaagaaaaataaaacaaacattaacccaaagaacttttaaaactagtatatttggttctctgataaaaggctatctttgcaactttactgttcagtgactggtttcaaacatttgtcagaattatgaggcatgggcttctagccttctccaaagagagttttaggcatgttttagctgtggaattctttgttcaaatgaaaatttatcagaacattttttacacattaaaaaatttatttttatgtgtaaaataaaaaataaattaaaatcggagctctttggttgaagcaggggtagggcccagagttctgttttttacagtcctatcttcagtataacttttcttggcccagtcctcattaaggactcagatgaatcccaaaggaattagaacactagccactaaattagagtgtgggctgcagtggcggcccctgcagcagcggcgatcccagcctagcccggccgcccccgccacggaggcagcgcagtggcgggactcccagcctaccccrcctagtgagccgcgccgcgccaccccacccgccacccascagtccgatggggccgcagcggcggctgtcccctgccacggccgccctgctctggggcttcctgctccagctgacagccgctcaggaagcaatcttgcatgcgtctggaaatggcacatccaaggactactgcatgctttataacccccattggtcagctcttccaagtaccctagaaaatgcaacttccattagtttgatgaatctgacttccgcaccactatgcaacctttctgatgttcctcctgttgacataaagaacaaagcagttgtggtgcaatggggcagctgccattttcttgaaaacaccagaaatgcacagaaaagaggtgctgaagcaatgttggttgtcaataacagtatcctatttcctacctcaggtaacagatctgaatttcctgatgtgaaaatactgattgcatttataagtgacaaagactttatagatatgaagcagactctaggaaataacattactgtgaaaatgtgttctccatcgtggcctaactttgattatactatggtggttatttttgtaattgctgtgttcactgtggcattaggtggatactggagtggactagttgaattggaaaacttgaaagcagtgacaactgaagatagataaatgagggaaaaaaaaggaagaatatctaacttttagtcctcttacagttgtaatatttgtagtcatctactgtgttatgatggtcttactttatttcttccacaaatggttagtttatgttatgatagcaattttctgcatagtatcagcaatgagtctgtacaactctcttgctgcactaattcataagatgccatatggacaatgcacaattgagtgtcgcggcaaaagcatggaagtgagacttatttttctctctggactgtgcatagcaatagctattgtttgggctgtgtttcaaaatgaagacaggtgggcttggattttacaagatatcttggagattgctttctgtctgaatttaattaaaacactgaagttggccagcttcaagtcatgtgtgatacttctaggccttctcctcctctatgatgtattttttgttttcataacaccattcatcacaaagaatggtgagagtatcatggttaaacttgcagctggaccttttgaaaatactgaaacattgccagtagtcatcagagtaccaaagctgatctgtttctcagtaatgagtgtgtgcatcatgcctgtttcaatattgggctttggagacattattgtacaggcctgttgcttgcgtactgtagaagagttgatgtttagactggttcttcgtatatatactatgtttcctctacagttgcctatgctattggcatgatacttacatttgttgttctggtgctgatgaaaaaggggcaacctgctctcctctatttagtaacttgcacacttattattgcctcagttgttgcctggaaatgtaaggaaatgaaaaagttctggaaaggtaacagctatcagatgatggaccatctgtattatgcaaaaaacgaagaaaaccctgtgatgtctggtgaacagattgtccagcaataatattatgtggaactgctataatgtgtcattgattttctacaaatagactttgactttttaaattgatttttgaattgacaatctgaaagtcttcaatgatatgtttgcaaatatatatttttatgagctggtactgacagttacatcataaataattaaaatgctttgcttttaatgttaaagttgtgccttcacattaaataaaaggatatggtctgtgtagtttccaagatgtattacatagagtatatttttcttaaaaaaaaaaatgccttgacccatccctatgcttttttactsaaatgtttcttccaactctaatggtagataaaagtattactatcaaagtgagtttctgaatgggttttactgtaaataattatgcaaattttatctgctttatagaaataactgtttaagaccatgcaagaaggcagttcaacggtgaaaatttggaccttttatcactgcagaggttagaaatataaaattttggaataaatgtaagtgcatatttttgtagtatgtttttttaaaacccaatcctttcataaacttgagaactgaaattacttcagactgcatgtgtattatattaagaacattttttcagctgtagagaaacataatatatagaaataaacacaatcagaaatgacaagacattgccaccaaccccacagaaatacaaaacaacctccaagactactatgaacatctctatgcacacaagctagaaaacctacaagaaatggataaattcctggaacatacaacctactaagattgaactaggaataaactgaatccctgaacagaccaataacaagttctgaaattgtatcagaaataaaaagcctaccaaccagaaaaagcccaggactagatggattcacagctgaattccaccagatatataaagaagagctggtaccattcctactgaaactattccaaaacattgaggaggagggactctttcctaactcattctgaggccagcatcatcctaatatcaaaacctggcatagacacaataaaaaaagaaaacatctggccaatattcttgatgaacatagatgcaaaaattctcaacaaaatactagcgaacggaatccagcagcatgtcaaaaagcaaatccaccatgacaaagtaggctttacctcttggacacaaggttcatgcaacatgtgcaaatcaataaatgtgattcatcacattaaacagaactaaaaacagacccataagattatctcaatacatgcagaataggcttttgatacaattcaacatcccttcatgataaaaaaccctcaacaaactagacattgaaggaacatacttcaaaataataagagccatctatgacaaacccacagcaaacatcatcaaaagctggaagtattcaccttggaaaccagaacaagacaaggatacccactctcaacactcctattcaacatagtattggaagtcctggccagagcaatcagacaagagaaagaagtaaaaggcattcaaataagaacagaggaagttaaactatccttgtttatagacaatatgatcctatatgtagcaaaaccaatmgtctctgcccaaaagctccttaagctgataaacaacttcagcaaagtttcaggatacaaaatcaatgtacaaaaatcaatagcattcccatataccaacaacatccaagctgagaatcaaatcaagtctgcaatcccaatgccaatagccacaaaaagaataaaatacctaggaatacagctaaccatgtaagcaaaagatctctacaacaagaattacaaaacattgctcaaagaaatcagagatgacacaaacaagtggaagaacattcaatgattgtggatataaagaatcaataccatttaaatggccatactgcccaaagcaatttacagattcaatgctattcctatcaaactaccaatgacattcttcacataattaggaaaaactatattaaaatttatgttgaaccaaaaaagagcttgaacagccaagacaatcttaagcaaaaaggacaaagctggaggaatcatgttacccaaattcagattccactacaaggctacagtaaccaaaacagcatggcactgatatgaaagcagacacaaagacgtatggaacagaagagacagctcagaaataatgctgcacacctactaccatctaacctttgacaaagttgacaaaacaagtaatagggaaaggactccctattcaataaatggtgctgggaaactggctagctatatgcagaagattgaaactggaccccttccatacacgacatacaaaaatcaacttaagatggatgaaagacttaagtgtaagacctaaacctattaaaaaaactctggaagataacctaggacataccattctgaacgtagraaatggcaaagatttcatgataaagatgccaaaagcaattgcaagaaaaacaaaaattgacagatgaaacctaattaaactaaagaccttctgcgcagcaaaagacctatcaacagagtaaacagacagcctacagaatgggtagaaatatttgcaaactatgcatgtgacaaagatccaatgtccagaatctataagtgtattagtcggttttcatgctgctataaagaactacctgaacctggataatttatgaagaaaagagatttaactgactcacagttctgcaggtttaacaggaagcatgactggggagsctcaggaaacttacaatcacagcagaatgtgaaggggaagcaagaaccttcttcacgtggtggtaggagagtgaagggggaagtgccatacacttttaagccagcgtatctcatgagaactttcactatcatgaaaacagcaggagggaaatccactcccatgatccaatcacctcccaccaggaccctcccccaacacatggggattacaattcaacatgagatttgggtggggacacagagccaaactatgttaataaggaacttaaatcaacaagcacacagcaaacaaacccattaagaagtgggcaaaagacatgaatgaacacatttcaaaagaagacatacacgtaacccacaagcatatgaaaaaatgctcaacatcactaatcataagagaaatgcaaatcaaagccacgatgagataccatctcagaccagttagaatggctactatggaaaagtcaaaaaataacagattctggagaggttgcagagaaaaggaatgcttatacactgctggtgggaatgtaaattagttcaaccgttgtggaaagcagtttggcaayttctcaaagaactgaaagcagaattaccattcaactcagcaatactattactgagtatatacccaaaggaatataaatctttctaccagaaagatacattcacgcgtatgctcattgcaacactattcacaatagtaaagataaggaattcaacctagatgcccatcaacaggactaggtaaagaaaacgtggtacatatacaccagggaatactgtgcagccataaaaactaacaagatcatgtcctttgcagcaatatgaatggagctggaggccattaacctaagtgaactaatgcagggacagaaaactaaaaccacatgttctcactaataagtaggagctaaacattgagtacatgtggacacaaagaagggaataacagacaccaggacctacttgagggaggagggaaggaggagggtgaggatcaaaaaactgcctactgggtattatgcttattacctgagtggtgaaataatcagtacaacaaatccctgtaacatcaatttacctatgtaacaaacctccacatgtacccctgaacctaaaataaaagttaaaaaaaaatttgcatcataggtaatattttttaagttttttaaattaattttttaattgacaaattataattgtatatatttatggggtaaaaagtgatgttatgatatatgtatacattgtggaatgactgaatcaagctaacatattcatcaccttaaatacttatcatttatccctcctaactgaaactttgtcctctttaaccaaaacctccctattccgcaaccccacaggtaatatttctattgataaggagtgatttgcctaaatcacaagagggaggatgacattattgtctatgtgtaaggattcacatgtaaacactgagtagaytggaggtatgtayggagaggactggagggagtcaatgaaatttcacatcacaggagtgcttatgtcttctgacatgattttaaatgtatatttatttataaggatgataaacttgtttactagttaatgtacactaattcattagcagaacatttaaatataatttttggatgatctttggagttttattaaaaacttgrtcacttgatatttgaattatgagtaaaacaggagaaaaactttgatgtctaggatttagagctgaatgcatggtatatctttaaactgcagaatcttggataaaatatatttagagctgctaattctcccttcatactttgtttttataagccacctcaagccctttatgtgttgagactaagctaaccaaagaatacccaaaaatttaataatttttttaacatgcaaaatgcaaattatttaaaaaattgaaaactcagagccaaaatgttggtgtagtctgtatgggtctcgttaaaaagaaaagtgtataagccatatctgtatttctaacatgagttttaaacattcacattttgttgcagtttagaaaaatctgaactcaatgcagtgtcataatgagtacaatgttactataaacacatgctcccactatcacacatgcatacacagactttttttttttttccttatactataagttttagggtacatgtgcacattgtgcaggttagttacatatgtatacatgtgccatgctggtgcgctgcacccactaacttgtcatccagcattaggtatatctcctgatgctatccctcccccctccccccaccccacaacagtccccagagtgtgatattccccttcctgtgtccatgtgatctcattgttgaattcccacctatgagtgagaatatgcggtgtttggttttttgttcttgcgatagtttactgagaatgatgatttccaatttcatccatgtccatacaaaggacatgaactcataattttttatggctgcgtagtattccatggtgtatatgtgccacattttcttaatccagtctatcatttttggacatttgggttggttccaagtctttgctattgtgaataatgacgcaataaacatacatgtgcatgtgtctttatagcagcatgatttatagtcctttgggtatatacccagtaatgggatggctgggtcaaatggtacttccagttctagatccctgaggaatcgccacactgacttccacaagggttgaactagtttacagtcccaccaacagtgtaaaagtgttcctatttctccacatcctctccagcacctgttgtttcctgactttttaatgattgccattctaactggtgtgagatggtatctcattgtggttttgatttgcatttctctgacggccagtgatgatgagcattttttcatgtgttttttggctgcataaatgtcttcttttgagaagtgtctgttcatgtccttcgcccactatttgatggggttgtttgtttttttcttgtaaatttgtttgagtttattgtagattctggatattagccctttgtcagatgagtaggttgcgaaaattttctcccattctgtaggttgcctgttcactctgatggtagtttcttttgctgtgcagaagctctttagtttaattagatcccatttgtcaattttgtcttttgttgccgttgcttttggtgttttagacatgaagtccttgcccatgcctatgtcctgaatggtaatgcctaggttttcttctagggtttttatggttttaggtctaacgtttaagtctttaatctatcttgaattgatttttgtataaggtgtaaggaagggatcgagtttcagctttatacatatggctagccagttttcccagcaccatttattaaatagggaatcctttccccattgcttgtttttctcaggtttgtcaaagatcagatagttgtagatatgcggcgttatttctgagggctctgttctgttccattgatctatatctctgttttggtaccagtaccatgctgttttggttactgtagccttgtagtatagtttgaagtcaggtagtgtgatgtctccagctttgttcttctggcttaagtttgacttggcgatgcaggctcttttttggttccatatgaactttaaagtagttttttccaattctgtgaagaaagtcattggtagcttgatggggatggcattgaatctgtaaattaccttgggctgtatggccattttcacgatattgattcttcctacccatgagcatggaatgttcttccatttgtttgtatcctcttttatttccttgagcagtggtttgtagttctccttgaagaggtccttcatatcccttgtaagttggattcctaggtattttattctctttgaagcaattgtgaatgggagttcactcatgatttggctctctgtttgtctgttgttggtgtataagaatgcttgtgatttttgtacattgattttgtatcctgagactttgctgaagttgcttatcagcttaaggagattttgggctgagacaatggggttttctacatacacaatcatgtcgtctgcaaacagggacaatttgacttcctcttttcctaattgaataccctttatttccttctcctgcctaattgccctggccagaacttccaacactatgttgaataggagtggtgaggagggcatccctgtcttgtgccacttttcaaagggaatgcttccagtttttgcccattcagtatgatattggctgtgggtttgtcatagatagctcttattattttgaaatacgtcccatcaatacctaatttattgatagcttttagcatgaagggttgttgaattttgtcaaaggctttttctgcatctattgagataatcatgtggtttttgtctttggctctgtttatatgctggattacatttattgatttgtgtatattgaaccagccttgcatcccagggatgaagcccacttgatcatggtggataagctttttgatgggctgctggatttgttttgccagtattttattgaggatttttgcatcaatgttcatcaaggatattggtctaaaattctctttttttgttgtgtctctgcttggctttggtatcagaatgatgctggcctcataaatgagttagggaggattccctctttttctattgattggaatagtttcagaaggaatggtaccagttcctccttgtacctctggtagaattcggctgtgaatccatctggtcctggactctttttggttggtaagctattgattattgccacaatttcagctcctgttattggtctgttcagagattcaacttcttcctggtttagtcttgggagagtgtatgtgtcgaggaatttatccattatttcttctagattttctagtttatttgcatagaggtgtttgtagtattctctgatggtagtttgtatttctgtgggatcggtggtgatatcccctttatcattttttattgcgtctatttgattcttctctctttttttctttattagtcttgctagcggtctatcaattttgttgatcctttcaaaaaaccagctcctggattcactaattttttgaagggttttttgtgtctctatttccttcagttctgctctgattttagttatttcttgccttctgctagcttttgaatgtgtttgctcttgcttttctagttcttttaattgtgatgttagggtgtcaattttggatctttcctgccttctcttgtgggcatttagtgctataaatttccctctacacactgctttgaatgcatcccagagattctggtatgttgtgtctttgttctcgttggtttcaaagagcatctttatttctgccttcatttcgttatgtacccagtagtcattcaggagcaggttgttcagtttccatgtagtggagcggttttgagtgagattcttaatcctgagttctagtttgattgcactgtggtctgagagatagtttgttataatttctgttcttttacatttgctgaggagagctttacttccaagtatgtggtcaattttggaataggtgtggtgtggtgctgaaaaaaatgtatattctgttgatttggggtggagagttctgtagatgtctattaggtccgcttggtgcagagctgagttcaattcctgggtatccttgttgactttctgtctcgttgatctgtctaatgttgacagtggggtgttaaagtctcccattattaatgtgtgggagtctaagtctctttgtaggtcactcaggacttgctttatgaatcttggtgctcctgtattgggtgcatatatatttaggatagttagctcttcttgttgaattgatccctttaccattatgtaatggccttctttgtctcttttgatctttgttggtttaaagtctgttgtatcagagactgggattgcaacccctgcctttttttgttttccattggcttggtagatcttcctccatccttttattttgagcctatgtgtgtctctgcacatgagatgggtttcctgaatacagcacactgatgggtcttgactctttatccaatttgccagtctgtgtcttttaattggagcatttagtccatttacatttaaattgttatgtgtgaatttgatcctgtcattatgatgttagctggttattttgctcgttagttgatgcagtttcttcctagtctcgatggtctttacattttggcatgattttacagcggctggtaccggttgttcctttccatgtttagtgcttccttcaggagctcttgtaaggcaggcctgttggtgagaaaatctctcagcatttgcttgtctgtaaagtattttatttctccttcacttatgaagcttagtttggctggatatgaaattctgggttgaaaattcttttctttaagaatgttgaatattggcccccactctcttctggcttgtagggtttctgccragagatccactgttagtctgatgggcttccctttgagggtgacccgacctttctctctagctgcccttaacattttttccttcatttcaactttggtgaatctgacaattatgtgtcttggagttgctcttctcgaggagtatctttgtggtgttctctgtatttcctgaatctgaacgttggcctgccttgctagattggggaagttctcctggataatatcctgcagagtgttttccaacttggttccattctccccatcactttcaggtacaccagtcagacgtagatttggtcttttcacatagccccatatttcttggaggctttgctcatttctttttattcttttttctctaaacttcccttcttgcttcatttcattcatttcatcttccatcgctgataccctttcttccagttgatcgcatcggctcctgaggcttctgcattcttcacgtagttctcgagccttggttttcagctccattagctcctttaggcagttctctgtattggttattctagttatacatactgctaaatttttttcaaagttttcaacttctttgcctttggtttgaatgtcctcccgtagctcagagtaatttgatagtctgaagccttcttctctgagctcttcaaagtcattctccatccagctttgttcctttgctggtgaggaactgcgttcctttggaggaggagaggcgctctgctttttagagtttccagtttttctgttctgttttttccccatctttgtggttttatctacttttggtctttgatgatggtgatgtacagatgggtttttggtgtggatgtcctttctgtttgttagttttccttctaacagagaggaccctcagctgcaggtctgttggagtaccctgccgtgtgaggtgtcagtgtgcccctgctggggggtgcctcccagttaggctgctcgagggtcaggggtcagggacccacttgaggaggcagtctgcccgttctcagatctccagctgcatgctgggagaaccactgctctcttcaaagctgtcagacagggacatttaagtctgcagaggttactgctgtctttttgtttgtctgtgccctgcccccagaggtggagcctacagaggcaggcaggcctccttgagctgtggtgggctccacccagttcgagcttccygactgttttgtttacctaatcaagcctgggcaatggcgggcgcccctcccccagcccaccttgcagtttgatctcagactgctgtgctagcaatcagcgagactccgygggcgtaggacccttccagccaggtgcgggatataatctsgtggtgcgccgttttttaagccggtcggaaaagtgcagtattcaggtgggagtgacacgattttccaggtgccgtccgtcacccctttctttgactcggaaagggaactccctgaccccttgcgcttcccaagtgaggcaatgcctcgccctgcttcggctcacgcacggtgcgcgcacccactgacctgcgcccactgtctggcactccctagtgagatgaacccggtacctcagatggaaatgcagaaatcacccgtcttctgcgtcgctcacrctgggagctgtagaccggagctgttcctattcggccatcttggctcctccccatacacagactttttaaacatgtaaatagtgttcaggaatgacttgtttaaactcaacaattgaaaataatgtgggatatatcagcatttatcctagcataaaaataaaagctatataaagaaataatctgttgtgaattatctgtgatgtgggagaagaaaattgtcaacagtgaaaaaaagaactctgagactccagaagtgtcaccagctctgtattctttttaccattatttatataatgatttccaataatcttcatcacatgaacacacatttttcccattaaccaatatgtgaataacaacttgtaagttattactaaagtaactatcaattgtatttttcatttcaagtcattgactacttaattaacatatggtaagaacctagtaatgcaatcacatttttaaaaggataaattagctgaaatacaaatatctgaaaaaaacaactaatccagaaccctcccatctagttatttttccaatatatacaaggtaaaatatcttttttccctcagtccttctaaaatactctgggcgaagtgaataggaaagcctatactgcaagaaagtttgttctattatttatgagattttacaaaaaaaaaaaaaaacccttattttccttcaacttcaaaaattgggtgtcaatgtcayaaaattatctgttaatgagatttttcagataatggaaagcacacgttaacttgatgaaatgtgagmtatcttaaaagtatwtttttgttcaaaacatacaggcctaaaaatcctgtggcaacrtagagataaaagacttcctctgccaaaatatgatggagaattgatatttcctctaattgtctgaaaagaggaaaaacagagacacagtgtgatcccaaacaggcgaagggaagaggaagatgaggatcagagaggaaacataaaacccttgattgcactgaagaggactcttcagcagtataggaaaaaattttactctaatttgagcccaaatttgagcctcttctccattcatattaagcagatgaattggactaaataaatttcaagtccctatgattttgttggaggaatttgactttccacrctatcagtggctgaattggcaactatttccatttttccctgaaatgatgacgttctcatttcrtcaactcaccatagaaccaagttcttctgaagctacactaagagaaagaatgcttagacactgtttttgccattgtctgtgcatagtcccctaaaagactaccagaataacctgttgaccaagcaaagctaagtttaatacactgcagtaagacagaacaccagtgtaacagagctttaggaatgtctcaaaaccaagaaattccaggaggatattatggggttttaaggactgaggtaggtgatttttgaggcaggctttgcaagatagggaactgcttgggattgggtagaggttttgatattataattttggattggagggaccagtggaccaagggtcttgaagtgcgctgtgatgascaagctattttaatttgttcactgtcttatctttagggaaaaggatgttctggagcaagtaactaagttatttttgcttactctcaatattgttaaacatagggacaaaaaaattatgcataacacagaataggaaaatacatatggtaggcgctctgaagcctagataaagaaaaataaaagacatccttcagctgctggggtgggatgatactgaaggcagaaggcccttggctaccaataccctacaaggatttcctcagctgctgatagtggacttacttaacataagtcctatggcagattatatttttcaagaggccataacaatattgcccttcccacatgctcctgttacaatgtgacctcaccaattcttccatcaagagatagcatcaatgttcactgcccttgagtttgaacagtcttttgtaattcctcaaccattagagtttgactttgtgacttcgagacaaggtactaaatggctttacagcttctgcctgtttcactcttgcttttgggatgcttgctcttggaactagctgctatatgagtaacaagttcagaccatatggagagtctgtgttccagttagcagtcacagctgaggatgagccacagcaagtatcagccccagacacataaatgaggaaatctttgagatggctccagtcccagtcaacaactgacctcaactacatgatagactccatcttagaacagcctagctgagctcagtcaacacctagaactacagaggtaataatataaattagagttgctttatgcccctaagtttttgaggttgtttgttatatagcaatagacaactaaaccatattcccttcccaagctagcccacatccactgactaaggtgatgtacaaagatctggctccttagccccaattcagaacaattctgaagggtcatctgagcttcagacctccctatagggtcagctgagacatccattgggactgttatcagagttcaacttttctgtctgtccaatgttactttattcccttgaaaccacaggtgttgattccaagagcactcaaataagcctcctacacgctgatctttgtctttaggtccgctttccggaaaacccaacttgggacggtgtatgtgttagtttcagttctcaccattacagagaaaacaatccattgattgctcactacttttcttgtagatctccaatagtcgattagatggaagcagatttttaaaaactatatgggaattacatgttttagaaaaaaatcaacattrtcctatggtaagatctcatttgctgtcatgacttggagttgcatgctccagagtttgggcggaattggccgtatcttctttccgtatcttccaggaaagactttaacatgatctaaaaggagtggctaagtactgaattaaactaacaattccatagctagtagtcatttttgcattgtgtggaagacatttgaaactgaaaatattttatttgtatagaagcacagtgtataatcacacactgtgcctacgcagttcttatttctctactacctgaattcaaataagtgcaaacaaggctaacaaaactaaatgatctacacaatggatagtttatataggaaagaatgagaaaaattcattgattgtagagctcaaaccacagcgtatggttgagtaggttatgcactggccagtgtggtccctctaagaactgtgtagcatatatgtgctcagtggtacatggtggccttaacaacgtgcttttaagggggaatgtgatgcacacggggaaagctgttccatgcagtggattaggatgagcctatcagcagtctctcctttgtacttattcactcccatttatccctaccattggcccagctcactttgtctttggctcgcatatcttagagagcactgttaggaaaggaaaagtcatattcaccttggagcaaataagagagaagcttcctgtgtgttagggattataaaaggcaaatggtgcaggaagacccaccaaggtcaaaaattagattacgggaaaaggcaaatcacagtaccctcataggggttctgaatctgttgttttaagagatgaaccatttgttcttacttttaagctcggttttgtggaactagcccataaaagacagtttaaactatttgctttcccccactattcttataaccttggtagcatctcccagtaaaaacttaacagtgtttaacagatcgagaattagtatgtgatccagtcaatgatacttttacattacccaaaatgcaatatagattatttagagcaaaatttaaagaaatataagtatgtgcacacaggtatttatgatgtttgtcatcattctagacctgcactgtccagtatggtagccactagccatgtgtggtcatttaaattaatgaaattaagtataagtagaaattcagttaatctgatacactcgccacattttaagtgctcattaaccatatgtgactattggacaatgcaaatgtcagacatttccattgtcacagaaagtactatgaacaacactgccttgagtaagaagaaaagtttaatttattttatagaamttgatataccacctagggatatcagaaagccaacacatacagaactgtattttactttgtcacgtgcagccttctaattttagaagtttaggggcttaagagtttacatattaccttattcatccatccaacaaagttaccaacaaagttaatttcccatctaaattcttaaattctccctctcattttgttttggttggattttttttcccctttcattctagtttcgggttattttgtgttttgttttgttttgttttttatcgtttttgcttacagaaaaatactgtcagcatcatgcagagttttggtccatacacatggcttcaacccatagaaaaaagctagtcactctctgtataagcccagaagtcagtagaggtcaatgactattggtaacctacctctgtataaaagtctgcaaytgcctttttacagttagaatatttctgatcagtgaatctctgctcaattccctttgatgctaccatatatcaaatacctaaaataacctaataactcccctacttgactcccagggattccataaaggaaccaatttcagatttttaaaaatacayttaaaayttatgtaatagagaataagcataaaaatattggcaaggcatagtaaaataaaggatatatcaagtatttaaattttgctcttagagaaagacattttattttatttttgatggcttacacttgaagctgttctaaactttgatgagtaaattgctagtttattccttttataaactctgccagttaagagggggaggatgagttttaaaatgaaaatgaaattaataatttttataagaacttgatgaacaaaggagttttgtttcacatgaatgagtatgagtattgtaagtattgtcagccaccttgagccagagacaattaaaaaattgtaatatctggctattttttcttacaaactcagtttaagttctagttagggattttcttttaataaaatatacaagatacagactacaattcaccaacttgttattaacactaactagtgaattaaataaaagacttcagttgctttaggtaatcaggttccagggagtgagttacatcattttttaaagcacaatttgggctttagattataaacatgactcaacggaagaataaggggggaaatatgaattctcattctggagagttagtaataggttggtttgttcaatttaggagaaatgtggtaaagccacatttgtatcaaataagagaagaaaacttcattttcaaatagtttaagtgaatatcaaaggctggggtaaaagccttcttgctataaatattgttggtcaataaaatcaggtggaaaagccaaaccttttgaatgyttggaatttaggactcaaaagcaatacctcaagtaaatattgatcagataataattttgtgttcacccaacctacttctctcytaggaggtgggcagacaaaggagaaagtaaacaaaacctactctattaccatgcatttgccccacaaaaatcacttccagcctctggctccgagtgattctgtgaggtgctccaaaatttcagaaagtagaaacctatattctagtttagagctaaagtcctgtttattgaaggaaaaacgaaattggctccttttggtggttgcctcacatgtgtctgttttctgtttttttagtgatatatcaaatttcaaagtgggagttccagaagttctatctttatatgaaggacttagatattcaattaagtttcaagcagagagctagggaacttgtcttgaacatgtatttgcaaagcaaacccgaagtttgtatatttatttggaatagctttgtggagggtagaggggtgattgaaaataatgggaatagccaaagtccttcaaagcaacccttggagctgtctctgttaaaggacataaattataaaaatgctggaatttctgtaaatcaacaacttgtttatccagccttatcagggagtgayctgtggcccataattaaattttccagataactaaagctgatcatttgaagcactaacactttttatgttagccttttttttttttttttttttttgagacagagttttgctcttgtcacccaggctggagtgcaatggtgcaatctcagctcactgcagcctccacctcccaagatcaaacaattctcctgcctcagcctcccgagtagctgggactacaggcatctgccaccacgcccagctaatttgtatatttttagtagagacggggtttcaccatgttggccaggctggtcttgaactcctgacctcaggtgatccacccaccttagcctcccaaagtgttgagattactggcgtgagccaccatgcctggccaatgttatccattttaatggaagttttcattgaaggttatcaatacttctctgacttctttaacaaagtagcaaaaactaattaactttatgataataactaagcttctcaggatgaaatctataactcaactgcacctagataccaataagaatactcgttcagtatgcaaagaacagtaaacatttactgtttgttttaccaaatacctgttacataccagcactgatactagtatgagggtgctaagcaatctaatagcaaagacagggaaatagggtcatcaataatctgtcctatacatagaatgctatagtagaaaggagaagcaccttcatctacttttaaacaaccctgcactaaaagcatagatcactaagctgttacagtctttattcctaaattttatagttcttctgtctcctacttcaaaaatgttgtcacttcttattcttactaatttctyaagggcaaaacaccatgtctctacttatttttgtgtctccatgcctaatacaagtcctggcaattttgttgaattattttacttgaataagtgttaatgttttcaatagcccttccctcaatttcctgagtatactacaaaactgctgataatgatgtattaaatagtgaaacttactagaactgcartcctattttacatataattctaggccatttagaatctgggtaagattccaacaatgatgttatttcctatagagtaagtcacatgtgcttataaccttttaaaaaatgtttttgatacatggatgttgggtaaactacaaatctaacattaaaataktttacttataggcaaaggtaaacattaaacagaatataactgctctaagatcagtttaggccacatgctaataagcttatttcaagaatgtagtttttaggattaagaactaagtgcattctagtgtataaagtaggagattctggccacagcttgctgcctagcttccttttacttgttatacaattagcattatgtgtataatgggcactttcgccttaagcctgagatgctcagaaacaactctgaggataatccaaagactatctctaagggatacaagatagacagcaaagcctcctgaagcttcattctgttatcaccgaggtccaggtctgttctgcccatgcacagtgaatcaatcactgtgacacaggttttgcaaaagagaaaagatttattggcaaagctgccaagcaaggaggcaggagaacagctctcacatctacttcccctaaaataaggcttagggatatttttgggttagggaaatgggggtggccttaggtgtggggaaaggtgattggcaatggggaaaatgaagtaacaggttcattctgtgcaagcatagtcaggcttcatagcattttgtaggacatatgtatagaaaatcgtgttagcacaacctgagggtagagtttttggccctccatggtcaaaaggccatttgttgcgcacttgcgcaggcccagctcaagggctggtggtctcaaccagtttgaattggacaggagctggcccaagtttctgaaaaacaacggaagtgttgttttggtgaactatggatggtatctatcaagcagccagtaaaggttaagtttcgtgttcagcagcatggctttcagcttcatggaaaaaggaaaaaaaaaaaaaaataacaaaagcaagtgaccaaaagcaagcagggcaggcagacctgatcaaattaacctcttggtttcaattctaggacaatacttttggcagataagtacgaaatttgcccctgggccattcttttcctgagtctctcacacacactcaatctctcaaaggcaaggtacttcacttctagaagcttcagtttcttcatttctaatctaattaaattggatcctacaatttccaaaaccctttgtttctctaatattctgtgattataaagggagatgaaagaccccagagtcctgagttgagaaggtcttagtttgttacatcccaaccactgttgtgaagtcccagaaaaggactattttatttgtccccaagtgaatcttccattcagtggcttaccatatagcagtgcatgggaatataaagtatgaggccaattcagatggtggaattgaaaaacatgttgccacattcatccccaaggagtagaatataaccattgttcataatgtatatggtctaagtattctgttttatctaattcggaaaaaatttatagttataagtgtctaaaaagaataaaagttaagatattcattaacacacttcaacagaaatctactgaaaaccatcaccactgagttgtacaagaaaatgctaagatttcagtcaacaccaacatcatgcagcccagcacttcattatacagcacaaatgtacaaccatgaccaaattttacaattagaatgactttatgaggaacgtatgtctacccagttcatttcaataaagtcatatgttcaaaattaataatttataagaaataaaacataattcttgatttcaataccaatagtatataataaatgtacaagtcaaagaaaatccaaaatttgttcaaagtgacaaatacatcacctccctcacaaataatcatggaaatgatactcaagagagcacaataactttgtagaagaataaaatctttgaagttctaacaggcactctgaggaagaaattaaatagtagcaggtaatagctgtatgcaaataaagtttaagcagctcaacaccatttatactttagaaaaagtgtatcattggttgtattaatcattctacaagaagaataatattcaattttctgcagcttttactcagaaaagattttagatgttcagtcacttgatgtagcaggagggagtaagacgggcattaaaagtaacttgatatcttcaagtttcagtcatttcaggaagattgctgaaccttttatttgaaggctgccagactccttcacagtctgtgacagccaaagtggggaaaaaagctaaagatggaaacctggcataactgagattgcagacttcttgtttatgtaatgagcaggaccaccacctctattttcaattatgtgtattgctccaagtccaagctaagcaagaccagggctatctttccttcgaattcagagggatttcagataaaagagttacagtcctccctcgctaggctcttgtggggaaagtgtcatattggaacacacaattggggatgagaggagaaactagtgatttcacataaagaaacacaataaagttagtaccatgctatattaccagagaaatagagcaccttaggtatgtacattcagtgtaaccttttgcaaacattaaaataattattataaaacttgaatgcataaattatgatagtatgttgggtaaagaaagcaaccataccattataacaatattgtaaaatatgtatttgtatgtaacagatgaaaagacacagaaaaatgaaaataatttttattttttggagaatgggattatgataattttctttcttttgattacattaatgcttctataatattctttgtacaatcatatttttaagtcatgctgaaacattcatcaatatgagatttcataaggtttagttttcgctgcttcaattatttaaaatgaggcttccactactttccttttagatttgaggactaatgtgttaatgttgaatgtttattaaatgataaaaaatattactatgcagaatgaaatctcaaagccaaaatttgaaagtaacctggattcagcctaaggatgttttatttttaaataataccatgcagaattaattcatatcagcaaaactgtagttcatatggacacttattccagcaatatcatgtaggagattcctgagtgcagggtaatttgtgtagtatgatcagatctcatggatatcatgtgatgcctgaagacaatgctgtctttcagactacaggttgccagaacaataagttgaaagcaggaaattccagtggataaattggccattcagttagttactgtttgaatacaacctacatcactattacatttctctcctggagtaaaatgagttgccctcaggaacacaatggaaacaaatctcatcccaaaatgaggccttaactgggaagaaacttcctgggatggcctctgccaggcaacaaataaaatcgtattgggtagagctattttcatgtaagtgaaaatacagtcactcttccatcttgctcaacagccttaaacacaggcactagagtgtgttgaaagtcaacacaaagaaactcctaaatcaattcaggaaatgaagtaagagatacacatcttaggaaatcaatcagagcttctggaattcaaaaactcaactgaaattttcaaaacacatttgaaagttttatcaatagactgttccaagcagaagaaaaaacctcagagcttgaagaccagtctttcaaaataaccaagtctgacaaaaaattaaaaaaagaattaagaaaaataaacaaaatctttgagaaatatgggattatgtaaagtgaccaaacctataaattattggcattcctgagagaggagaaaaagtatacaacacagaaaacatatttgaaggaataattcaaaaagtgtccctaatcttgttatcttgttagagaggtagacaaccagattcaagaaattcagagaacacctgtgagatactatacaaaatgaacatcaccaaggcatatactcaccagactttccaaggtcagtgctaaagaaaaaatcttaaaagcagctagagaaaaaggccagataaagggaacacyttcaggctacagcagacttctcagcaaaaaccttataagccaggagagattgggggcctattttcagcattcttaaagaaaagaaattctaaccaagaatttaatatcccaccaaactaagcttcataagcaaggagaaataaaatcttccagacacgcaagcactaagggaattcattgccactagacctgtctcataagagatctttaagggagttctaaaagggaagacaaaggaggataccttctaccacagaaacacccttgaatatatagccacagatactataaaccaatgacacaatagaaactacaaagcaaccagctaacaacttcacgatagcaccaaagcctcacatattaattataaccttgaatgtaaacagtctaaatgctccattgaaaaggcacagagttgcaagttggataaaagaacaagatcagtccatctgctgtcttcaagagaccctttttacaagtaacaacacccacccctaggctcaaattaaaggactggagaaagttctatcacataaatggaaaacaaaaaagagcaggagtcactattcttataccagataaaacagactttaaaccaacaacagtcaaaaaaagacaaagggtattacataatgataaaaagttcaattcaaccaggaaacttaactatcctaaatatatatgcacccagcattggatcacccagattcataaaacaactacttttacacatacaaaaagaaatagtcacacaataatgggacggggaacttcaacaccgtactgacaacataatgcagatcatcgaggcagaacccaacaaaaaaactcaggacttgatttagacacttaaccaataggacataagagatacctacaaaatacttcacccatcaaccacagaaaatacattgctatcatctgcacacagaacatgctctaatattaaccacatgctcggccataaagcagttttgataaattcaaaaaaaccaaactcttatcaaccatactcttggaataaaaataggtatcaataccaaaaagatttcccaaaaccacacaattgaatgaaaatcaaacaaattgcccctgcctgactgtaaacaatgaaattaaggcagaaaggaaaaaaatatttaaaagaaatgaaaacagaaccagaacataccaaaatctctgggatgcagcaaaaaccatgttaagacaaaagtttatagcactaatgcttacctcaaaaagttagaaagatctcagccagacacagtggctcaagcctgtaatcccagtactttgggagattgaagtaagcaaatcagttgagctcaagagtttgagaccagcctgggcaacatggtgaaacctcatctctactaaaaatacaaaaattaggcatggtggcacacacctgtaatcacaggtacatctaacccaggaggtgcaagatctctacaaagaaaactagaaaattctgtggaaagaaatcataggtgacacaaacaaatgaaaaaacatcctatgctcatgggttggaagaatcaatattgttaaacttgccatactacccaaagcaatttacagattcaatgctatttctatccaattaccaatgtaatttttcacagaattagaaaaaaactattctaaaaccaaaacagcccaaatagccaaaaaaaatcctaagcaaaaagaacaaagctgaaggcatcatattacccaacttcaaactatactacaaggctacagtaacccaaacagcatggtactggtacaacaacagacacatagactgatgaaacagaatagagaactcagaaataaagccacacacctataactatgtgatctccaaaaaagtcaacaaaaacaagcaatggggaaaggacttcctactcaataaatggtactgggatagctggccagccatatgccaaagattggaactggaccctttcctttcatcatatacaaaaattaactcaaaatggattaaatatttaaatgtaagactttacactataagaatcctagaagaaaacctagaaaacaccattctgtacattggcattgagaaataatctgtgactaagtccccaaaaacaaatgcaacaaaaacaaaaattgacaagtgggacctaattaaactaaagagcttctgcacagcaatataaaacatcaacgtagtcaataaacaatctacagaatgggagaaaatattcacaaactatgcatccaacaaagttcttatatccagaatctgtaaggaacttaaagaactgaacaagcaaataataaatagccccattaaaaagtgggcaaggactttgctggcaagatggcctaataggaaaagcgctggtctgcagcttccagcaagattgacacagaagacaggtgacttctgcatttccaactgaggtacctggttcatctcattgggactggttggacagtgggtgcagcccaaggagggcgaggcaaagcgggggggggagggggggggcggggcactgcctcacccaggaagcacaaggggccggggaactccctctcccacccaagggaagccattagggactgtaccgtgtactccagcccagatactgcgcttttcccatggtcttcgcaacctgcagaccaggaatcccctctggagcctataccaccagggccctgggtttccagcacaaaactgggcggctgtttgggtagacaccaagctagccacaggagttttctttcataccccagtggcacctggaacaccagtgagacagaacagttcactcccctggaaagggggcagaagccagggagccaagtggtctggctcagcgggtcccacccccactgagcccagcaagttaagatccactggcttgaaattctcgtgccagcacagcagtctgagctcaacctgggaccctcaagcttggtggggggaggggtgtccaccattgctgaggcttgagtaggcagttttaccckcacagtgtaaacaaagcctccaggaagttcgaactgggtggagcccaccgcagctcagcaaggccgctgctgcctctctagattcattcctctacgggcagggcatctctgaaaaaaaggcaccagccccaatcagggacttatagataaaacccccacctacctgggacagagcacgtggggcaaggggcggttgtaggcacagcttcagcaaacttaaacgtccatacttggcagctctaaagacagcagcggatctcccagcacagcgttagagctctgataagggacagcctaccttctcaagtgggtccctgacacctgggtatcctgactgggaggcacctcccagtaggggccaacagacacctcctacaggagagctctggctggcatctggcgggtgcccctctgggacgaagcttccagaggaaggaacaggcagcaatctttactgttgtgcagcctctgccagtgatacccaggcaaacagggtctggggcggacctacagcagacctgcagcagaggggcctgactgttagaaggaaaactaacaaacagaaaggaataatatcaacatcaacaaaaaggatgtccactcagagaccccatccaaaggtcaccaacttcaaaggccaaaggtacataaatccatgaagatggggagaaaccagcgcaaaaagactgaaaattccaaaaaccagaatgcctcttctctgccaaagaatcacaactccttgccagcaagggaacaaaactggacagagaataagtttgacaaactgacagaagtaggcttcagaaggtgggtaataacaaactcctgcgagctaaaggagttatgttctgacccaatgcaagcaagctaagaaccttgaaaaaaggttagatgaattgctaactaggataaccagtttagagaagaacataagtgacctgacggagctgaaaaacacagcatgagaacttcgtgaagcatacacaagtatcaatagctgaattgatcaagcggtagaaaggatatcagagactgaaaatcaactcaatgaagtaaagcaagaagacaagattagagaaaaaaagaatgaaaagaaacgaacaaagcctccaacaaatatgggactatgtgaaaagaccaaatctacaattgattggtgtacctgaaagtgatggagagtatggaaccaagttggaaaacactcttcaggatattatccaggagaacttccccaacctagcaaggcaggccaacattcaaattcaggaaatacagagaacaccacaaagatactcctcaaaaagagcaaccccaagacacataattgtcagattcaccaaggttgaaatgaaggaaaaaatgttaagggcagccagagagaaaggttgggttacccacaaagggaagcccaccagactaacagcggatctctctgcagaaaccctacaaaccagaagagattgggagccaatattcaacattcttaaagaaaagaattttcaacccagaatttcatatccagccaaactaagcttcataagtgaaggagaaataaaatctttacagacaaggaaatgctgagagattttgtcaccaccaggcctgccctccaagagctgaaagaagcactaaacatggaaaggaacaaccggtaccaggcactgcaaaaacataccaaattrtaaagaccatcaatgctataaagaaactacataattaacgggcaaaacaaccagatagcatcataatggcaggatccagttcacacataacaatattaaccttaaatgtaaatgggctaaatgcccccaattaaaagacacaacaatggaagacaatgtggcaattcctcaaggctctagaatgagaaataccatttgacccagcaatcccattactgggtatatacacaaaggattataaatcattctactataaagacacatgcacacgtatgtttattgcggcagtgttcacaatagcgaagacttggaaccaacccaaatgtccatcagtgatagactggataaagaaaatgtggcacatacacaccatggaatactatgcagccataaaaaacattgcagggacatggatgaagctggaaaccatcattctcagcaaactaacacaagaacagaaaaccaaacattgcatgttctcactcataagtgggaattgaacaatgagaacacatggattcagggacaggaacatcagggggcctgttgagggggtggggctgtgggagggatagcattaggagaaatacctaatgtagatgacaggttgatgagtgcagcaaaccaccatggcacatgtatacctatgtaacaaacctgcatgttctgcacatgtatcccagaacttaaagtataatactaaaaaaaaaaaaaaaaaaaaaaaaaaaagtgggtaaatgatatgaacagacatttttcaaacgaagacatgcaagtgtccaacaaacatatgcaaaaatgcttagcatcactcgtcagcagagaaatgcaaacgaaaaccacaatgagatatcatctcactccagtcaggatgactattattaaaaagtcaaaaaacaatagatgctgatggggctgcagagaaaaggaaagcttatacattgttggtgggaacgtaaattagttcagccactgtcaaaagtagttgagatttctcaaagaacttaaaacagaactaccgttcaacccagcagtcccattactgggtatatactcaaaagaaaaataaattattccaccaaaaagacatatgtactcatatgttcattgcagcactattcacaatagcaaagacatggaatcaacgtagatccccatcaacagcagactggataaagaaaatgtggtacatatacaccatggaattctacatagtcataaataaaggacaaactcatgtcctttgcagcaacatgaatgcagatggaggccattatcctaagtaaataacaccaaataccacatgttctaactgtaagtgggagctaaatattgggtactcatggacataaacgtgtcaacaatagacactgcatactgtaagagaagggaagggaggggagcaagtgttgaaaaactatctatcatgttctgtgctcactacctggatgacaggatcattcagaccccaaacctcaatatcgtgaaatatacccatgtatcaaacctgcccatgtaacccctggatctaaaataaaagttgaaattattttttagaaagtacttaccaagggaaaaataaataaattatttaaataaattgaataaaatacttagtgaaaaataaataaaatgagcatcaggaacagccttgaaatggaaaataaagttttctaaaaatgggcaaactatattcagagaaaggtaatactgaagtttgtttcacaatgggagtggggctgtaagaggacagttcatcccctatatcttagtgatggcagaggtttaagagctcctagtgtaacactgaggctaaggtcttcatttaacacaagctgaggagctgtctccttgctaatattggccaatactggccaattgccacttcaaagggaagtgtctgttttgccagatcaggcatgggttaaggccaaggttaggacatatccacagactgcaccagaaacagacaggacagaggaatccagcttcattagcaacatacttggacattctgattaccacctttcttctgggaagatggcagaagccaggctaactgaggcagccacgcatgctgccagttgcccccaaagcctcttagaattaaagagtctttaaggttctcagtatatgtaaaaatgaaagctgggtgtggtggctcacacctgtaatcccaatactttgggaggccaaggcaggaggawtgctagagcccaggagtttgaagttcaagaccagtctgggcaagatagcgagaaactgtctactactcaggaagctgaggcaggaggattcctttgagcccaggagtttgaggtcacagtgaactatgatcatgttaccacactccagcctgggtgacaaagcaagaccctgtctcgaaaatgaataaataagaaaaaaatgaattttggtacatttttaatattttggtaatttttaatatttacctttaacaagttgctgcttttaaaacaaacacatacaaaaggtaattacaggatttatgaaactattaaatcatagtgccctatggttgctgtggttgagataatgggacacaagtttaaagtgatgttttcttctttcagtcctctgagtgtaactccagacataatattcatgtttatacttgagactcttcattactgaaaagtgaaggtcacacggtccccttggttcctctgtgaagggtactgtttacttcccaaatgttcctaattgaaaatcattccttaataataagcctagcacactacctgctccaacataccgtgatgttataaaggaggcaaaaagacaatttgcaaggaaccaaaaggattttaggatgtaagttgatgctatactattgttaaatataaaataatacttttttagaactggaaacaatcagagaaatcatctaaactaagttccttaatgatgaggagagtcatgtctgagcatcttatagactcagagattcttttcaggtaagtgtcaagggtgtatgttgtaaccatggagccatggcaagtgagagggacagaagaaaggaaggaagctttgcttggtgtgactggaggggtgcaccccaacaggaagaggcaagagctccagggaatggagactggagtatcgtccatttacaaagataagccctggaagactagcagaaaaattccctgcagtggaaggaattccctggagctggggtggcagctgggctggtgtcaagcaaggaaatcaagacagcaaagtccttcctgaaatgttttcttgggggaacatttgcagttattcataataatttataaaataattgcttgtggtcagtcatggtaatcttatgtgctaggaagctaggaatgggttaatgagagaatatccatcaatttttacaagaacaaatgggcagggtccagttcttctatccatgctgtcaaggttactgccttgagatgtcattgcctttaaggggagaaaggatgatcctcccttttgggtgcctcctgctgtccaaggagcacctccaagagaagtaaatggaggaccaccagttatgtcctatccagcgggcagatctaaaagcctgcgcccctgctttccaagggtccccattcccgtctcctgcccacccacccacagacgcatgtgtacgtccacacacacatatcccttagacttcctgtgcttagtgggaaaaacggatggacacctttctagagggcccctgtggtagcagaaggtggagtccagctgtactcaggtgttgtgggtgatacctttggcatatgtttgtaacagggaatgtgctgaggggttctttacactaaatagtgcatagggagggaatgaattggtttgtagagggcttttactaacacgtgtatatcagtaaattgttgatttattctttcccaattagtaatgcctgcattattttaaaatttaacttcaaactttaactttatagggaaaagctcagaattaatgaagaaataaaacttctaaaacagcagcaggaaagaattgacaaggagcttgataggtttgtctcttattcagcttggtagtgcttaagatcatctttaattgaagagatgttacataaaaccacaaaactgcaaaagttttctagttaacagttaatctggagtaacattttaactttctttaatcacaaaatcatctactctgctaattaattgctaaacattatcatcatctatttttactctccagccataggacttaagctcaagtccttttcaaaataaacctataagccttccccatcctatggaagttgtaaactagaaaaacaacagatttagctggtctctattgggctagttttttatttcccttcttcctctatgcatataaacatttttcctcaatgaagcaagaaaaattgggctcatttattttataaattaaactataggaagaacaactataaagtattgagattaacctacttcttccaacacacccgtaagcacgtgcagaataagaagtatcagacaagtycagcccttcagacaagccccctagggagactataactttgtgccagtcacacttcacacttctaaatactattttagaacttataaagctagttttccagtcacatcagaaaatttcaacccactactttaggatcttatctcacttttcaccaaaaactttatcacccagctttctgcttcacaacacctgttacaaggttccattccgggtgactcttacaagtttccaaaaatcaaatccacataggacaagaattttcaccactgagaatatgcagaagaatgtaggacaattctcagagtaactcacaagaagtattcaaatatgattaatgcaatggcacattgttgaaacatacgtatttggatatataaatctcacgtgcttgttaaagttataggcacaatgtatgagcttccatttgtaatcttcaaaagagatactcatgagaggaaaggcaatcagaaagagggaggattagtaatgttataaaacttcatgaatgtactaaaaccactgaactgtacactttaatgggtcaattttatggtatgtaacatatctcaataaaacttaattttttttaaagaggggagattgtaaactaaaagagtgacttggaagagggagtgattttaacttagtgagatgagacagattctaaggatactgtgcagttcaaggagattctaagaaggtgttactgagaaactaagagccagatttgagactggcatggaaggaaaaatgtgaagcctaaagagcaatcagcaaggaggaaactcagcttgagaagacaaaacaagcagagagagaatgagtgagggggcatgtaccagtcacagagcacaaatgcaagagaacctccgactaagtaatcccactctgccttcaggggtgcactagtctaactgctgaagaaaccttggctaggcctggcaaggggttaaatagctcatctaaacttgctgcttcagcaacatgtatttgggatttgcagaaaattttacttcctgccaatttcatggaaaaatagtttttaaatatttcacttgaaaattgccagtgaaattaatagtcttatatatcctttattccgtttctcttcctcatctgtgttacttttactaatgtttctccttctctcaagtttctatccttccttgcctagctaccattgcttctcccctcattcttagatctctggaaaggttcctgctgcttcctgatttcaaccattcaagtccttcataaatatttcttgaatgaatacttggtgacagatatcatgagattcctggatccctgctcacaatgagcttacagtctagtaagcgctgtcacccactggccttttccatctccctctctttctttcctgtgtctctaccttgccagtctcttttactcttctctccccactgtcactccttaaagtctgggctagagccttatgagtggaatcagttaaagcaatactgtgtaaaccatctaactgaagaggatgtgccactgctgggatgagaaccacacagtgggtggaactgaaggcttgagtcacagtgcttgggttcagactgtctccttgctaagtgtatgactgttgtggatgtgtgtgtgtgtgtgtgtgtgtgtktgtggcacgtgtgcacatgcagcgggggtgggtgtctgaacctatctcagcctgtttcctcatttataaaataggataataggagtacctacttcagaagttttaagggtaattgaattaatatatgtaaagtgcttgacgaatgcccagcatattaaattcttaataaatgttggctatttagatggtgtcaatataaggacaattagtttggttactgattttctttattccatgattagactccaagcaaaggctaccaagaaacctcatgaagtgaaacaggactttgagaagttcctacataaactggtaggttttctttctgaaaataattgagaattctctctctagcttcttttatatagactggacaatatttcataagcaatgtatggtggcacacccaaattacagtggcaggagaggatacattcttgttacttaatcatctacatgcacatgtaagaaaatctgttttacatatttagtgacaactcatgttcacattccccatttccagcttctgaccaggaacagtttatgtaactgaaaagctccaaatgcagttagaattacaaactaataatcactgatgtttaaaattgtaagtttttcattaataattcaacaaaatcatattgggtaccaacagctgtgttagatgaatggtccctgccctcaattatcaaggcagaatatgataaggttytaaacaggactcaagtatgagaaagaaagaaaagaaaggagcctgttccatctttctgattttccttgtcatcttctcttttgcttctctttacttatgggcattcktgttaagtctgaagggcttcttctctcccaacagacaagaacatgtagagactagtgtacaatatgtctgaatgctggacaattggaggtcagggatagaggagagccttttactttcagcatgtcaaggcttccattcaaaaatctagagcaatcccattggctgctagtataatgtcaaaaatggatcaaatcaaattcctacatggggcagaaaagtgatagaaagagtgaaacacctgggtgttgtataatatacaaacaggacagtataataagcaaacaggactattcatttttgttgttgttgttgaaacagggtctcactctgtcacctgtctcccaggctggagtgcagtgctgcagtcatggctcactgtagctttgaagtcctcagctcaagtgatcctcctgcctcagcctcctgagtagctgggacagcaggcacatgccaccactcccagctaaggactattttttacatccacacacaaaaatattcattctttctctctttttttttttttttggtctatcttccctactattgatagggacatgggcacagagaaatacctaattagaataggaaaacaacagtgcaagtgtcctgataaagggcaagtgacctcagctggtaagtggtaaatgatttgagtgtcagggaaactattatacaagcagttgtggaaactgtagcgcactggatagccatgcctcatctaacaaggcagctactatctcagccctagttcattgatgccctgtagaaatgttggacaagtagtatcagatattccaccactcagtaatccagattctgagtaatccagaatatctgatactgcttgtacaatctcctgatttggagcccaagtttttagtcattctgtgggccaaactatatacatctgcagaccagatgtggcccatgggctgctgggctataacccctgatctaaatgctgcctggatttgactcttcaaaagctagctccagccagtgtagtcaatcttattcttcactacataccaaagcaaagccttcactctcactgagcctcctacacacaccatgtttgcctatacccataggctttgctcatctgcagtgtgcactccacagcttttaaactctmctcatcttttagggccatgctcaaagtccatttactgcatgatcttttttctaatggccccggccctatcccttccaggtaagtttagcatctctcataatatctagataccacacagtgatagtaagactgaaacatagttctttttatcgagagaaatcaaaacaaatatagaatagatccctcgcttagaatgaccatgtgtgtcccccaaagaagagtgcacattggaaatttttactcaccttttgtgaagaagaaatcacctggtgaaaattgtaaatggaacagcaaaacaatgacaggtgcctttttttttttttttttacactgatccaggtatctttaaagaattatataccaaccacaaatcctttgtggaaaatggcacggtattaaaaaataaaggattataaatttaaataaattcaggtttcagatttttggatttatagaactcaaaattcttttaacaaatttgactcaagctttctcaagcatttacctttctgctaagaatgaaaatgcatcagaagtttatttttaaatagaatattggctttcctagtattctatgtatgactgttatcctttaagaaataaaactagctttgcgcaggcctcccttaaactgaaattctagatggtgatgcccaatctgtgagttaaacattaatgagctaatgaaatcacagaataataagtaattctgatatttttytggataattcatgccataaaaccattgctatctcaattacctgagtatttcagcaaaatactttttggtccaaatcattacataattcagaaagtgcttcctatagtccatccacaagagaaagccagtcatttgccatcaccagccaaacatttctgcccactcttgatatacatacagagatacccatcaataccattacaaatcccagaattcattaagtcttttcatagtcactttcacccacatacctgcatacctgctttacaatggggtgcatatatacaaacaagctttgctagacaagcaaaaaagggatataaggaatgtgtggaatttcttggaagtgcctcttggattagagaggtatttgagaaaaagtagtagaaaaagagtgataagaaagtaattctatgaacaaactgaattatctgaattatcatctagataattctttatttcaatgtgaatagaagagtcttaaagtgttttttatctaagtttttctattaagtaatggagatagctcagggccaaaagaattgaaagtggttatttatatattacatggtttacaaatattcaaatgagtctgaattttcttcctgtatcctccttttgtcaaaaaaaaaaaaaatccttagtctcttgataactggagaaatctcacattcaaattcaattatacaatgtccaagaagatctgtgaaactttaatcatgtattattttcatagcgttccgaagctgaaattgagagagaatgtgtggcatcactatcgtcatcatcatcatcatcaccatcatcaacagacaactacaactttgaggaagaagaatactaagagaaaccagaaatgaactctattcaagaataatgcatacaattcagtggtatcagtttaattgtaacaatatatttaattcaagtccaatccatgtaatcagtattaagagtgtgttttaccattcatctttaaaatcttcaaatcaataaatctcagtaagttattcttaaaagatctgtccaagcatgatcttggctcttaatagtaaaaccatattttaagatggaaaaagaatcattatgaagcatagagagctttcaaccatttctttgaaaatatatcttgatataatagcaaccgttcatcataatacaaaacagaaggaagattaatttactgtggcacagaaagtcctgccaattcctaagtgccctaagtagtttctctcagactttttacattttttcaggcctcaagcaaaaccaaagccccrcctccaggtttggtagcaaacaaactttgcttctccggtgctaagcttccatcactcctctggtaataagctttgtgcacatttgctagaaagctgggcagcttgtccgcaggtaccattgatactgtrcagcctccccatcctgctccagtaagtcgtgacccttgagccccaaacttcctaaaacagtgaggaaaaaaatattagaacctataaatgaaaatacaagggatttgcttggtgtttgtagaacacatagcctatctaagttctaagaagaaaatacatgcggggtttttaggtgtcatcaaacattttaggacattaagacatttatactgtttcagagagtgatttggaattttttcattgtatctaaatctagtccctggttttgactccaagtggtaagtcaacagtactcctcccatttcatgactggcaataacccactgtaatattgattccataaagtagccacttgaagagttgtatagcaagcttacacgtaaatcaggaaggaggcgttaagataaaacaggcaatggtaaaagaaatgtaggcaaccctgaatcagaaggtcactccaaatgaggacaaatcaaaatttaaaatgtacagtcttatacaagttttccccaatggctatttcagctgcattcttaaggccgggctgtttcaaagaagaatcagtcccctagaacagatagcctagttcactgaataaacttatcaacaaaaagcttgttattaaactccaggttgggtcggtggttggttgaatctctaatggaaaattaaccaagcctttccacaaagcagagggcagtccctagaggtccacaccaccttccctgtgccttctggagctagtctgattattggactcagaagttgacatcagatgagatatatctgattgggatgataacaactatataaaggaccacacagctagagttaattttagttactgtaaaccaggcacagtttcaaacctaagatttcaaccaaagtgaaaggccctatcacaatgtacacagatcacttagctttaaaagatgcaatttatcctgacacgaaagttaacatgtacttacaattaattcttcttaataaaattcactccaaattactagtggattaaaggctctatgattaatttagcacaattttgtctctttttttcaatctaaatgagatattttacttcctggacatatcaatagaatactacctctactctagaacatcagaattactgcatgtcagtaattgattttcctgtcagtgattcttctcagttgatttctttttatcatctgctttattatatatattaaaatacgcttttcaaatgaacataggtatttaagaaagaaaaaaaatgcttacaaacaaataaacatcactgatctcctcctatccctttaacattcaatttatggcccagtgactaagcctgaaatcccatcatccaggctaaaaaatttctctgaccttgggatccttggattattctaaatttctaggttggcaaagggcctgtttgcagtttgttggatttaaaaaatggttgtcatgccgggtgcagtggctcacgcctgtaatcccagcactttgggaggccaaggcaggcagatcatgaagtcaggagtttgagaccagcctgaccaacatggtgaaaccccgtctctactaaaaatacaaaaattagccgggtgcacacctgtaatcccagctactcaggaggctgaagcagagaactgcttgaacccaggaggtggaggttgcagtgagccgagattgcaccgctgcactccagcctgcgtgacacagtgagactccatctcaaaaaaaaaaaaaaaaaaaaaaatggttgtcatatgcagtcgtatcaaactcttactgtggaagatgctggggaaaactgaggtgtcactgaagtgtctctggaagaccctaaaatatgggcattaaagccagccatgacatggtctagagaagaatactgtgccttcttacttgattttctaagatctaaaatatgccgttttgctggactcaagttatcaagtctttaagggtcctcaatccaacttctaaaaggcatattttattatactttctcatttgaacagtttttgaaagctgtggtttttcaaaattgaacctaaagcaaacagagtattatttttaatctggctgtaaaacctataggaactgggccagaggtctattttcctgagacttttactagtttccagggagcagaagctggaagtctttgtaggtaaagatatttgctactgagtctccagagctgctctgtcaccaccctgcctgctacagatgaaaatggactgaattgcatcaatcacatggtctgaaatcagggctcaaatttcccaaataaagaatgataagtgctattagaaatagccttctgcccccaagtcagtggcacatctgatcacaagtcagggctgccccagcagctggtcagcagcctgcgcagctgtatacacttataaaggcagaaaggtctgtctgcagtgttccctgctggtacttaataggccctttggcatatgccatagaaattctgagaagaccgaaagttaggagaccgatataccctttaaattaagaaagaaaagtaagtgaaccaagggtgtttagtgaacttttcatgtttgcgcctttttctggaagaacaataaaacattaaaaatatatctcctgagctattgcacatcagagaggcaatacaagaattacaaaaaccaaaaccctaaaatccctcggatcccactttgatgattgtgatgactagattgggaataatgtagaagggtttgttaaagcaacaaaggcagcctctactttataaagcacgatggcaaaggctagggcagatgagggatggagattatgaggaatgttactctttgatccttgtgtattcacagaattaactatccaggcacccaatatagccaaagtcaaatttcctacttttaagtgaactaattcgaccataaagcacttactaagttgcaagatacagagcaatggagagggtggggaggagatccaggagacccaactgcactacacacttgaaaaagagggaaggtaagaaattatgccttgtatttaaattctgtgtcatttctttctaaataagtaaatatatattatacaaatggatatgaaataaattatttcaggaaatctagaatttaggaacaggtcacatccatctctctgaccccagcccagcacaattctagaaattctaggttctaataaatggctgctggactacgatatttcccttaaaatattttaaaaattatatataatataagcagtcagcagtgtatttttttacttgagaagacttctagcttctgctctctgggaaatggcaagagtcacaggtaagggaacttctagcagtttctatgatttttacagccaggttagacaccgtgccttcaaattgctttacagtcaagaaaccacagccttcagtgttcaaatgagaaaggataagaaaatatgcccacatgtctactttagaaatgtaagccacttaaaggccattgaagagcagtgggtttgggtcctgcaaatggcatgtatattcataagtcaaagaggcccaaagagaagtgaacccctaaggggaggtgaaatggctccctccctcttttttttttttttttttttttttgacagggtatgcatgttagcacttaaggtcatggggaaagagcatgcaacaatggatttgcacttcattcttccccattatgaccttgttgaagaatggatgcgagaggctgagcagcctcaccatggaatacattgcagaaagacttctgaggaagacaaagtaaattaacttttgtaatcatagttgatccactaaaatttgtcattcatctcccttaatagcttgggcgataatgcagcaattaatcctctctaacttcaacaagtgtcaaaacaaaaacaaaaggcattaaccattttgtcttaagtaaaacgagggaaccaatagtgaatgagctgtctcacatataactgacttggtttcaaaattgttttgtgttctccagtaaattctacttaaaatttagtcatttctttctgtttacattttgtttggctacaaaagatactttataattcagcaaacattatctttttccttcattatttactttgtttcatataatttaagttctaacattaatttaattttttaaaaaagcctcactctgtaagtatagtttccttcatcctccctgctcctttctttagattctaaactgattttctcttgaagagcaggaaaaggttcaactgaaaaagacagctagcagtggtgctctttcccaaccccccttctctccacttgggtcacaaagttgttctatacattgtcctatatgctaagtaggagatgcctttttaattcagtctagctcagatcactgtaagattttctgcttgtgtatagcaacttaggtattctaggtattcaagccgttaatttactcactcaattagttgtcttttcatacaaatagtttccaagaagcccttcagaaacactaaaggaattttgaagtgccataagtggaccagggagggtgatgtaaagattatttttggcagtgctcctccttgaacccatttcagcttccctcctcctccctcttttggggaaaacaagcaacctgctcaggctgcccagtcttagtcacaccttccctactgatgttaacatttttaatggtggcagggtaattgtggaggtggtggtggtttttaaacaaagcaatactttgctagaggttgtgtctgtggcaccagtggctcacaccaggccttgccaggaccccttccaatatgtccaacaccttctctgcctgacccagtgagacagtcacaaggcttcagaaggaactagggcttacaagtagctccactgttcattcgaacctttccccatgttactacctgctactcttgtaccgtctgtcttccccatcctttatccatcctttatcttattcccactaatttctgcattcttctgaacccctccttcttgcctcattactttccagacatctttttttttttttcttttttttttttttttacctgagatggagtcttgctctgtcccacaggctggagggcagtgttgcgatctcggctcactgcaagctctgcctcccgggttcacgccattctcccgcctcagcctcccgagtagctgggactacaggcgcatgccgccacgctcggctaattttttgtatttttaatagagatggggtttcaccgtgttagccaggatgatctcgatctcctgacctcatgatctgcccgccttggcctcccaaagtgctgggattacaggtgtgagcaattgggcccggcaagagaaagtcacagcttttgaaagtagagaatagactgcaatttcacacggtacaaagatacccatgtgaaaatatgtattgattgaaggagggaaggacataatgcctgcatcaacttaattcccctggggctatcctcctctgaggttgctctgccacttaggacctttcagtaacttgcagccaactgaaacatttgaagaatattatctgctggtcacagtgacagcaaagaaaaaattaattatataagaagctttaaggaccagacaactattctggccaacaagccagaagataatctttcaatatggaaaacttggaccctatatggttatcgaataagtagaaaataactttgatacttagcaattggctttccaaacaaaacaatcatgaaaaagtgatggagctcctgaatttttcacagaactgaatttttctcagaaaataaatacagcaaatgaaaatgaaacactttagctgccattaagaaaggattttccaaaaacaaacaaaatgaaaagataaataaaaggtactcttccaaacccatttaagacatagccataagctttttcactagaaccatattttttaaatgtataggtctgtagactgctagaacagaaaaagccaatggagaacacaaagcgaagcaacagttccagctcacagagctcagaatgaaaagagagtcggaatccaagcttcctcacttccagcccacttttcatcctactctacacattacgttcctgctcaacatgactttgcttaatgttcaaatactggaaactatgacaacaaaggcctccatcataaagcttcaaagctaggagatgaaaataggttacaaacacacacgtacacacacgtatgtatgacccacatttaagtgtaatcacatcttagtataacccaaggggagaggcacgtgtggcaaaatcattggattgggagccaggctttccaatgaactcatatgtgaaacttactcaaattatttcatctcttagtgccttcctggatctctaagaccccttcctgatctaatattttatggtactctaagataactcttacctacagtggtgaagtgtgcttttcaaaaatgtggcttttagaggcacaaggaaagtttctcaggacaaaaacccaggagtcgtcttgatttctctcttatacccacacagcaattatctaagtcttccttgcaggcatatttggcatagaattgcctagcatttccattgccccctttctcttctcaaagccagaagccttccgatggcctacacggcctatatggtgtggctccccacttccttccttacttcatctactacctctccttccttcctggccctctgccatgctgatcctgctgagcctcacacctgacagccaagtatccacctcagggcctatgcatttgctgttctcatttattcacctccttcaggcctctgctcaaagatctcttcgtcagagtgaccttcttcaaccactccacagaaagagtacccacccaaacctgtagtctctattccttctcatttttttccatagcacttatcactaccattcaaattatttttaattgtcatttctctctttccccacgagaatgtaagctccatgaaaacaagtacaggttgaccactctaggaagagaaagtttattagagaattccagga

SEQ ID NO: 94503 - DNA, 32232 bp, Homo sapiens
aggagtggaattctgaagctctggccttgagactcaggcccagggccaattacgtcctactccatcatttccaagacccacaccccctttccaagcccttggagtccttctgattcccccttttcttccttttgtttgagacagagttttgctcttgttgctcaggctggagtgcaatggcatgatcttggctcaccggaacctctgcctcccgggttcaagagattctccttcctcagcctcccgagtagatgggaatacaggcatgcaccaccacgccctgctaattttgtatttttagtagagacggggtttctccatgttggtcaggctggtctcgaactcccaacctcaggtgatccgcccacctcagcctcccaaagtgctgggattacaggtgtgagccaccccacctggcccaattcccccttttcctgcattctccagctcctcctcctcagtactcagtcccaccactttccccactacccagcaccagcatctagactgttctggtctccctgcaccccccacagccaccagagggagcacttttcaaagtacagttgacccatgaacaacacggtttgaactgaacgcgtccacttatatgtggattttcttctgcctctatcagctgtgagacaccaagatcaatccctcctcttcctcctcctctgctttctcaacacgaagatctttatgacgatctcttcacttccacttaatgaatagaaaatatattttttccaccaggcgcggtggctcacgcctgtgattccagctctttgggaggccagggcaggtggatcacgaggtcaagagatggagaccctcctggccaacatggcgaaaccccgtctctactaaaaatacaaaaattagctgggcgtggtggcacgcgactgtagtcccagctactagggaggctgaggcaggagaatcgcctgaacctagaagttagaggttgcagtgagccgagatcacgtcactgcactccagcctggcaacagagcgagactgcgtctcaaaaaaaacaaaaattcttccttatgattatttttatgtatttatttatttaatttatttacttattttgagacggagtcttgctctatcgcccaggagtgtagtggtgcgatgtcggctcacagcaagctctgcctcctgggttcactccattctcctgcctcagcctcctgagtagctgggactacaggcgcctgccactatgcccggctaattttttgtatttttagtagagacggggtttcaccgtgttagccagaatgatctcgatctcctgacctcatgatccgcctgcctctgcctcccaaagtgctgggattacaggcatgagccacagcgcccggcctatttttatttatttttagaaatcattttatctttttttttttgagatggagtctcactttgtcgcccaggctggagtgcagtggcacaatctcggctcactgcaacctccaactcccgggttcaggcgattctcctgcctccgcctcccgagtggctgggattacaggctcccgtcaccacacctggctaatttttgcatttttagtagagacggggtttcaccatgttggccaggctgatctcaacctcctgacctcaagtgatctgcccaccttggcctcccaaagtgctgggattacaggtgtgagccaccgtgcccggccagattattattattttgtagacagtctgtctttcacccagcatggagtgcaatggtgcctcgaactcttggactcaagtgatccttccacttcagcctcccaagtagctgggattacagctgtgtgccactgtgcccagctgagagtaggttttaatctgagcatgggggcagctatgattccccgtagcacctggggtgagaccaggtcctggctccactcaccctgccaggatctcgtggtctgacaccttcacactggacacgccatctctggcctcatccagcgtctgcactggctcaggcctccgtgagcggcaatcccaacagcggatactggaatcaatagagcctgtgaggccagcatgatggtgaggtcaggtttggagggggagggcagcaccctgggcccccgtgcttaggccccagactcaccggacaggataactgtggcctcttcattaaactgcaccgtgttcaccttctgagaaagttattgccactcagaggaggctggactttggaggactgggataaaggcagggttcccagtgtcggttaaagcaagggcgaaggggaggtgaaaggttttgggggaacagcaaggacaggggttggtgactgcctagcctggcatgcggagtgggggatcgtcatctggggaagggatccttacggtgtaatgggggtggccgtgtcaccacctatgcgctaatacgggtcccctccactcaaatgagggtctccaggctttcactcacccctgcgtggccccggaatttgcgcacgacctgccctgatgccacatcccacagaaccaccgccttgtccccgccgccggagcagagactactgttgtcaaaggagctggagtaaaggaggaggaggatcagcatcgacctcggatcccagcctcagcgctcccatcccagcctggtccccggctcacccggccgcatccagcacctcgtagccgtggccgctgtacgtccgcagcagcgtcccccgaagcgggttccacagcttcagcgtcttgtcactgccgcacgtcaggcagtaattgccatccactggggaacaccaggcgggggttactgggccgtcgatctcaggaggcgggaggaggacccggaatgaagacgaaggcgctcaccattaaatcgtacggctcgcactgccccctgcccgcagtccagcgtcttcaaccgtttctgcggcagctctggaggccgcggctttggctcagggaaagccatgctcccaggactccttccttgcagccttaaatcggtctgtacggaaaattccgcgccttagaaacccacgcttgggtgtaaccttattattgttcttcctgacctacttcctgtttatcacttccgggttcatcattttggcatttcggtgatcgggttggaactattgaagcccgctttcaggttcttttccccattttccctttgaaaggaagacttctggcttctcctaaatctccgttctctgggtaaggggagtccaagcctctgtcatgaggaacggaaatgcgagggcctcgggtgttactctaaaatccgccctcagcttgcacgccggaagctgcgattcctgcagcggaagaggcgtgatctggccttcgactcgctatgtccactaacaatatgtcggacccacggaggccgaacaaagtgctgaggtgaggaccccagcgtcgtgggcacgggttcgggttgtgggtgtggatcggggccctgggaagcgcctgtctatcccgggggcaggacctgagcgcccctgaccctcgagcctgtcgcaggtacaagcccccgccgagcgaatgtaacccggccttggacgacccgacgccggactacatgaacctgctgggcatgatcttcagcatgtgcggcctcatgcttaaggtgggcggggttgagcttctatgggtgtagttggacctgagaacgaggcccgggggcgggtttggaatgaagcggggtgtcttgtcattgctgatggggcgggacctgagatcggccgggagtggggctgcgatgacgctgggccgagaaagccccagtctttggtgaagtcaaggattcgagtcaggttggggatgtggcagattggtctgcgagtggggccaggctttgaagcaacttggagaggagttgtggaaaaagggcagggtcttaagcatgtgggatgtcagagtctctcttggtcctgagagacgcaggccagacagtaggactagaaaccacgtatctagagtatgccatgagcaggtgggactgaggaattccgggtggggcaaggtcccagctgcatcagatggaatcagtgggcatgatctggtgtctggaaaggtggcttcggggactcattgttgtgcctttcactaacctgcccacccacttacctttccctagctgaagtggtgtgcttgggtcgctgtctactgctccttcatcagctttgccaactctcggagctcggaggacacgaagcaaatgatgagtagcttcatgtgagacttgccctacagaacaagtgactcttgagtaaggggtggggggaccccagcctggccatcctagactgacacctctctcctgtctcaggctgtccatctctgccgtggtgatgtcctatctgcagaatcctcagcccatgacgcccccatggtgataccagcctagaagggtcacattttggaccctgtctatccactaggcctgggctttggctgctaaacctgctgccttcagctgccatcctggacttccctgaatgaggccgtctcggtgcccccagctggatagagggaacctggccctttcctagggaacaccctaggcttacccctcctgcctcccttcccctgcctgctgctgggggagatgctgtccatgtttctaggggtattcatttgctttctcgttgaaacctgttgttaataaagtttttcactctggctgtcagcctcttctgttcagtggggtgttcctcctacctggcgggaagggctctagccccataggcctggtgtggggccccagtctggaggcttctggctgttcatttgcttacttcataaaccttgtgtcttaagtcaggtgctagggacaagacagtgacttctgccctctggcaactcaccagatggccctgctgacctagataatctaggctttggtttccttttttttttttcctttttaagaaagaaaatggtcttgatctgtcatgcaggctgagtgcagtggcacaatctatgttcactgcagcctcaaactcctgggctcaagcaatcctcccacctcagcctgccacgtaactgggaccacaaatgcgtgctaccatgcccagttaattcttgttttttttgagacagagttttgctcttgttgcccaggctggagggcaatggcatgatcttgatctcggctcactgcaacctccgcctcccaggttcaagtgattctcctgcctcagtctcccaagtagctgggattacaggcatgtgccaccatgcccagctaatttttgtatttttacattttgtgtaaaattacaaattttgtgttttcaaacccgtctctacaaaacaacccatgttgcccaggctggtctcaaactcccaggcccaagtgattcaccagcctggccctcccaaagtgctgggattgcaggcttgagccactgcgcctgccctgggctttgttttcttatcagagaatgaactggtaggaattgggaaaggcatgaaagactcggggtccttccccacttgtcagaccctcttttctctccggaacacccagggatccttctcaaccaggctggatcccatccctggtactccaggggtatttacccaacgtcccaatccccacagtataggactcttcatcagatcctcctcttaggcaagctaggtccttccaggaccctagcgctgaaggtccatgggacggacaccctggattcccatggacacactacaccggctaggaaaacccggcccccttaggaaaagcacttctgctcctaccggcattaagaggcattccgtcttggaattccggcattaagaggcattccgtcttcatagcccgtgagacgccagtgtcacctttagcccaaccagtgccctgagggtggcattttcctaccttcctgtaacgacccccgggattgcccagggctacagcctctctcccgtgagcctccagaccgcgccctggccccgccccccaccccgattggcccggccgggtctgggggcggggcgtttgcccggcctttccagggccggggaaccccaggaggaagctgctgagccatgggcgcctacgcgcgggcttcgggggtctgcgctcgcggctgcctggactcagcaggcccctggaccatgtcccgcgccctgcggccaccgctcccgcctctctgctttttccttttgttgctggcggctgccggtgctcgggccgggggatacgaggtgagtggggcctccgagctgaaacgtacaggaggcagagtgaaacccagaatacagtctagaggtgtgggtgggtctgtcctgtgggtgtctagtgaatggctgatgatatgacagtgtggtctgagtgcgtgctttgtgtcattgcgaggtctggctgtgcgcatctgagtataggactgtgtctgattgtacctgcctccgtgtctccgggatgcttgcctagactttgtctgcacttaactgtgggattggaggggcaggasgtggcagggggtgagcagtgtatgtgtggggggaggtgctggctgagagctgggactctggagtctgcctgaaattccagcctagctcttacacttcctgagtgtgtgacgttgggcaagtcacctatcctctctaagcctcagtgccttcatctggaaactggggataacatcaccccmcctcccacggtggccgtctgctgtcggcaaatgctgaacaaacatcagctacttctattattattttcccggagtgtgaatgagagctgccctgtggggttgtgcaaagtggagttgtatctatgagcacaactatgtatgtgtgtgtcctgcctgggagggcctggcctcctctgcacataggcgagatcaggcctctctgagtcactcacctctagatcaagacttactctgcagcccccgacctcgggggttattgacaaggtatgtgtgtttggggtccctgtgcagacatgccccacagtgcagccgaacatgctgaacgtgcacctgctgcctcacacacwtgatgacgtgggctggctcaaaaccgtggaccagtacttttatggaagtgagtagaggatggggactggtccctgggatccccatggtccctgtaatccctctgggtcctggacattagggtggggccagtgctaccctaatatccagggtttgggctcctctgtctaggaataacccccttggctctgctgttccctgagagccttatccctgttatccacagtcaagaatgacatccagcacgccggtgtgcagtacatcctggactcggtcatctctgccttgctggcagatcccacccgtcgcttcatttacgtggagattgccttcttctcccgttggtggcaccagcagacaaatgccacacaggaagtcgtgcgagaccttgtgcgccagggtgagcctaccccaaggaagtgaaaagaggaagcccagcccagcttctgcttctgcatctctggtttctgagatttgtcatgccacgtgcaagctgtataacatgcgtgtcgctccgcctgcctggactctccatttggagacstcctatacatcccacaaagccccacctgctgtgcatcctctgggaagcctgccatgcagggggcctctttcccatatctgggaactatggcctgggagcgacccctcttgtccttccgccagaaatgtgtacacaggcaggctttcacattcccagtatcacccaccctactcccactcctggctctgaccgctgaccctgaccttgcctgtcctggcacagggcgcytggagttcgccartggtggctgggtgatgaacgatgaggcagccacccactacggtgccatcgtggaccagatgacacttgggctgcgctttctggaggacacatttggcaatgatgggcgaccccgtgtggcytggcacattgaccccttcggccactctcgggagcaggcctcgctgtttgcgcaggtgcgacccgggacctctcttgggcccacttcttcactcactctggctcctccctcgcccagtcaaaccccgccctctccctgcaatctcacaaggaccaggcccaggcctaggcctgttgaagccctgccccttgagtgagccgtaaagccagtggcttttgagctctggcctcagccggctatgcccagcccaggctgacccagctccggctggctccgccctctcccctaataggcccctcttggtgttctggccccacccactagctcgggtcctggctcctccctaaaccgggtggcaagtggatgcctaggctgccttaaaaacaggttcattacctgtgctcagaccccatccatcctcaggctgtggaagggggaacctcattcctggagtcaggcctgctctgcgctttgacagtgctggggaggtgaacctgggttctgatgttggacccgccctctccctgctagcccaaggtggtgagttctgaaacttccccaagcttggaaataagctggaggcctctctgtttcagccctacgtgtttttgtttttgttttttgagacagggtcttgctgtcatccaggctggagtgcagtggtgcaatcctaactcactatagcctcaatctcccggattcaagcgattctcctgtctcagcccccctagtagatgagactacaagagcgcaccactacgcctggctaatttttaaattttttgtagacagtctgcccgtgttgtgcaggctggtctcaaaaactcctgggtttaagtgatcctcctgttttggcctcccagaaggctgggatcataggcaagagccaccacatcgacctagcactgctttttaacctgtgctctgacctgcccctcccaagcagaggggagtttggtggtgagagggctgggcactaattcacactgccttttcctccctcatccccagatgggcttcgacggcttcttctttgggcgccttgattatcaagataagtgggtacggatgcagaagctggagatggagcaggtgtggcgggccagcaccagcctgaagcccccracykcggacctcttcactggtagggggcttggtgagggcagggccagccatggtgccacacactcagaagggccctgggcttgatatctgctctgttgtcactgtcctggaattcctatagtctgggaacaaaggccctgcatttccttttgcattgggacacaaattctgaagcccatcctgggtgggacatggccggctttgaaaccagggaaggtctgggtgatgggccaccccttgaacttggtgtgacctgcaggtgtgcttcccaatggttacaacccgccaaggaatctgtgctgggatgtgctgtgtgtcgatcagccgstggtggaggaccctcgcagccccgagtacaacgccaaggagctggtcgattacttcctaaatgtggccactgcccaggtaaccctggtgtccagaaccttcgagtccggtatatacaatacaatgagctctttccatggtacaggcatcccctaacacgttctccttatttttaatttttttgagacagtcttactctgtcacccaggctggagtgcagtggtgcgatctcggctcamtgcaacctctgcctcctgggttcaaacaagcacatccagctaatttttgtatttttgcactggggtctcatcatgttgtccaggctggtctcaaactcctgagctcaagtgatctgcttgcctcggcctcccaaagtgccgggattacaggcatgagccaccgcacctggcctctatttttaacatttttatttatttattattatttttttttttttgagacagagtcttgctctgtcacccaggctggagtgcagtggcatgatctcagctcactgcaacctccgcctcccgggttcaagcgattctcctgcctcagcctcctaagaagctgggattagaggcacctgccaccacacccagctaatttttgtatttttagtagacagggtttcgtcatgttgaccaggctggtcttgacctcaggtgatctgcccgcctcaacctcccaaagtgctgggattacaggtgtgggccactgtgcctagtctatttttaacatttttattgagaattccttttttattttttttagactcactctgtcgcccaggctggagtgcagtggcacgatctcggctcactgcaacctccacctactgggtccaagcgattcttctgcctcagcctcccgagtagctgggattacaggtgcccaccaccatgctcggctaagttttatgtctttttagtagaaagggggtttcaccatattggccaggctggtctcgaactcctaaccttttgacccacagccttggcctctcaaagtgctgggattacaggcgtgagccaccgcgtccagcctttaacatttttataattaaaaaacattattttttcacagagataaggtctcaccatgtggcccaggctggtctcaaactcctgaactcaagtgatcctcctgccttggcctcccaaagtgctaggatataggtgtgagccaccatgcctggcataacacgttctccttaaaaaaatttttttttcctttctttaaaaattgatggctgggcatggtggctcacgcctataatcccagcattttgagaggccgagatgggcagatcatctgaagtcaggagttcaagaccagcatagccaaaatgacgaaaccctgtctctactaaaaatacaaaaattagtcgggtgtggtggcgcacgcctgtaatcccagctacttgggaggctaaggcaagagagtcgcttgaacctggcaggtggaggttgcagtgagccgagatcacgtcacttcactctagcttgggcagcagagtgaaactctgtctcaaaaaaaaaattgttttagattaattttttttttttttcttgagacagggtcttgctgtgtggcccaggttggtcttaaactcctagactcaagcgatcctcctgcctcagtctcctgagtagctgggattacaggtgtgagcccctgtaatcatgttctcatgccccctggaggaagatgctattctattcaccatcacaatgtccccctcctggatttatgtgcattcctcattagaagagatagcataggctgggcaagagatagcatggcatggtgactggatgccctcttctaggtagtgggtccaagagaactgctcaacaactggtggctacttttatctgtgtccccacgctcccaagtgccatacccccacccatgcctgtgcacccaacatccttgaccccatrtacatcaaaacacagctatacacagggatggcccaggatcctctggcttcaggactcccctcttgcctgcagggccggtattaycgcaccaaccacaytgtgatgaccatgggctcggacttccaatatgagaatgccaacatgtggttcaagaaccttgacaagctcatccrgctggtaaatgcgcaggtcagtgcgcctaccctgtggtacccttgtgcacatgtgcgcttgcatccgggggccttgggttatgtgcatagctctcagtgctgtctttgttttctattgttctattgtggtcattctataacaaatgaccacacacttagcagctcaaaacaacagaaatacattgtcttacagttctgtaggtaagaagtccagcatgaggccgggcgcaatggctcatgcctgtaatcccagcatgttgggaggctgagccgggcagatcacgaggtcaggaattcgagaccagcctgaccaacatggtgaaacgctgtctctactaaaaatacagaaattagctgggtgtgatggtgcgtgcctgtaatcccagctactcgggagcctgaggcaggggaatctcttgaatccgggaggcggaggttgcagtgagcggagattgtaccactgcactccagcctgggccacagagaaagactctgtctcaaaaaaaaaaaaaaaaaaaaaaaatccagcctgagtctcaccaggctataatcaaggtgttggcaaggctgtgttccttctgcagtctctaggagagaatataatttccttgctttttccaacatctagaagttacccacattcaaaatctattcttggctccatcttcaaagccagccacatagcatctttctgaccctgtttctgtaatcacatccctttctctcattctcacctcttctgcctctctcttccacattttatttatttacttagagacggagtctcgctctgtcgcccaggctggagtgcagtggcgtgctctcsgctcactgcaacctccgcctcctgggttcaagtgattcttctgyctcagcctcccaagtagctgggactacagtcgcgtgccaccacgcccagctaatttttgtatttttagtagacagggtttcaccatgttggccaggatggtctcgatttcttgacctcgtgatccaccccgctcggcctcccaaggtgctgggattacagatgtgagccactgtgtggcctaatttccctactttaagtttggctgatgaacaacctcaattccatctgcaaccttaattccccttttgccatgtaatctaatgtggtaataggttctggggatcaggacatggacacttttgggcagttatcattttacccaacacagatgtgttagtgttttgcactaagtggcctgtggctgtggctgtgtgcacagtcagtcactctcatcagcacagaaacttgtctcccctctcccatctcagacaccccttcccatcaatcttgtcctcactacggtgcaatctccattcccaccttccactcgctcccagcactgctatttcaccaaaacagctcttttatgtcatttatttttatttattttttctttttaaaattttatttatttatttatttattgagacaagagtcttgctttgtcacccaggctggagtgcagtggcatgatcttgcctcatggcaacctctgcctcctgggttctagtgattctcctgcctcagcctcccaagtagctgggactacaggcatgtgccaccaaccctggctaatttttgtatttttagtagaggcagggtttcactatgttggccaggctggtctcaaaactcctgacctcaggtgatccgtccgccttggcctcccaaagtgttgggattgtaatctgaggtgggcggatcacttgaagacaggagttggagaccagcctggccaacatggtgaaaccttgtctctactaaaaatactacaaattaggtgggcgtgatggcactcatctgtaagaccagctactcggcaggctgaggcaggagaatcgctggaacctgggaggcggagtttgcagccagctgagatcgtgccactgcactccagcttgggcgacagagtcagactcagtctcaaaaaaaaaaaaaaaaaaaaaagtttattgagcacctactgtgtacattgggggacacagctcgtgcaaaacaaacatccttttcctcacataggtcactttcttgttcctccaccttgctcaggtgaaagtgcacctccattcattataaaaattgtgtctaggccgggcacggtggctcatgcctgtaatcccagcactttgggaggctgaggcgggyggatcatgaggtcaggagatcgagaccatcctggctaacayggkgaaactccgtctctactaaaaaatgcaaaaaattagccgggtgtggtggcgggcacctgtagtcccaggtactcatgaggctgaggctggagaatggcgtgaacccaagaggtggagcttgcagtgagctgagattgagccactgcactacagcctgggcaacaaagtaagactccgtcccaaaaaaaaaaagttgtgttttttgktaacaatctgacagtcctgcaaaacgattattcctgccctataatgtcacacttagtttttccacaaaagtttttaataataaagttggaattattgtaaaagtttagtaaaatttcaggtttattcttgcatctctgaaatccttttaaaaaaggctagtggtcatgtttgacttcagccaaaattcattttcacacccaaccattggcttgcacgccaaatatgtatttagagaaactgaacctatgggatgcatgaatgtgcacacrtgtgtggaagtgtgggcccccaggaaggtgcggactcccgagggctcactccgtcgcctcccccagcagcaggcaaaaggaagcagtgtccatgttctctactccacccccgcttgttacctctgggagctgaacaaggccaacctcacctggtatttggggaaactggggagcttgggggggttggcatgcmccgtgggtcatgaccctgccctcaatgcccctgccgctgtaggtcagtgaaacatgacgacttcttcccttacgcggatggcccccaccagttctggaccggttacttttccagtcggccggccctcaaacgctacgagcgcctcagctacaacttcctgcaggtgggtaggagccgggctagagggggcatgcagccccgaggcccgacaggctgggcgccccaacatacccctctgcctccaggtgtgcarccagctggaggcgctggtgggcctggcggccaacgtgggaccctatggctccggagacagtgcacccctcagtaagtgtcgggcccaagaggggaagaggtttgcggctgaagttggaaaccacccctaggccgcccccctcgagtttcttctttttttttttttttttttttttttttgagacggagtctcgatttgtctcccaggctggagtgcagtggtgcgatctcggctcactgcaagctccacctcccgtgttcacgccattctcctgactcagcctcccgagtagctgggactacaggcgcccaccaccacgcccggctaattttttgtatttttagtagagacggggtttcaccatgttagccaggatggtctcgatctgacctcgtgatccgcccgcctcggtctctcaaagtgctgggattacaggcgtgagccaccgcccccagccgtcctcgagttccttcttaaagcctctaagaatcctgcccgccagcaccggacctttcgcttccccttggggtctcagctgagtcccacagaacctcaccggactcattgtctatgagcagatgaggcgatggctgtgctccagcatcacgacgccgtcagcggcacctcccgccagcacgtggccaacgactacgcgcgccagcttgcggcaggctgggggccttgcgaggtgcgcggggcgagacttgggagacacgggggtggagacaggaaggggcggggccagggcctgggaaaggggacagagacaggtgtgaggcgtagccgagagccctgtggcggggctacaagggctcgtgggggcggggcttgtaggaggcggggaaagatacaggaacggggcggggctttggaggggggaaggaggcggggcgtgggcaagaggaggcggagacagctatggggtatagtcaagggcagcagggtggggctagaaggggttttggggcgactcttgagggaggcgggacagagaccggaacggggcggggcctgaggagaggggaggagtcaggcctsgcgtcctgaacccaccggtccctttgcgctcttccgcaggttcttctgagcaacgcgctgkcgcggctcagaggcttcaaagatcacttcaccttttgccaacagctaaacatcagcatctgcccgctcagccagacggcggcgcgcgtgagccgggacgggaggggtggatctagggcagatgggctttagagggggtagttggaaaatgtttttggaggactatacaggagtgaaattacgtgggctgcgaagctgggtcagcagagagaacaacgcatctcgagggggcttggccttaagtgccrtgaccacactaggaccagccaggggtgtttctgtgcaaagtgggtgggtttggagaaggcctgctgtgacccatgccctctctgacccccgcctccccagttccaggtcatcgtttataatcccctggggcggaaggtgaattggatggtacggctgccggtcagcgaaggcgttttcgttgtgaaggaccccaatggcaggacagtgcccagcgatgtgagcccaaacaacgaatattcccccgctgggactcctcccccagtgggcatttcctcatcgcccccatggatatcgcctgcttccatgaatacctcccactcatgcatatctcttcccccctcttgtatcttctccctctgccccttaatatcagtctccccttgggaacatatgcctcctgtgagtggtcctcccttttttttttttttttgagacggagtctcgctctgtcacccaggctggaktgcagtggcgcgatcttggctcacttcaaactccgcctgctggattataggcatgagccaccgtgcctggctggtcctccattttaataccccgcttccccaggaaaatttattgctgtttatggacatctccttcattccagaaaacgtcctcccccaaacctcttcctcccccgagaacctgcctcaagggtttcttcccctacttcctccttcactcccccgactccatggtctctccaccctcccggtgggtttttttttccacctggtgaatcttctctgcaatcatttccttggaatctgactgtccccccaccacacacacctccatttcctttccccatctcaggactcttttccttccttgagttttttgtctccatgcatgtatagctttccatgggtactcttgactcagtttccctcctcctttatccgaggtggtaatatttcccagctcagacagccaggcgcaccctccgkagctgctgttctcagcctcactgcccgccctgggcttcagcacctattcagtagcccaggtgcctcgctggaagccccaggcccgcgcaccacagcccatccccagaagatcctggtcccctgctttaaccatcgaaaatgaggtgagaccccatttcaatcccctttcctgctcctgtgacaaatttgaagtgtcatggtgagctgtgtggactctgggtcagcaggtccctaggcttatgacctcctgtcacaactcccctcattgtgtgtccttgagyaagtgacctttgtctgagcctcagtgtcctttcctgggactgttatgaggacccagtgtgatcatgggtgacacttgacagacatgtcagagttggtggcaggtggtggttcgcaattttggcagggacgtttcagggaaggtgttcccgataaaggtgacatttaagatatgacctgagggagggagccgtgtggctatttgaaggaagagagatccaggtggggagagaataacaggcataaaagccttcgagcaggagagtgtgcagaattccaggagccacaaggagctcagtgtggctgaagcagggtgaacgggtgacaggtcagaccttgagggccttgaggaccaacaggaagactttggcttttgccagtcattgttgctcatgtgtctactcctagctctttgggaggctgaagcgggaggatcacttgagcccaggagttgtcccagctaattgggaggcccagatgggaggtttgtttgagctggggagttcgaggttgcagtgagtaatgattgtcccactgtactccatcctggcaacagagtgaaaccctgtctgaaaagaataataataaaataggccaggcatcgtggattatacctgtaattctagcaccacgggaggctgaggtgggtggatctactgagctcaggagtttgagaccagcttgggcaacatggtgaaacccagtctctacaaaaaattagctgggggtggtggtacacgtctgtaatcccagctacttgggggctgaggaaggaggattgcttgagcccaggtggcagaggttgcagtgagccgagatcatgccactgcactccagcctgggtgacaaagtgagaccctgtctcaataaaataaaataaaagaagttctgcagtaggactgttcatgttaggaagaaaacatctttttcatatttttattaaaataaaataaaagaagttaaaacgttcccacaggcccctaaaagtcttgtgagttctggcattgtggttcacacatcagatgcccaagttggccctggtccgcagcagaggagggctttgatgggacttagggtatcacaggtgtgctctggctgttgtggggaacagactgtaggcagccagtgtggaagtgcagggacctggaaggggttgactgcactggccctggaaggccctggtaagaggtggtgaggttgaaaataaggttgggggggccgggcgcggtggctcacacctgtaatcccagcactttgggaggccgaggcaggcagatcacgaggtcaggagatggagaccatcctggctaacacggtgaaaccctgactctacaaaaatacaaaaaatttagccaggcgtggtggcgagcatctgtagtcccagttactcgggaggctgaggcaggagaatggcgtgaacccggaaggcggagcttgcagtgacctgagatggcgccactgcattccagcctgggcaacagagtgagactccgtctcaaaaaaaaaaaaaagaaaaaaaaagaaaaaaagaaaaggctggggtgggcacgttggctcatgcctgtaatcccaggactttgggaggctgaggctggcaggtcacctgaggtcaggagtttgagaccagcctggccaacacagtgaaacctcgtctgtaccaaaaatacaaaaattaactgggcgtggtggtacacacttgtagtcctagctactcgggagggagaggcaggagaatcacttgaacccaggaggtggaggttgcagtgagccgagatcatgccactgcactccagcctgggggacagagcaagactctgtctcaaaagcaaacaaaaaaaaaatcaggttgaatggctgggtgtggtggactgcttgagcccaggagttggacactagccccaggcaacatagtgggacccccatctctagaaaacaaatttaaatttttttttttttaatttagtagagatggagtttcactatgttggccaggctggtatcaaactcctcacctcaggttatccacccaacttggtctcccaaagttctgggattacaggtgtgagccaccacgctcggccctaaaaaaattttaaattgagaaaaaaaggggccaggcgtgttggctcatgcctgtaatcccagcactttgggaggctgaggggggggtggatcatgaggtcaggagttcgagaccagcatggccaatattgtgaaaccctgtctctaataaaaatacaaaaattagccaggtgtggtggcatgtgcctgtagtcccagctattcaggaggctgagtcaggagaattgcttgaacccgggaggcggaggttgcagtgagccaagatcacgccactttctgcactccagcctgggcgatagagcgagactcagtctcaaaaaaaaaaaaaaaacaaaaaacccaggccaggtgcagtggctcacgcctgtaatcccagccctttgggaggccaaggcgggtggattacctgaggtcaggagttggagaccagcctgaccaacatggcgaaaccccgtctctactaaaaatacaaaaattagccaggcatggtggcatgtgcctgtaatcccagctacccaggaggctgaggcaggagaattgctggaacccaggggcagaggctgtagtgagcagagattgcgcccctgcactccagcctgggcgacacagcaagtttctgtctcaaaaaaaaaaaataaaaatccggctgggcacagtggcttatgtctgtaatcctagtactttgggaggccaaggtgagcagatcacttgagttcaggggtttgagaccagcctggccaacatggtgaaaccctgtctctactaaaaatatgaaaattagccaggcggggtggtgggcacctgtaatcccagctacttggatagctgaggcacgagaatcacttgaacccgggaggkggggggtgcagtgagccaagattgcaccactgtactctagcctgggctacagagtgagactcagtctcaaaaaaaaaaaaagaaaaaagaaaaattaaaaaaagaaaacacacacacatacacacacaaacccatctgtggacccttttctgcccagcacatccgggcaacgtttgatcctgacacagggctgttgatggagattatgaacatgaatcagcaactcctgctgcctgttcgcyagaccttcttctggtaagggaagatcaccaggcctgagggtggggtggtggtgctcggcatggagctagggccccttacctgactctcacctgccccaactccaggtacaaygccagtataggtgacaacgaaagtgaccaggcctcaggtgcctacatcttcagacccaaccaacagaaaccgctgcctgtgagccgctgggctcagatccacctggtgaaggtcagggactaggaatgatgagtgggcagttgggaatggggaagttatggagcccaagagggtggtgggccatgtgtagagtgagggtaggggaggatttacttttccttcagatcagtgggctaagacccacagatcagcgggggaaatatttgagggtccttccatagaattgatattcatrgctggtcgtatgagagtctccccataggacacatcatacaaagccattcacatctgctgtggacgtttacatacttagttttggaaattgggggtggggcattcccacttggcccatgaatcaggagagccaaatatcactgcttgaagaattcaccaaagtctgtagtaagaggagcttctatctggagtgaatatttgagagtccacccttggattgattgggtttgggtgagtctcagggtgaatgcctatgggtgcatctggctaggaacagtggtttcccagggcctctcattgatgtttgactttcatagatgacaaaactcacatttgtccacattcaagagcctcgcgtttcatgtgagtccctttgagatgaatgtctgcatatctgtatatagttttgcctgttctaacagagttacccaaattaactgtgactagaataagatagaagattattttcttctaacaaaaagtctggctgttagtccagagaaagtggggtggttccataatcacccaggacctcctcttctatcttgttgctctgccttccccaatattcagtttccacctcatggtccaagatagctgctgaagctccagccgccacatttgtgtttgagtcagtagcagagggacaggggcaaggaacattgttgacaccacttggatcactttctatggggcaaactggtcactcagctactgatagcctcagggaagactggacaatatagtctttatcccaggtagccatgtgccaagctagaatcctattctatggggcaatggtgaacaggaggcgtttatgccacgctcaagagtgatgtggtaagccagatgcagtggctcatgcctgtaatcacagcactttgggagactgaagcaggaggatcgctgagcataggagttcaagaccaggtgggagcatttgctgattaggtgcctacatagtgatgccctgtctcaaaaaaaaaaaaaaaaaaagaggccgggtgcagtggctcacgcctgtaatcccagcactttgcgaggcagaggcaggcagatcatctgaggtcaggagttcaagacaagtctggccaacatggatagaaaccccgtctctactaaaaatacaaaaattagccaggggtggtggcaggtacctgcaatccctctactcgggaggctgaggcaggagaattgcttgaacccaggaggcggaggttgcagtgaggcaagattgtgccactgcactccatcctgggcaacaagagcaaaactctgtctcaaaaaaaaaaaaagaaaaaagaattatgtgggccaggcgcggtggctcacgcctgtaatcccagcactttgggaggccgaggcgggctgatcacgaggtcaggagatcgagaccatccttgctaacacggtgaaaccccatctctactaaaaatacaaaaaattagccgggtgtggtggcgggtgcctgtagtcccagctactcgggaggctgaggcaggagaatggtgtgaacccgggaggcggagcttgcagtgagccgagatcgcgccactgcactcccgcctgggcaaaagagcgagactccgtctcaaaaaaaaaaaaaaaaaagaattatgtggcggtgactgaaggttgaccttgatgtaggccttaatggggtttatggccagggttgggggacatttgtaggactcacctctgctcaggtacagactgacatccacctcacccgtgtgcccgcagacacccttggtgcaggaggtgcaccagaacttctcagcttggtgttcccaggtggttcgcctgtacccaggacagcggcacctggagctagagtggtcggtggggccgatacctgtggggtgagtggcacaggctgggagaggggtgtggaagcaagggcagaggggtttatccaaggctcacaaccttgccatcccattgggtacagcgacacctgggggaaggaggtcatcagccgttttgacacaccgctggagacaaagggacgcttctacacagacagcaatggcygggagatcctggagaggaggtggggggtgactgagagcactgagggggtggtctgtggtgtgttggggcccaggggtggtgrgggaaatttgctgattacatgagtgtgggagacagaggacgaagggagagtgaagggcgggggagccaggcagggtgcagtggctcacgcctgtaatcccagcactttgggaagccgaggcgggcagatcacaaggtcaggagatcgagactgtcctrgctaacatggtgaaaccccgtctctactaaaaatacaaaaaaatcagccgggtgtggtggcgggcacctgtagtcccagctactcgggaggctgaggcaggagaatggcgtgaagccgggaggcggagcttgcagtgagccgagatcgcgccactgcactccagcctgggtgacagagcgagactccatctcaaaaaaaaaaaaaaaaaaaaagagtkggggagccagatcccaagcctgatcagctcacccccaaccccaggcgggattatygacccacctggaaactgaaccagacggagccygtggcaggaaactactatccagtcaacacccggatttacatcacggtagctctcccccatcctgcacctccccacctcgatagaaagggaatcaccccttatctgcagcatctcaaagctgcctggggttggggttgactgccctctactttcacccttcaactcccaggatggaaacatgcagctgactgtgctgactgaccgctcccaggggggcagcagcctgagagatggctcgcyggagctcatggtgagtgggtcagagccccatccgagccagggtcctcccaacctggacccctgctggaccttgaaggctgtttctggcccagttctctgctttcaggccccactaagctgaggactccgtttctttcttttcttctctttgagacggagttttgctcttgttgtccaagctggagtgcaatagtactatctcagctcactgcaacctctgcctcctgggttcaagtgattgtcctgcctcagccttccgagtagctgggcttacaggcacacaccatcacgcccggctaattttggtatttttagtagagatggggtttcaccatgttggccaggctggtctcgaactccttacctcaggtgatccactcacctcggcctcccaaagtgctgggattacaggcgtgaaccaccgctcccggccaaggactccatttctgtgtgtggcttttcctctccgtttttctccatctcctgcccaggctccctccacgctctggcgtgccatatccaggcccccctgttaggcatttacctccttccggcctggttcccatgcctacttggatcctgcctctgctggggttgccctaccagaccctcaccttcatcctcatccgttcctcccaccctttaatttcttttgacattcccacacgcccttacccagtttctggcccaaggacacccacaaacccacgactctcaccccctcctggccactctccccccaggtgcaccgaaggctgctgaaggacgatggacgcggagtatcggagccactaatggagaacgggtcgggggcgtgggtgcgagggcgccacctggtgctgctggacacagcccaggctgcagccgcsggacaccggctcctggcggagcaggaggtcctggcccctcaggtggtgctggccccgggtggcggcgccgcctacaatctcggggctcctccgcgcacgcaggtgaggggcagcggggtaggcagagaggaccggattgaagtctaccagggagccgggtttgggtgcggagtttcctaggctcagcggggatccatttggccataattagccccaaaccctcgggccaaccccatcccctgggcagtccccgcccagtgccagcccagtcccaacccccctggactgtgtagaggcacagccctagctcatgcccctaaaccaccaactcacctccggccccgcccatttcactttagccccgcccyctcaccgcccccaggctctgtcctgcctcacccagccccgcggcttcagccccgccgtaactcccaaagtctcaggtcacatcagttctgctccatcgggactcgaaccctaagcttgggaccgacccatctccccattggctcagtcctccctgtcacggccctggccgctcctctcggctgagccttgcccctctccggcgaaaccccgcccctacaacctagccctgcctcctgacctggctcggccccgcccttctccatccaggccccgcccctctccaactcagccccgccctctctcccgcagttctcagggctgcgcagggacctgccgccctcggtgcacctgctcacgctggccagctggggccccgaaatggtgctgctgcgcttggagcaccagtttgccgtaggagaggattccggacgtaacctgagcgcccccgttaccttgaacttgagggtgagaagggcaaaattgagaaggagatcggagagaggcaagagagagggagagaagagaaacctggctttgccccaactcatctgggcccatccccttccccgcaggacctgttctccaccttcaccatcacccgcctgcaggagaccacgctggtggccaaccagctccgcgaggcagcctccaggctcaagtggacaacaaacacaggtggggccctggtcaggggtagggaaggggtggagtcttacctggggccggcaggtgggggcaatgtgtgaggcatgggatgttggccaggacccaaaaaggtcatgagggtatggggcagagtccagacccaggttaggggcttaaaggatctgaaatgggtgcggcaaaccaggaatgggtcttgaggtttgtgggtgctgtttagtcccaagaacaagatttgaaaatccccatccatgtctagttctgggagggtgttcatcacccctggggtcagattgagggtacgaggacagtggccagattgagggtatgaggacattggacctgggggtggtattcgggrccggggaagcaggttaagagtctgggattgaggccctggagacagattcggggatatgcagctgtgtctagacccaggggaggaagcatcgtggggtgagtcagaggaagtctgcacctcctcactcctccttccccctgcacctctccaggccccacaccccaccaaactccgtaccagctggacccggccaacatcacgctggaacccatggaaatccgcactttcctggcctcagttcaatggaaggaggtggatggttaggtctgctgggatgggccctccaagcccaagcctcctgctccgggggcagaccagactctgactctcctcttggggctgctgccattaaaacgctactactaagastcaggtcgctctgtgactgagtgtgggttttttttgtctgttatttgcttgttagagggggacagaatttatgacccagagccgggtgtggtggcttgctcctgtaatcctaacaactctggaggctgaggagagagaatcacttgagcccaggagatctagactagcctgggccacaaaatgaggccctgtatgtacaaaaaatttaaaaaattagctgggtgaagtgtctgtattcccaactacttgggagaattgcttgagcacaggaggtcaaggctgcagtaagtgataatcacaccactgcactccagcctgggcaagagagccagatcctatctcttcgtgtgtgtgtgtgtgtgtgtgagggacagagtctccctctgtcgcctaggctggagtgcagtggcgcaatcttggctcactgcaacctccgccttccgggttctagcgattctcttgcctcagccttccgagtagctgggactacaggcgccccccaccatgcctggctcatttttgtatttttagtagagatggggtttcaccatgttggccaggctggcctcaaactcctgacctcaagtgatccacctgccttggcctcccaaagtgctgggattacaggcatgagccactgcaaccagtctggatcctatctcttgaaaaaaaaattaaaaattagaaaattatccagataggatggcgtgcatttataatccccagctactacttgggaggctgaggtgggaggattgcttgagcccaaaagtttgaggctgcagtgaaccatgatggctccactgtactccagcctgggtgacagagtgagaccctgtctctagaaaaaaaaaaaaaaagtaggcagtgcgtggtggctcacacctgtaatcccagcactttgggaggctgagtcacatggatcacaaggtcaagggattgagaccatcctggccaacatggtgaaaccccttctctactaaaaatacaaaaattagctgggcatggtggcacacacctgtagtcccagctactcaggaggctgaggcaggagaatcacttgaacccaggaggcggaggttgcagtgaggcgagattgtgtcactgcactccagcctggtgacagagtgagactccatctcaaaaaaataaataaatacaaataaaaagtttttaagtgttctggggtcagtttgcaagcaccaacagcatatgtttcttaggccccctctgatgacaaggactggcccagggtggacagggaagcccagggagggtggtatcatgttggtcctctaatgtttcctctgagaacccctccaatgggccagttagcatgggccacctagggatgccagggtggggtgccaggggacactctgctgtggtcccacttggggcatggtcaccagatgtgctctttttcttttttttttttttgagatggagtctcgctctgtcgcccaggctggaatgcagtggtgcgatctcggctcactgcaagctctgcctcccaggttcacgccattctcctgcctcagcctcccgagtagctgggactacaggcgcctgctaccatgcccggctagttttttgtatttttagtagagatggggtttcaccgtgtaaggcggaatggtcttgatctcctgaccccgtgatctgcctgtctcagccttccaaagtgctgggattacaggcgtgagccaccgcgcccagcccagatgtgttctttttcaagtttccttcttgacggagggctgggccagcttgtgaggcctgaaaagggctccctgcacctgtctgccgtattggacctgttactggaggtatcacccccaccaaaaatatttctaagtccctctcctatggtagtgactggcctgggctgagtaaggaggactgtggagtactcttcaggctcagccctggtcccacatgcgtccctgttttaacatgtgactcctccgcagaaaacttttataagtccctctccaggaagagagattggacctggccaaccagagaggcctggagagggtgacctgagtttgcccacagccccatgtgggctccttcataggaggctctgagtgcaaagtttcctgtgtcccagccagtggtagggactggtcgcagccaaagaaggaggccagcagaaggaccacaggtgggctgtcatcctgcagaggcctctgattgtgggatgtgcctccaggaaatatttgtaagtccttggggatggggtggggataaggaaacagcttaggtcagctaggaaccatagggcagagcaacccaggcttagttttggtcacacatggggcctggttcctggatgtgctccttgaaaatttgtctaagtcaccctctaaagacaaggattattacaggtgagccagagaggcccgagaagggcaccccagcatagttgtcctgctgcatagaatctggccacaggatgaaccccctgaaaaccttaaaaagtctccggattgagaccatcctggccaacatggtgaaaccccatctccactaaaaatacaaaaaatttctctttcccttcagtgtgccactgaagatcctggtgtcgccatgggccgccgccccgcccgttgttaccggtattgtaagaacaagccgtacccaaagtctcgcttctgccgaggtgtccctgatgccaagattcgcatttttgacctggggcggaaaaaggcaaaagtggatgagtttccgctctgtggccacatggtgtcagatgaatatgagcagctgtcctctgaagccctggaggctgcccgaatttgtgccaataagtacatggtaaaaagttgtggcaaagatggcttccatatccgggtgcggctccaccccttccacgtcatccgcatcaacaagatgtcgtcctgtgctggggctgacaggctccaaacaggaatgcgaggtgcctttggaaagccccagggcactgtggccagggttcacattggccaagttatcatgtccatccgcaccaagctgcagaacaaggagcgtgtgattgaggccctgcgcagggccaagttcaagtttcctggccgccagaagatccacatctcaaagaagtggggcttcaccaagttcaatgctgatgaatttgaagacatggtggctgaaaagcggctcatcccagatggctgtggggtcaagtatatccccaatcgtggccctctggacaagtggtgggccctgcactcatgagggcttccaatgtgctgcccccctcttaatactcaccaataaattctacttcctgtccacctaaaaaatacaaaaaaaaaaaaacaacaacaaaaaattagctggtcatggtggcgggtgcctgtagtcccagctactcgggaggccgaggcaggagactggcatgaacccgggaagggagactgggactccctctatcacccatgttggagtgtgctggcctgatcaaaacacactgcaacctcagaatcctgggctcaagcaatccccccgtctcagcctcccaaagtgttgggatgacttgcttgagctgccatgcccagcctctccctaatttttctaagccagcctgtagaggctgggaatcagccctggccattcagggaatccgtggagggtggcccgggcccagcaggctaccctctgactgctttgggccgagacacaagttggagtgagaccctgaccaggtggcatctggtccggtaggggaaggtccaggtccggcgcagtcccaccggtggtcgggcgccactttgtgatcactctgatatcgtccccggagctcggttgtcgcgtgtgtgggacaagatccggccggagagcccaggacagtgttccaggagaccgaaggagatggcaaggtcttctcggccggccacacgcggtgctgcataatggactctcctgagatagttactgcgggatccgggggagcctgagatcattactgcgggatgggaatctttgagaatcgcggaagaagagtggcgtatgaaggtccctctgcccttggagaccgactggtgccgtcgcaggtgaatggggtagggcgccctgggctcagccgctttcccatctggtgccgggttgttcacagcatcactggatacattttcgttcttttttttttttgagatggagtctcggtctgtcacccaggctggagtgcagtggtgctcactgcaaactccgcctcccgagtagctgggactacaggcgcggctttttgtatttttagtagagacggggtttcaccgtgttagccagggtgttctcgatctcctgacctcgtgatccgcccacctcggcctcccaaagcgctgggattacataggcgtgagccaccgcgccgggcctctttttttctttttcttttcttttttttttgaagacagagtcccgctctattgcccaggctggagtgcagtggcgcgatctcggctcactgcaacctctgcctcctgggttcaagcgattctcctgccttagcctcccgagtagctaggattacaggcacgtgccaccacgcacggataatttttgtatttttagtagagacggggtttcaccatgttggccaggctgggctcaaactcctgacctcaagtgatctgcctgcctcggcctcccaaactgctaggattacagtcatgagcccatgcccagcctactggaaaagttttctaggtccccttcctggggccaggatcgcagccagggaccccagagggcacacagctcctgcccaccgactcacataaggtaccgtcgcagaaagtgcgtcctgaaatttttcccaaggccccttttaagaagggacactcgcccaggcatacagggaggatgaaggagggcacccagaccccagctgcagtttccatggcgaccattcatcggacaccttcagaaaacgtctggagggatgactggggccaaacagggagggctaagggtgggcgacttggacttggtcacagtcctatgcagacgcgtctgaagcacctgctgaaaacgttgccaattctgagtgataggagataggaataggggcatgaagagagggacggggagggtaaaaggagggggatcactgggagccgcagaagcagtggcggggaaagcagggggaagaggaggtagagggatggttttgatgggagaaggaggttctgagtaggatattgttgtggcttcattcccctgtgggccttcccaaatgttccttttttttcttttctctttctttttctttccctccctcactcctttctttctttcccttccctcccttccttccatcttgaatgttcttcttcattttctttccttttttttgagacagactttcactcttgtgggttattttttattttttatttttttggtgttttgttttgagacagagttttactcttgttgcccaggctggagtgcaatggcgggatcttggctcactgcaacctgctcttcccgggttcaaacgattctcctacctgagcctccctagtagctgggattacaggcatgcgccaccacacccagctaatttttgtatttttagtagagaagggttttctccatgttggtcaggctggtctcgaactcccaatttcaggtgagctgcccgcctcggcctcccaaagtgctgggattacaggcgtgagccgccgcgcccggcctctttttccttttctctttctttttccctccttccctccctccctctctcccttccttcctccctccttccaccctccctctccctctctctttcattttttttggtttgtttttgttttttgttttatttttcccgcgaccgagtctcgctgtcacccaggctgctgtgcaatgatgcgatcatagcgcactgcatcatctccagggcacatctctcctcccgcctcggcctcccaaagtgttgaggtggtaggcatgaggcatccagcagggcttcattcacattttctgtctgcctat

SEQ ID NO: 94504 - DNA, 13725 bp, Homo sapiens
gaagggagggagggagggaggagagagagagagggagagaaaaaagagagtgagagagagaaagaaggaagggaaggaaggaaggagagaggaagggagggagggagggaggagagagagagagggagagaaaaaagaaagagagagagaaagaaggaaaggaaggaaggaaggaaggaaggaagaaagaaagaaagaaagaaagaaagaaagaaagaaagaaagaaagaaaaagaaagaaaggaaggaaaatgaattagctttgtgttccctaagttaatctttgctgagtggttgagacgttggttgaaagaatgggcaagaacagagtagggtgacagtcattggtcacttacaactttagtctaagccaaagggttgaaaaagaccatcttggctgggcgtggtggctcatgcctgtaatcccagcactttgggaggcccaggtgggtggatcacttgaggtcaggagtttgagaccagcctgaccaacatagagaaacccggtctctactaaaaatacaaaattagcctggtgtggtggcgcatgcctgaaatcctggctacttgggaggctgaggcaggagaatctcctgaacctgggaggcggaggttgcaatgagccaagatcatgccattacaccccagcctgggcaacaagagtggaactctgtctcaaaaaaaaaaaaaaagaaagaaaaagaccacctcatttatacacagttttctacatttctcctatatttcaatagttttgcttttaaaatatgtattttttgcagccacaatcaggagatgccttctgggtatcataccttgaccattaattttaattttgaattgatttaaagttttcttattcatccaatctttcctcatattcccttgtttttatggataagcttccaatatttctgcctaaacttgttcaagttctaaacatgagtttcttcatagtagaaaatatggctttgtggtggctgtctcaacagtcaagtgtttgctcattcaagaaacttcattaacactagtattagggccctatcaggtattgatactgacaagcttccatcaccaagttggacttgggtggttcagtcctgttctcatggccaatgagaagttaggtgaggaggtgctccaattagtctgtccaatagaattaagagaaagggaaccagtgggcacaagaagacagctggacctctcactgggatactgcaaaggctaacagccagtctaggaacttagtcacagtgggctctccttgagccagttccactgttcagagagctatgccaagcccgtaaaagacctaaaggctgacaaaacatctgacttttcagtagaatcccatcattaagtatgtaaacaatccagtatggtcatcttatgttgatgtgtatctgattgataaggggaaaaaaaagaagagtaataatcaacttagactagaaggtaaaatatatcaaaacaagagtctatgtaagaacaaacagaaatctttggtgttaaaaggttggaggcagccaggtgcagtggctcattcctgcaaatcccagcactttgggaagctgaggcaggaggatagcttgaggccaggaatttgagaccagcctgggcaacacagcgaaactttgtttcttcagttattacagctattcccaacaacaaaaagtttggaatagccgtaatactcatctaggatatttctattatgtaggaattagtatctatacttttcttatgccagcactgagctgccccaccaaaaggtctttcactgacataataaagaggcaggatttgaattcagacagatctggctcttaaataccagtccacttcactgcaccatgctacctcccacaactaggatgggaaaagacatttacgattgtgaaaagcctggaacgcacgaactgatcagtttaagagggttcgatgcatacacctcccacacagtgttatgaaactgtcccaaatatttaggaagaactgagcgttcacagacactagaattagctttcaaactatgccaacatgtcgtttaacatgcaagtgctcaaaattaaattgcacttctgccctcaaaaaaccctagttgatagcttgggtgtttcttatcatctttattagctggggttatgaaacttaaatgggtgatgttgctaaaacacttttctctaacactttcccatggggagttagaggcaggctgcatgatttggccgggttttgttcatcacaaattaggtcaacatcccaatcccaaaagaaatcaccattagtgaaatgacatgtttcaagggctttccaaaatcagtccaccgggttttggcaagctccagcaagggtggagaggggtaaggggcagccaggccttaatggccttctgaagttgggtcctgtatctgacaaggtttccaatggctcctatgaacaaaactgactttgctcttactgcttttatgcaattaaagaggccaaatgctgaaataaaaatctcacttaacaatgaggatttacagtaatgaaaaaattatcccgagttttttcttcagtgatgatgcagtgacagaaagattgaggatgagaggggaaaaaatcaacattaggaaacagaatgttgatttcctttgtcctaaaaatgcaatatagcaatgaaagaatcaatactttrttaaatgtttaacactgatgtccaatcttttaaagttacccttttaagattatttcaacaagcaaaataagtcttagcagtttttactttgataattgccaaatgatattaggaatattacctttcctcccttgcttacaacaaaaacaaatacaaaaatgaaagttataggtaaagatatataatttatcaaagtgtttttttgttgttgttttttttgtttttttgagacggagtcttgctcttgtcacccaggctgaagtgcagtggcacaatctcggctcagtgcaacatccaactcctgccaccacgcccagttaattttttgtatttttagtagagacagggttttgccatattgggcaggctggtcttgaactcctgacctcagatgatctgcctgcctcagcctcccaaagtgctgggattacaagcgtgagccaccgtgcccagcctatcaaagactttttttcccctatttttgtttaatttatttaagaccacctccctacaatttccagagaaaaaatacaaaacaagaaacagacttggtttcaaatacataaccaggtgctggagtttaaagcattactgataacattgttacagaagaatggcagcttactgcaggacacttcagtattcctgaggaataaacatgatttctcttgtcctcccactgggacgttctcaggtgaagtcactgctcctgctctttgacatattttccatgtagaagatatggagcctggaaatcatgctgacagttggagtaagccattcctaatcccatgccagaactgaaggctaatggccacattcttcttttaaagaagtgagaaaacaattcctaatccaaaaccagtacctgtcttcaccaccgcatctgccaggcactggtcccacttcctgctgagctccaattccaacatgttccccacccatgcctctagctctcctctccgccagcccctgcactctttaacactaccaaagtcttaaatgacatttcaaactgctagatggccgggcacagtggctcacacctgtaatcccagcactttgggaggccaagctgggtagatcacttgaggtcaggagttcgagatcagcctggccaacatggctaaaccccatctctaataaaaatacaaaaattagtctggtgtggtggtgggcacttgtaatccccgttattcgggaggctgaggcaggagaattgcttaagccgggaggtggaggttgcagtgagccgagattgcgccactgcactccagcctgggagacagagtgagattccgtctcaaaaaaataaaaataaaaattagccaagtgtggtggcgggagcctgtagtcctagctactcgggaggctgaggcaggagaatctcttgagcccgggaggcagaggttgtggtgagccaagatcgcgccactgaactccatccagcctgggcaacaagagcgagactccatctccaaaaaaaaaaaaaaaaaaaaaaaaagctttcaaactgctaggaaactaaaaatgttggtacattaataaatcactagcagtttagacattaacactgcaagagggagaagttggtggctacacaatgtttttatcgtgacttttacaaatcaagctggttataaagtcattctgtcattctcaaagatattaagttacccacagataaattaaataaaaatctcccaatgcctctacggatctaaccactccaaggaaactagcatgttaagcattttatctaagatatgaaaaaaaaaacttttttggaaaccagctatctcctgttcattacctcactattgagtcatgcttcctttaacaaatccagaccttacgctttctatcctgtcttttacactagtctttctgaagccattaaaactctcccatgttaaagcaaaaatctaggatgtccaggtttacttccccatcaccttttctcaagctgaagacttttggattcagtatccaagaagggactcgagttggggagaggaagagaggagcaagtaagtaggaaaggaagggcagtctgtactgttaatgtctcttccccctcccctttatgggagcctttgtacaggaaaagctgagaaagtgatccacggttccaaacaaaatgctctatgcttacgaggaccacgtgtaacacaggggtttagtgttccattttattttttgttgttgtttgtgtgtgtgtgtgtttgagacagtcttgctctgtcgcccaggctggagtgaaatggcgcaatctcagttcactgcaacctccgccgcccaggttcaagttattcttctgcctcagcctcccaagtagcttacaggcgcccactagcgcatccggctaatttttgttttttgtgtttttttttaagtagagacggggtttcaccatgttggccaggctggtctcaaactcctgacctcgagtgatctgcctgcctcggcctcccaaagtgctgggatctggccaagatggtgaaaccccatctctactaaaaatacaaaaatgagtcgggcgtggtggcaggcgcctgtaatcccagctacttgggaggctgaggcagagaatcgcttaaacctgggaggcagaggttgcagtgagctgagatcgtgccactgcactccagcctgggtgacagagcgagactccatctcaaaaagaatagtggtgatcaatctatattgtacaagagcccttgggaattacatttttaaaaaagacacaaggtggaccctcatgcccctcatcaacgaaacagaactgggtacattcccaggtgaggcccacgtgcagccatgattttaccttggaatcccattcagccttgaagtttgggaggaatgaattccacttgtagctccaggagagatttatgattaaatttacagtgtttagcgcatctccctggccaaggagacttaaggagacactggctgagggtttctggaaaattttattcattcttctgtaaaaactgcagccaggactacctctggttaatcccatcagtttggacgggttacctttcactagcaacattaaagaccccaaattagaaagcaacacataggcatggtgaagtcaagaaaagggtggacttgaatgtttatttacaggatgctgcaagataggaaattccacatagaaattagaaacctagtcagaggacaagcttcatacagtatgtacagttggaactgttcaagtatagtttcagtgtaaaaagtgctacartaacaaaccacatttaagaaagagttcttagtagagaaacaataagacaaaataccaaacrtagtacacaacaaatttatgyctcagctacatgatctaaaagttaaaggtcccaggagccccatcctgaacttggaaagtgtagccttcagaggtagtttctggcacaacgttttgatcttcctcttcctggaaatatattaaaaaataagtataaaaataataagtattccaagcagcagcctacctgaagtctgtatttaatctctaggtcttgatctgcatattacacctttaatcctgtatggtattgtagtatctgacataggggagggagggtctctgaaactttgccaattcataagtgctagctactacagtaacagaaacaggccgagattttttttcttccccaaccgtcacttttcaataggaaaagactgtattaggcccagagcatggtggtgggtttggcctacttctctatcacctcctacaatgacacccgttaacttaccctcaagatattctaagattctcaaggctgttcatttgaaactaatctggtgacttttaaaatctcacctcaacgccaagaccaaggtgcgagggcttattgagatcatctccaatgcagcagggtacgagaatatccccatccagcaccatgaagaaaacttcctgaggcagttggctcagaaggtccctgacaagctgaataaccctaagttcaatgatccgcacatcaagaccaacctgctcctgcaggctcacctgtcccgcatgcagctgagtgctgagttgcagtcagatacggaggaaatccttagtaaggcagtccggctcgtccaggcctgcgtggatgtcctctccagcaatgggtggctcagctctgctctggcagctatggaattggcccagatggtcacccaagccatgtggtccaaggactcatacctgaagcagctgccacacttcatctctgagcatatcaaacgttgcacagacaagggagtgaagagtgttttcgacatcatggagatggaggatgaagaacggaacacaattcttcagctgactgacagccagattacagatgtggctcgcttttgtaactgctaccctaatatcgaactatcttaggaggtggtggataaggacagcatccgcagtggcgggccagcggtggtgctggtgcagctggagcgagaggaggaagtcacaggccctgtcattgcgcctctcttcccgcagaaacgtgaagagggctggtgggtggtgattggagacaccaagtccaatagcctcatctccatcaagaggctgatcctgcagcagaaggccaaggtgaagttggactttgtggctccagccactggtgcccacaactacactctatacttcatgagtgatgcttacatgggatgtgaccaggagtacaaattcagcatggatgtgaaagaagccgagacggacagtgattcagattgagtcctgaggcatttactcttgggtaaaggagagttgagcctgaattaggaatgtgtatattgtagggatcctggtggttatggggaccacgtctgtgggcctgaggtctggccagccagggctggtgctgtccctgcccacatccacttccttttcccttgttcacactctggatccagtgacagcaggtgtcacgggtcaagcataaatcatatatagcatgttcaggcatgttactggtagttccttttgagtctgacattctaataaaataatttgtagaaaccaaagctaaataaataaataaatagattttattaccatcaagccaaacatcagaggggcaataagtacattacgtcctatgcacactgatattttactatatttaacaaagatatgaggctcatttttaaaagtatgagggaaaaaagggctcatggccttggctttacatttttccaagttgttattaatattaccatccattactcacctctacagagaaatacttctcagttaagcttaatgaagccttatatacagactcattttcatggttttgtagagcttcaattttgtctacgcctccacattcttcaatcattatactaagtttctcagtttcacctagtttctcagcagcctaaaaaaaaaaaaaaatccaagtttactggcgtatactctgaatgttttaatgaagaaaacatcgaaaatttgaatattgatatgtcaggcagaaataagcaccttaacagttccttcatcaagcctatcatagttttatgtccattctatattttgttgaaactcagtgtgattggatctgtacctactcttagcagtacttcgactggagccagagatcttacaatcagtagctctcaaccttttgtatgtatcaaaatcacatgggccacttttttttctttttttctgttttcttttttttttgagatggagtctcgctctgttgcccaggctggagtgcaatggcgtgaagtcggctcactgcaagctccgcctcccgggttcatgccattctcctgcctcagcctcccaagtagctggatctataggcacgtgccaccacgcccggctaattttttgtatttttagtagagacggggtttcaccgtgttagccaggatggtctcgatctcctgacctcgtgatccgcctgcctcagcctcccaaagtgctgggattacaggcatgagccaccgcgcctggccaacgtgggcaacttttaaaacaacactacactccagttcaactggtctgctatgggaacaggggcgtattgtttcgtaaagcatcctatatcatcacaaggtgtagtcaaggtgtctaagggcaaagatggcctatggagtgctaaactaaatgtctccgaacagaatgtgtgttggtattaaggatttacggggcacatggaatggtatgtaggttagtttttctttaaattttcaacttttaagagatacataaatatctatagatgaaataacagatttgcttcaaaataacttaggggattagatgaaggaaagaagaaatactggccacatactgacaaattatttatacacagtgacagatacaccagcatccattattgtaggctcaattttttttttttttttgagacagtttcactcttgtcacccaggctggagtgcaatggcgtgatcttggctcactgcaacctccgcctcccaggttcaagcaattctcctgcctcagcctcctgagtagctggaattacaggcgcctgccaccacgcccagctaatttttttaatttttagtagagacgggggtctcattatgttggccaggctggtcttgaactcctgacctcgtgatccacccgcctcggcctcctcaaagtgctgggattacaggcgtgagccaacatgcccagcctgtaggctcaacttctatatgtaaaaatttctagaatccaaagttgatgagaagggcttacctaccaccaatcactacggcaaagtgccatatgctggtatgcttggatcagttaggggtggaaccagaagaaaaatataattaagtcattcaaaaaaaatttttttttgagacagagtttcactctttcgcccaggctggagtgaagtgacgcaatcttggctcactgcaacctctgccccccacccagagttcaagcgattctcctgcctcagcctcccaagtagctgggattataggcgtctgccaccaggcctggctaatttttgtatttttagtagagatagggtttcaccatgttggccaggctggtctcgaactcctgacctcaggtggtccactcacctcagcctcccaaagtgctaggattacaggcatgagccactgtgcccggccaagtcattcaaatttaatgtcaccaaaattcggtatgaaattgggaaattaaatcaaccaagtaaacaggtgtgatgagtccacataagcgcctgactccgattcagttcgcaccatccacttgtcatctcttttatatcttttataatgcctgccacatttttaatcaaaggggtggccacataaacaggctttctgattctgtggcttactagtgagtaaacttacagctgccctcccccaagtctaaatagtaaaccaattattatcaagtccaaattcaaacaaagccaccttgataggacttacctgaaagatatttgaaatggcatccaggataaccagaataatcttggtatcttttgcagktaagaggttcatcaacggttctattatgccacagtgaacaaggtacacaatctgttcaactgttccacggcccatacagcttccttttgtgtctcaaaatctgccaattaaacataaggaaatggttttatttcagaacagttgcacaaataagattccaagagtactttttcacaaaaacggtgactgaaagtaccaaggttctattgatacaaccttaagtaaaggggttactgggtattgttcagcaaaggactcctagtagaacccaagattcttgcacatgaagaagcttatcaagcacagctttctataaatactaaaaatgacttgattaaatcctaagacttcgttaccttagagagawcrctgacaaggaatgggactaatccatgattcacaacttgctgtatctggtcctggcggcyggctgtgatgtttgacattgtccacgtagcttccttctgaatgttagttttggggttggtgagcaggctgggaaagacggcgagtgctcctgcatcaatcacaacctgagtctgttcatctgtaccagtgacgatattccctatggctctyagggcaggagtctgaaaaggaaaaaatgttgatgctggttaccttatatttttctcagcacttcagaaattctgtactccaaaagttttaacaagaggcccaacatgacctgaaataggcaatatttcaatattggtatcaactgattatgcttttttttttgagacaggagtcttgctcttgtcacccaggctggagtgcaatggcgtgatcttgggtcactgcaacctccgcctcccaggttcaagcaattctcctgcctcggcttcccgagtagctgggattaaagcgtgtgccaccatgtccggctaatttctttgtatttttagtagagatgggttttcacatgttggccaggctggtctcgaactccttacctcagctgatccacccgcctcggcctcccaaagtgctgggattacaggcatgagctactaaaaatttagacctacatttaattttgcctgttaaacattcattattttatatgtagaacagtttccaaactcgatgtcaggactcactggagtctcaagttatggagtatccaagtgtttcgttgctaaaaaaggcagctttgaataatttaaaaaatgaactagaaggccaggcacagtggctcacacctgtaatcctagcactttgggaggctcaggagggaggatgggttgagctcaggagttcgagaccagtctgagcaacataatgagacctccccttctacaaaaaattaaaacaaaacaaaacaaaaatccaggcatggtggtgtgtgcctatcaccatgcaagaccttctctcaaaaaaaaaagaatcagagcagactgaagattattcctacattaatctcaataacttgcattcagatatactttgagggagaaagacatgaagttataagcaacattctgagaattttgatatctaattttataatctatatatttccatggttgagtgttgttgcaaatataaatgggttatgtgcggccaggtgcagtggctcacgcctgtaatcccagcactttgggaggccgaggcggtggatcacctgaggtcagacgttcgagaccagactgagaaacatggtgaaaccccatctctactaaaaatgcaaaaattagccagacgtggtggcgggcccctgtaatcccagctactcgggaggatgtggcaggagaatcgcttgaatccaggaggcagaggctgcagtgagcctagatcgcaccactgcactccagcctgggcaaaagagcaagacctgtgccctgcccccccaacaacaaaaaaatgttttatgttgtgaatcaaagtagaaaggaggtttgagagccaatgctacccataattcaaaaagccagtatccctgtctctccaggagcttgacacctaacagaaaatgtgacaagtagacaaacagcataaaacaagtggtaaatagatgggttacatagcatttactcccaattttgggtgcagaatcagggcgctagagaatcctgagaaaggagtgtctttcctacgaggctaaggagtgctataagaagaagatgagctttgagtattagtaccctagaaatagaacacacgtagtagtcaattggaaaaaaaaaaaagataaatgtggagtgctaaagggctaaaggaagcataacgtggctgggtgcagtggctcacacctgtaattgcagcactttgggaggccgaggcgggcagattacctgacgtcaggagtttgaaaccagactggccaacgtggtgaaaccctgtctctactaaaaaaaaacaaaaattagttgggcgtggtggcggcacctgtaatcccagctattcgggaggttgaggcacgagtatcacttgaatccaggaggcagaggttacagtgagccaagatggcgccattgcactccagccttggcaacagcacgagactttgtctcaaaaaaaaaaaggaagcatattgtgagaaaaagaagtaggaaagtgcccagttatctttggaagatgaaagataaatttgaaaatctaagataggtctactttgtggaaggccttcatggagtatggattatattattattttttagacagagttttgcacttgttgcccaggctggagtgcaatggtgcgatggtgcgatcttggctcactgcaacctctgcctcccaggttcaagcgattctcctgcctcagcttcccaagtagctgggattacaggcacccaccaccaccccgagctaatttttttttatgtttagtagagacaggtttcaccatgttggccaggctggtctcaaactcctgacctcagattatccacccacctcagcctcccaaagtgctgggattacaggcgcaagccaccgtgcctggccagagtatggatttttatttttagagacagggtcttactctgtcatccagcatggagtgcagtggtacaatcatagctcactgcagcctcaaaatcctgggctcaagtgatccttctgcctcagcctcctgaatacctaggactaaaggcctgtgccaccatgcccagctaactttttattttttgtagagacaaggtcttgctatgttgcctagtctgggctcaaactcctggcctccagtgatcctcctatttcagcttcccaaagtgctggaattataggcgtgaaccatcatgcccagcggagtatggattttttatttttattttttttcttgagacagagtttcactcttgctgcgcaggctagagtgtaatggcaaggtcttggctcactgcaacctctgcctcacaggttcatgcaatttggagtatggattttaaggagagaaaaaacacgtctaaagcagtactttaggaaaaaattcagaaaaatagcatttggcacagaaagaaggaaacgataaattaggaggctactgtaaatatttcaggaggaaagacctgaacaaagctggtgacaaatac

SEQ ID NO: 94505 - DNA, 15995 bp, Homo sapiens
tgaggctgccggtgaacgtgctggtgcccagccggccgccgcgcaacccctacgacctgcacccggtgcgggagggtcattgctacaagctggttagcatcatctccaagacggtggtgctggggctggcgctgcgccgcgagggcccggcgccgctgcacttcctgctgctcacggacacgccgcgcttcgcgctgccgcagggcctgctggccggggacccgcgcgtcgagcgcctggtgcgcgacagcgcctcctactgccgcgagcgcttcgaccccgacgagtactccacggccgtgcgcgaggcgccagcggagctcgccgaagactgcgccagcccgcgccgcgcgcgcctctgcctgcccgcgccgcgcgcccccgggctcgcccgcgcccccggcccgctagcgccggctcccgccggcgagggcgaccaggagtacgtgagccccgactgggcagccgcgcccgagcccgccgcgccgcccgccgagatcccctacgaggagttgtgggcgcaccaggggcccgagggcctcgtccggccgcccccagggctcgacctcatctccttcggggccgcgggaccgccgcgtcgggagccggaagcgccgccgcctccagtccctcccaaatccgaggcggtgagtgagcgcgctgggggccgagtcccgggtccagccagggcccaaagcccgttctcctgggccccggccccggagtatgtggcagacgaggtgtcttcctcggcggggtggggaaggggagaaggaaagggcagaggcatgccaggcaaaagcatttgtagtaaggggcactggggcgggcggtggcgggagagctgtgggacagagatgcgtgtaggtccccagcctcagaggatttgagaggagccccgaagcactgttacccagaaggtaccacagaacaggggtcctttaagttgttgcgtgaaaagaaggttccttggcgaagtaagcttagaaatgctgtgaatgattcccagccctttttccctcctcatattggagtcacagagcattggtagattaaaggctctgagaagtcctgcactaaggaatcctgtttatcagaacattttctccctgcccgtaacacccgtcagcatcccatggagtcctctttggggtacacgacttgtagggagggatgcaggtggcagacgcttccttccctctgtcccttcggctttcctttgtcctctgctttctctccttttccttgaggagggagcacgtctgcttaacctgttttgatctacctttgtgttctttttcttaacatccatgatggatttccaaggaacaggaaggaggctgtgggacagggtgtgggtgcgtgagataggctgggaaggctaggaagggtggggtggctggctgactggatgagcagttggggtgcaaggcagcctattggcaaagtggggcaaatgtcaggcccagacagccccctcgcccagctgcttgggaaggggaagataaggagtgccagctgtttggagtcgaggtggagtcaccgccctctgcttgtaggtgaaggaggagtgccgcctgctcaatgcccctccagtgcctccccggggtggcaatggcagcggccggctctccagcagccccccggttccccctcgcttccccaagctgcagccggtacattcccccagctccagcctctcctactactcctctggcctccaggatgggtgagtccctgccttcccttggtcctgagttctaaggtagatcaaggcagggaagggtgaggagggggaactacagtgctgaggaagaggaagtcttgaggcctgggagattcccgagggtgcagctccctgtgcagtggctcagggattggcactgctgtctgggtgtcttggggcctggggcccagtggcctgttctgcccacttcagcttctttctctcttaaatgttgaggaacggatgggagcattgccctggtcccctcaaggtggggactttgctgcaggatagagagaagagagctccttgctgttttgaaattttgattaagttcaggccaggtgcggtggctgatgccggtaatcccagcactttgggaggccgagttgggtgaatcacttgaggtcaggagttcaagaccagcctggctaacatggcgaaactccatgtcttctaaaatacaaaaattagccgggcattacggcacatgcctgtaatcccagctactcgggaagctgaggcaggagaatcgcttgaacccgggaggtggaggttgcagtgagccaagattgcaccactgcactccagcctgggcaacagagcgagaacaccatctcaaaagaaaaaaaattgaaagaaaatatttttattaatttcagtttcgtttcatttttcccctgtgttttctgacctgggctgggggatgctggaaggaagaacacagccattccggagggtcttgggctggggctggggtgcaggcccgtgttgctgaggtcatagtggtgcttggttgcaatgcatgtgtgaccctatcggattccctctcagcctcacctgtcctatgtgtgtgtgtctgtctctgtccacagggcgggttcccgcagtggcagtggctccccatcgccggacacctactccctctattgctacccatgcacctggggagactgcaaggtgggcgagtcctctagccgcccagcccccggtcccctaccctcaaccacacagcccagccaggcctcccgggccctcacagagcctctgagcggtcgagccgcctcccttctgggggctgacacccctgttaagacctaccacagctgccctcctctattcaagccctcacatccccagaagcgctttgctccgtttggagctctcaaccctttttccgggcctgcctacccctcaggcccttcagcggccttgtcttctgggcccagaaccacctcgggtcctgtggctacctctggccctgcgtattccccaggcccagcctcgccaggccaggcctattcagctgctcccccctcctcctgcgccccctcctcctcctcttcttctgaatggcaggaaccagtcctggagcccttcgatccctttgagctggggcagggcagttctccagagcctgagctgctgcgttctcaggagcccagagcagtggggacacctgggcctggaccccgcctttcaccacttggcccctccaaggcctttgagcctgaaggtttggtgctgcaccaggtccccaccccactgtcaccagctgctctgcagggacccgaggcgggaggagcactttttctaacccaagggcgcctggaagggcctcctgccagtccccgggatggagccacaggctttggagtccgagatgcctcctcctggcagccccctgctgacctgtctgcactctccctggaggaggtctctcgcagtctgcgtttcatcgggctctcagaggatgtggtgagcttctttgcccgagaacgcatcgatggtagcatctttgtgcagctcagtgaggacatcctggcagatgacttccacctcaccaagctgcaggtcaagaagatcatgcagttcatcaaaggctggaggcccaagatctgaactgcccagctggagctgcacagctggaatgctggtatgggggccccaggtacagcactccggaggagcaggtgctgcctgcaagaaggatctatgtcgagactgaggctgctcagcagccactgggtggatccaggggagatgcatgtggaaatgtggtcctctggggtcagacccctgcacgggacatcttgcctttgagtgtgcagagtacatggggaaggggctgggggcaccactgtgtacctgggcccagtaaggcatttgccgtgattcccacaacggggtcaaaagctggccttcagggtgacctaacaccacctcatgccctgctatagaccttcacaaacgacttccactgctgaagcctgtaggctctgtttagagacaagaagatggctggtaatttaagcaccgatttcccaagtgcccactctcctttgtgctctgttggcttttggcctaaagctgccccagagtgagggtgtagatgtctgtgtctgtgagatgcctttcccttccccctctgctccaccgtggttgaggggggtggggcctggccccgcacacaggtgagtcgtgtacaagcctaacccatggcacctcagaggctccacctgtgggtcctggttcatgggtgacaactttggaagagcacagctctgcaattgacccgacccacttatctagttaggaagccagacactgcccagatgactctagcaccctggcttctgctctgactttactgcagctagtcatccatccgtcaggtggcgttcagtctcagaatactgattccgtggaagagcaggttgatttaggtcagcttctccttgattctagaagcaagcggtagtcaaccacctccaattccgccaatctcttgcccccatcatttgtctctgacaatacttggtgtttttccctggttttctgtcactggcacaggagggtacagttgggagagtgcgttcctggagctcagtcctgcatttgttcacgtgcctcacagcaggcctttgtgcccttgaatctcaaacatggggatctgcttggtacccagagctctggtcattgtgtccaaccacacaccccaccccatccgtgtcctccatctcacccagaaccacagggtgcccactagtgtcagggcccaaagtgccagccttctcttctgccttacctagtctacctatttatttcctccactttttatcttaaaagtagctaagccatgctggtgcccatactccaagcaggctgcctcagctcagagaagtggtcagagagtagagcacagaacctgtgatgtggggacatttggttttcttgcagatcatttaatgaatcctcaaggactaatgaaataaatgctagactgctgaagatgagtacaagtggcattctgggtgccagctgctttcttcttttgaaaacaaggccatggggacccatgggcacagtgtatatgccttctggcaggagaggactgatggaggaatgatgtgggtgtgtggccattcccatgtctgtggaggcggctggtggcagccttcattcccttctgcagggccctcgccagcccctccctacccttcaagaacccccaccccagcttccactagtttcaacataattcacacctacctggtgttactgaagggaaagacccaggctcaaagctgaatgccaccagccagggcccaagcttagcttcctgcattggcagaatgccggcttcaggctctctcagaccaaatttggaaaccggttaatggctttggtgcaagggatcagctccctactctggtcatctgaaaacctcaactcagaggtgacttggttttagagtctggcttcctagtgaccaagcagagccagacctgatctccttgcctgccagtcccagctacagagctgggaccagggacatatttgaagtacaactggagcagaggcaggagtaactggtaatatctgacaatttagaatgcagaatgtgatgggactggaattacgattccgcacacactcagcgtggatccttctgccagacccagttagccccagtgctgtttacccagactgggcactgcttctgtaggaactttccatcccagggggtggggtggggaggggctgaagctttgggggagtgcaggtgctgtgggggtcagcactcctcatgctgctcccgtgctgcctgattaccgcacaggcatttctggggcagccctgctatgcaggatctccgaacatcaagggagatgtcagcgcctctgcttagcaccaacgttcccacaaccatcccaagaagcacctatgaatgaggcacacccagaaaagaaatgggtaagatcacacaatgaggaaatccaggctggggaaagaggtttaatatcccggtacaccgtggtgagaagcctgggcaaagcatctgcacagacaggtgtgtgtggttgagcccaccaggtcccactttctctcatcccagtccctccctaaggtgctgcctagaattctgcacacacattcttactcccccaaagcacagggctttcttccagattgctttttgaaggaggcgtttaaaccagaagggcaaagatgctgacacagagtttggtttttattgttatgtgtttggctgggkgcaraactgccctcaccacccctggccaccctggyctyttgggaggaacaggcaragaggtggcttcagatggctcttggctgccactctaggcctcggggcttatacaatgagcakkgggctctaccttccaayaggaagtgcaaactaattcgaagtcacacttcaccaggagggagagatggtcttggctgaaggcactttaatcagggagcaaacccagtgccggagtttgtcttctmgttactctgataaatctagacaccactctgttggagaaccagcactgccggcagctggggttagtgcactgactgagcgaggcatgaggcctgctcrctggtagaacttcttgttagggctgttagcatggtcagctagcagctggcatggggtgaactgttttccataggcagcttcatatttcttgagccggtccactatcttctgggcgccatacagatccacaaagcggaaaggccctgaatagagaaagaggacttcgttgaaggagacgcaacacgggctccaggctaaagtgagcttccttcccaacctgcgagaccaacctcccagacaaggcgggaagccaagcccaaagacggctccgatgtctccctctgcaggtgtggccaagatcccctcttgcaggcacatgactgcctcattcacaaatcttgtcaccaggcggaactggatgtcttcgtctgatgagctgccaacagaaagagatgtttaggtagaagaagaggaaaaggggaggaaagccagagccgcagatgcagaatggaagtcgggatgggtgcatggggagctctgtgggccggttggtgctggccctcagagaagatgctgcctgggtgaaccaaactttcccatggaaaaagtggagagtaacttgccctaattaacatgaaactgagcacctagaacagggcctggtgccgagaagataatcagtatctctttgacatcagcaacagtcagctgctcacaaatgataataaagatctgggagggtgaaggggccaaggagaatctgtccttccagcggctctctgggamcttgccagagaaggctggagcaggggagggccttcaccagacgtggcctggttctcacctagatgctgggcagagaccaaggagcacgtgcgagggccttccacttggaaagcaccatgccagcatcaggagtggtcctcctgttcaggtatggtggtcacaaagaaaatggaagacagcaccatggcacgtgtatacctatgtaacaaacctgcacatgtatcccaggacttaaagtattaaaamaaaaaaaaatggaagaggggctgggaagctttgggctgtcagagaaagtcaatttccaggcattagccactcaaacggacttacacttcagacttaggaggcagcttcagactcgctaaaatactatccatgtcagaattcaaatccttcctcttcacaccctcctgatagatgtaaaagcccttcccagatttacgacctaaaacaggcaagaaaagggagtgttactatttgttctcagggagggagtgttactrtttgttctcagaaccctggcctggccaggcgtggtggctcacgcctgtaatcccagcactttgggaggccgaggyrgrggatcatttgaggtcaggagtttgagacyagcctggccaacatggtgaaaccccatctctactaaaaatacaaaaattagctgggcgaagcaggaggatcgcttgaacccgggaggtggagacgagattatgccactgcactccagcctgggcaacagtgtgagactctgtstcaaaaaaaaacaaaaaacaaacaaaaaagaccctgacctgagaattcttgtctctgttggtctattataaagctctggcctcttctgaattcctgaatttgtatgtctagctaaccctagcaaattagtctttgtcagaagagtgggcagagaaggaaagaagatcttgtgacccggagcttgggcatctgtgtacatggatgagaaaggccacctgggtgagttttaacatccccatatgcagcaccgggtcctagaacacccaggttgtaatgctgattttgctgttttgccragacagaaagtcacytctctgtgggcctcaactgtatactgtgtatggtgagcttatacattctcctcacaggtggccagacagcatggtaaagcccggatgcagagcttgcttctgcactattgcagatttcatctckgggggataaaaatgcttgtccatctggcataacttggaccaggtgatgctagagccccagaagggtagaactctgccttttgtccataatctatagtcctagcccttagaaggttcacatgacatcttttttttttttttttttttgagaaggggcctcgccatgttgcccaggctggcctcacacttctgggctcaagcgatcctcccacctcagcctcctaagcagctaagaccataagtggttgctaccgcacctgactcatraaatcatttttgaaatcgccagtgataagggctctgtgtttagaaaactttcttccacgagggcttctgtaactctttggtctcaggaactgcttagaactttgtaactaatggtgctagttatgtttccttgaggctactcacctaggaagcccttggacaccatctgtgtcagcagttctgggtytccacctccaaaccgctccccaaagactttgcccagatcttccgccacatgtttcgctacatccacaccaacttcatccaccagtgtggcggcacccacaggaaagccaaagcttgtggtcagggaatccagcttcttcgggtcaactccttcctgaacaggaagcgatgcagggacctcaggggaagggcagcccaaatccccccaaagggctccctgtactggctccaaacactgccttgtgtaaaacccacttctgagtgtcacctgaccaggcccaggactggtgctatttcattcagggaagcacaaagaagtttggggccacaagtggaaagtctgagccttctctaatctacagcactttaaggacgtttagagatgactaaattcttcattttcttcttgtttgcatttctgaatctcaataataaggagattgcatgacagacggctgagtgtgtcatgaccaacagaagaaacatcatcaaagaggagcactcagagccctgtgatccccaagtctgggtaagtgcccagcgaggaggatccctctcctttcctgccagaatgacctcgatggctactggagaggtctgtgtgctgyggaaacagatgcagcaccagttgaaccaagcgggccctgttctggatggtccctgcctcagagaggtgcagaaacagcatagaagacatgctggggggtggggtgcctttagcttgctggaacagtgaggaggctgtggggcagagggaaagctctgcccctttcagtgcagtataagcccaacttccgactgctgtgcagagagagggcaccagggaccttcctagacaagagcaggagttggtgtatcagaaggaagcttggtccttatcttgacatcatgagttttagagtgactgaaggagtggaagatgccgcaaacactctggagagcaataccaacctggaggattcggatgacttcagacatcatgggcgcaagacacctggtagtatagaagccaggtccatcctgccaaggaagagaacatgagctcactggccctgctgctgggactgagtctgaaacactctacctttcccagggtcacttcaaagtcatttgaaagtcactgtaaaacttaaggtgacttaaaatctcaatcagaatccttaaaaatgaaattgcaggggaagccgtactaggggtagcctggcttgaatcaaacagtacagcagatagtttcatggtcaccttcaaggtctgggatggctgggagaaccctgccacatcctagatactccccactcccaccttgactcagtgggacagtcaataccaccgtccatcctggagacaacccaggggaaaatcatatcaaagtctggtcatttgccccagaatatttataaacaagcctggaggtaaaaggagtcttattagaacttttcaaaaactctgcagctctgttatacagccccttaccttaaccacaatgatgaccttcccctgcttgagaccaactgctacagctgaagcactggtgtctttggaagttttctcggtcgtgataatctccagcagctgcatcttgtccacgggagagaagtagtgcatgccaatcacctggcaaggggaaccaaaagccaacagatcggagaatgcgggtgaggaacctgagagcattccttctctgctaggaaaacactagaaagaaaggtggctgtgatataggaatactgcttgacatagctgagtggtttggttccatgggtctttgataaaagtttagtatgtttagggagagcacattggaatcctcctcttccatttgcttctaaggtttttcactacagacatctgatcctcccaacaatcagtgccaaaaccacagctcgaggccaaactagatttattggggaacgacggatgaaggttccacttatattaatgatactgatggtttagataagaggatccagtttttttgggcgggggtggggcaggcagaagaattaatgtgttgggctgtcagagaagtatttgcattttacacagatgggtctcaccaccaggatactaggtttaactaacactcctcaacagtcagatgcacttaagactcattaaaccagcagttctccaagtgtagtacccggacccaacaagcactgtcatcacctgggagcgttaggcctgcacattctcaggcctagcccagccctactgaatcagaaactccatgggtggggcccagatttgttttaataatccctcctggtgattctgatgcgtgctaaggtttcagagaaccccctcattgagctaacagttacatagtcttcccaacagaactgtggtgaaagaagtctaattcattaatttatagttttgctttctccctctcactttagctataaggtacaacaagtgatatctgtaatttttggctgctcattatctacctgctcttcaatacatttaccacttattccttacatttaatccattacaaccctatgaactggtcagcctaattatctagatgaggaaaaaaggtatcaagaggttagtagtacagagtcagtcagcatatgacggggtgggattccatcacaggtctgtctatctccaatgccattatgtaatacacagatcaagtaaatgttatgtaaacttatcaatccaaaagttgtttctaacccctaaagtgttcttttacttacatctgaaatacttaggacctgattcagactcagtactcctgagcaaaaggaattagcctttattgatgtagaatttctatataataaaatgcacagatcttgaagtgttcacatcaatgagttttgacaactgtatatacatccatataatcactaacccaagcaaaatatatttacatcactcagaaagttgtgccaaagatgaccaactcatcctggatggctggggatttcccaatttgtggcactgagggtcctgtatcccttgctcccgggcaaaccaagatggttggtcaccctattttgtctttttggccttacttttaaatgaatgacaaaaggcaagcaggtgagaaaagctgtcctagatacttggagggcagaactgcaaagtgtgatgcttgctctgctccgatggcggggagaggttaccatcaaatgaacagcaacggcatcgcctgtactgattttagatgccacacagatgtcttgagtgatatgacatggccagactgtccatctgtagactatcggctgcaacttctccctatgacctttagcctgccatcattgagcctgcctctgtcaggtccccgcatcacttctaatctgctgtgtgctaggaaactagattaccttgcattagcaagctagaagagtaggaataaataggcttttgtgttttcagtacatagaatttgtattaacactttcagctgcttaaagttcttttataattcctgcctaccttcggctggttctggttagcagaggctaactggtatcctccagagaagtgagttgttttacttctctttgaatgatttcacttccccttaattactctggttgagagcaaaaataaatttctgggcatcattccaaatactcacagaaagtgcttctatacccagccctttcatgtcccggggtagaaggtgtaagcaaacccacgggcagacacatcccaccattcctgccattccctgatctggaggtggaaccaaacctgttctaaacagtcactgactctgctctgtagccaaactggtattttggagcatcctttcttaaggcctatccttcaatgcctaattctaggatacaggtgggctttatatcctgaacctgaaaaataatgcccatttgggatccttgaaaaggatattttttgttgtacttaacttactcctgcatctcacactagtcatggtattagcatttattgtgtccagtgtttaggaaccacccgcatccactccgtaatccactgtctcttctgtactcaagctgtaagcctttatcagtgaatctgaagcaataaaacatctcagggtttttctctgttccgagtttaccttctcaggtcttttgctgacagcagcgatttcactgattgggagagcagatgtgttactggcaaagatacagtgatctggaatcacctgcaggggaaaagcatttaacaatgtgtcaggtaggcctgggagatgattagaggccacatcaaagctaatgagtgacacctgggcccagcccactctgtcccccacaactgctcagacagtagatgtcactcacccagacattgacggatcacctagggggttttgtgtcggggaatatgttgaccttgttccttttcccattctgccttcctctagttatggcccatcataaggtcaccttatcctgacctggagactacatctcagcagttgggtcaataaaacagcttagaacaacactgaaaagacggccttgaattgcaattcattgatttcaacacccagcatgggtgtcacctcctcttttgtttggatctgccctgaatcactccccgcttcacctttataagaacaagccaaaatgtgcatgcttgtctcattttatacagtgtgttactaaaaaacggcataccactatagttgcagctacagtacacaaatactattaactattagctttatccacctggagaatagtctctaatgcagattgtctccgcattctggccacgatcccaacttattcatgttttttttttgttttttttttttaaagacagagtctcgctctgttgcccaggctggagtgtagtggtgcaatctaggctcgctgcaacctccgcctcccagttattcatgtttttattcagatggttggatgagaaacgtggaagggacacctgtcaaatgtgtgcaaatctggaacaggcagaatcctaacagagatgagaatcaaggaggaagacacattcaacacactgaaaagctgagtacaaaataagattataatgcaataaaagtaaagtactgccttaagatttaaaaaaaaaaggaaagaaaagaactgtataggtacttgaaggacaagacctggcttggcagtatttgtgataaagatcccatgattttagttaatcaagagtggagggtgggcatggtggctaaacaactataatcccaacacttcaggaggccaaggatggaggattacttgaggccaggagttcaagaccaacctcggcatcatagtgagaccctatatctacaaaacataactttttttttttttttggagacaaagtcttgctttttcgcccaggctagagtgcagtggtgcaatctcagctcaccgcaagctttgccgcctgggttcaagcaattctcctgcctcagcctcccgagtagctgggattacaggcacctgccaccatgcctggctaatttttttgtagtttttagtaaagacagggtttcatcatcttggccaggctggtcttgaactcctgacctcgtgatccacccgcctcagcatcccaaagtgctgggattacaggtgtgagccacagtgcccggccctacaaaaaataactttaaaaaactagccaggcatggtggtacatacccatagtcctagttactcaggaggctgaagtgagaggctcgcttgagcccaggagttcaaggttacagtgagctgtgatcatgccactgcactccagcctgggtgacagagtgagaccctgtctctaacaacaaaaaaacaaaacaaaagtggaatgaattgacagtacagcatgactgtcagaaagcttacgtagtgtcaggttactttcttagtaatatagtgtctaatgctggtggtgaaatcctttctgaagagcaaactaatgtctccaaagctggctggcaaacattcttcccttccttggacatgtatgtcttttctcccagctagaagtagagtctgtttcccttctccttgaatctgggctggtcttgtgacttgtttttatcaacacaatgcagcagaagttaccctgccagttccaggcctacctagacctgtggggcccggtagcctctttttttattttttaaattatttatctttttttcttcctgacaataaacttaggaagctcagtagcttctgcttttgttctcttggaagcctgcagccacgctacaaagaagttgtggtgagacgactaagtgaggatggactatgagagatgtgggggaagcagtgaggtgccccaaccgagcttcctgcggaatgcagcccaggagtgaccccagccttgaaatcaatggacttaagcaccactgtctctgcagagccctgcccagattgcagaattgtgaaaagatagttgtaaacacagcagtagaacacggagacatgaggaagatactagagaggacaaccgaaacggggtggtctagagatcatgcctgtggaagattgtccaaggaatgggttttgttagctctatgggcaataagagaagataatgtttgtttgtttgtttatttatttattttgagacggagttttgctctgtggtactcttattttttgtaatgagctcactgctcattatatccagcatgttgccaagtcagaatcatttcatgttcacctttcagtaacccacattctgtttatccaactgtagactagcttaggccttggtcctacctcatccctgaattactgctattactccttctcggggcttactcttcctactccccacttcaagtacttgttttgttcatgtcagcccatctcaagaagtgcctatggagaacatttgggagctgggccaaagcagcatttccacagaacaagcatctggacgaactgtcttccctatttcctttgcagccttagacctgaagaggtttgtttttggctttcagctaaccaaaaaatctcaaagcatctggctatactctgtgaggttatctgtatgtttgggtgacagagctcctacatga

SEQ ID NO: 94506 - DNA, 24475 bp, Homo sapiens
acgctggacaggtcaccgatgtttcttgtacctgtatttggtcatgtgtataacaaacattttagatataaatctatcacagtagagtgttctgagaaataaatgtaaatatatttataaaaatcatagcctaatgactagcatataaaaggcacgcagtggagctgaattactttcctgtcacctaatgcttcacggtctcaagtgtttaaacataaaatctaaggcagaaggcactcagcagtttggttatttttgtcttacggggtcgaaatgtatacagaaggtagggcaggtttgagtgaaaagcttcttcattgctcattgcatccacctgaggaaaaagatgcaaagcttgccctgatcagagggaacaacaagccattattttcctgtctttgaaactgtacctgggagcttctggatagctgaacacgtggagcttcttggagggtggcctgtccagggaaggcatggaaggtccatgccccttccccagatctcgccctaggcatttcttcagctttttagtggctacatgatttaagcctcaaaactacaatagagaattattcagtcagatatatggattaccacctaacaaggataaagtaaatctaaagtcacagtcaatactctgcctcaagtggaaactgtgatgtttctgtctggcactgccaagtttgcagaacaacaagaaccaaaaatcaagagagaagaacttcattcggttttaggggtgacccacagcaaagtgtgacaaatggaaagaggtccagtgagaacctcaaacttaatgtactgtgaggctatcttgaaaaacaggctcctgggcctctgctcttatgctgcttcttttatgacaaataacacctttagatcgcacgacaaaaaaaagtaacacgaaagactacaaaagaaatgaaaagaaagtcctgattctacaaaggatgctaagcagatgagaaccaataccaaaaccaaggaccaacctgagaataaaaagtgaaagagttcaatgcaaagagaaaagagttcagcccaggtgctgacttgccacaaggcacaaggagcctttgtggatacagcacctggttgacggatggggtccatggcaacgggcaacatagaccatgtcttgttgcaacttccagaaaaactgtggaagtgaagacagtccaaatgagaataagcaaaaggtgtttatacagagcttgctatagaaaggaagtcagccgccatcttttgcatttatcagagattcagaggtaggcaggaaagtctgagagattcatggtagaaaaagttatgtcctgattgctggcctagggatgctgtaagctggctaactagaagtgtggatttctatgggattagtcagagatccatattttgctttctgtggttggtcataaattgaaaatagaggcaaaaattagggaagctggcagttattggccaatgctggtgtatttgactgttgtaagggtcatgatagaagctgtttagtctataagggcactaagagtttagagggtttcttagcagtttggctgcaataacaaaataccatagactgggtagcttaaagaacagatgtttctatctcacagctctgcaggctgggaagtacaagatcaatgtgccagcagatttcacatctagggagcacctgttccttggatcatagacagccaatctctggctatgtcctcacatggcaaacatgccaagggagttctctgagaacccttttataaggggactaatgtcattcatgaaagctccacccccatgacttgatcatctcctgaaacccccacctactaatggcttgaaagaatatattttttagggatctcttctaaagatttgggggtcaggatctcaacatatgaatttttgggaaacataaacattcagtccataacacaaggcaacagaaaaataaaatagtacctgtgtatttttggggcattgaccttcacttccaagaagctttccttgatgttaatggagcacctgactcccaaggcatggtataaaaatagactgtgaataagaattctacgagttctaccaaatagcctgtgatatgtgcatttgaacaatgtatattacaatatagcattgaagttgttttgtttgtgtaccaagtcattatccatacgtttgtatgtatacatagtctgaaaatgtattgtcaaactattatcttaaatcagtgttgccatatgttttctctttttattatttatgatgtcaatgtgctgagatattttaataaatatcatatatcactcaaaaactttattattaaaaatgtatagatctggtgtagtccaaagaaatgttttatgaacatatatacaccaaggattctaaagagcaaagttaaccttttatctttgatttatcacgtgtcagtcactccacccctgtttgcctcactcaaacacattattattattattattattattattattattgtgcatttcaaagtaagttgcagacatctttgcagttcaccctgggacacagtggcatgcagattataacatagtcaaagcagtaagaaccaccattgcaagaaagaggatgaattaaagttcacccaggcttatttcagatcccagagcaggaaatgaggagggcagatgaggagaaatgaggattctgaaatagtctactcgtgggagaagagtgctgtcatgaaggtggagtcgctgcccaagagagactggagagagagagagagtgtgtagagccactgaacatcagggctgcacactgtagggcctggggcagacaggacatgctgcagcaggggaaaagcccctggcccatgtggaagatgcaagctgggtgggtgctgtggatgccatagtgatgtggaatgagaggagaaaatgggagcctgggctccaaacaaggagtaagcagagccacacttcttactctctcactgaatcaggtaacatggagaaagatctggatctttgcacctgcccagtaaggaagcagaggtgggagagggagagtcagcctggacaaactcagggagaagcagaggccccagcctcactgcacatgtgttcctgatctgtttcctctgattctccaggtgttgaagagccatggacaagactacctcgttggccacaagctgagccgggctgacattcacctggtcaaacttctctaccacgtggaagagcttgacaccagcctcatctccaacttccctctgctgaaggtgacccatttcccagtcctcaagaggcagctcctcatctcccatcttgggatctagtatctgggtccttgaactggccacattctgacctcagccttctccaggtcttcagggccccccaggtctccaaaatgagcttccaggtcctgattctgaggcatggaaatgccttcttgttatgccaaggaaattacatgtgcatgctaccccaagaatatttcgctttttataatgccaaggacccaggactcagcatctctcctcatccctttatttcactgtggtttctgttcctgagttctctgtgatgccctttatcccaatatgcccttatcttcccacaccaagtgtgtctgagcagggccctttccatctggttccttccttatgctctggctcttgctgtcagataactgagttccttgtgcacagctctcccaacacgctgcccctgaaagctatatctctctatgggaaaaagtggtcccatggtttgactttaacattttctattttcatttctagctcaattttcccatatcttcacttcttctgcttagagactgatctgtgctatctcacaggcacattgttctttctcatcttctacaagagccatgaatctacaagattcatgtgtaaggaagagggtaggaagactgaactgaataaagtcttaaagacattttttgggaaaatgctagtgagctgcatgttcttcctcttatcttcatttctcacgtagtgtctctttctgcctccctactggtgctgatagagagaactcaggtcgtctttgtgtaggaggggcgcagattccctgggttgtgttaatggtggtgttagcccttggcttcactctgaggctgtgctttgtgcattgcgggccctgaaaatcagaatcagcaaactccccacagtgaagaagtttttgcagcctggcagcctgagggagcttcccataaatgcgaaaggtttagaagaagcaacaaagattttcaaggtttgataaaacaggcatggatgccaagaacatgcaataccaatattctaaagttttgcaacaataaattgctttatctaaatgttggttgtggctattgtgaagttaataaactttttaaaaattatgtgctaattacatagtaaaatgcctatgaccagatttagttaaaattgatttcttttcattagtatctgatgtgaaatcagatttccaaactccccataaattttcttggaattaaaaatttagtaaaaaagtaaaatgtagactatgtggtttgtttgactttttcaagaattgtcctgcaacatttgtcaaatggcctatcagaaagtcatgtatagaaatttacttctgacattctgcacaagaaaacagttatcattctggggaatggcaaaatgaaattttcttttttccttgacatccattttatttctcatgaaaacactttttcttatgcattttcaaacaacctttctgtctgctatggatccctcagttttgtaaggggtgaggaaatattgaagagcaaacagacccaccctctgctctcaggccaacttgtcatcccttacagtgcatgtgctcctggctcatcctcactctcctcaaggctctgtggggacccgggcatgagccttccctcagttccttcagtgccactcaggcctggctgcgaagatacagatggtatatgcgaattacatataagtaactatatgcaaaattatttttccctggtgtgtcattgtgccagcgtgtttggattagaagtgatttccaggaatccttccctgcgtcttctagcttctgggggctcttggcctttctggactttcatggatcatgaccacatcactctaatttctgcctctgtgttccagcacctcaccccctgtgtgttgtgtcttctcttctctctgctgtgaggacaattgtcattggatttggggcctatccagatataccaagatgatctcatctcaaattcttttacttcattacatctgcaaagagcctttttccaaataagatcaagttcacaggatctagggatttctatatggacctatctttcttgggggccaacataaccccctacatggtataggtgaaataagattatttgcaattgatgaatccaggtgatgaatactttcagatttgttatattatgggcaatttgagtgacgcaaagaggatagcatatgcaaatagggtctcttgatttgtcagataaaatacaggatacccacctaaatgtgaatttcagataaacaataaataatatttcagtataatctggtttcataccgtgtttggaacatagctataactaaaaaattgttgattgtttgcctgaaattcacatttacatggatgtcctatattttatttggcaacccagtaagaaaacggtggcatcagcttgcccttcacagacatcctctcccagctatgctcacagtagagatttttcagttgccctagtctttgcacccaactcatgaaaaaaagcatctttaaaaagccagtttctgctgacttgcaaaaagagcaaaatctcggtgaaatgtattgtgtaaactttgattgccaaccttgaaaaggaacacattaaccagtttcttctgataagcagatcacttgcctcatgtcttagaatccagtaggtggccccttggccatgaaatgtgtgggagtggcttttccctaacttgacccttctttcagtgggagrgaactattgagaggaacaaagagcttataaatacattaggacctggaattcagttgtcgagccaggacggtgacagcgtttaacaaagtaagtactgatcttataaatttctctacattgcctyacaccctcctctctagcctcctagaaaaatatgctaatatgtgtccttagcacaaggaaaagtctgtttttactcatattgtgccgtcttggtgtgyttgggtgacagttcaagaattgtttatttcttttctgttggatacatctttacagaattgtaaaaatgaagaatttagaaaaccagggcttcagcatttaatggtatgggaaacaatgacatgaagagaaaaaagaaatggtagcattttaaacaatctgagaataatcagtgctggaagaagtggcaatgtatgcaaaaatttatttctctgtgtaagtagtcaacacacaattgtaaattgtgacactgtaattctatattggctgtgaaaatacaaaactcaggtttagtataattagaataaattagtttgaatgtcaggagaactagattctagttgagcctttgccactaattagctcaaagacaagtcatattctgtctctggagttctaccaactcatggccaatatagaggatagctaagaaagaggctccgactgttgctgccctttaaactgtgtaattctttgaatggagatctgtcctgctcactctaggatgtttctaggcatccctggcctctacctatctgatttgtaaccccctttccctccccgcagatatgacaacccaaaatgtctctagaccttgctcaatgtcctctggagcagaggagcaaaatccccctggttgagaaccatgggactacatgacctcatggggctaagcaaggctgtgttactgatgtgccccactgcttggacattcactgaaaatttcctgttaatccaggtggactgattagtgaatatcaatatcttctgtacaggagctaaaaaggaaagagagagagaaacagagagccatcatatgacagatttgatataagtctggattcatataaaatcttattcctactcgagttctatgaacaaaatatagagaaccagagaaatggatacaagacagataatagatgatgaagagacagattacaaagagatagatacatagaacgattgatagataaaataatacatacatggatgggtagacagagattataaatagatacatatacatagattgttggtcagtaaaataattgatggatagatagatcaaagaaagaggatccatgggctactcaatatgtccagagactcacccatcttccaagcactgggacaagagcaaacacccattgctgtgttcctactatgaattttttgtacattatctcatttaactttctcaacaaccctcaaaagtagaaataactatctctattctaagaagagaaaattgaggctcagagattaaacaacctactgcatttatgaatctcataatggaaggagtcatagtttatctcattctcccttctctctgataagaaacagtgtcattgggaccacctcagagatgtaaatgtaactcctttaatttactcctggaattatgagagcttatattcctttcaaaacaagcccattttttaattgatgtaagttaattattgatgtaaagtaattatactagtcctcaactcactctgatttttaggttgtcaaatcagagaaagtcacagttttatcaattttttcttccaagcaagcccctgaaaagttgctaacagggggaactcaggaattagatgttcccctctcgtcctctccttccaacatttatttggctaatatatattgaataggaaaatacaaaacaacttctcagacaggagctgagagccaggttatgaggtggagtggaaaagctctggacctgcaatcagaagttaaggctgacccaacactcaccaagtgtgcagcatgagacaggtgctttagctctctgaaactcagtgtgcccatctttaatttggataataggagccatttcccagggttgttgcggaaggtaaacacactccctagatattgactatgaatgaggagcatgtgtgtgtgacccatggcaaatccttgagctctctggttctcattttctgttgacccaacaaagctcaatggtaacctatgtctcagtcttagcstgacccttggaaacctcacattgagaaagtgatatgctagttrtcagcaggagtgttgtgataaaatattatgtaagataaaatttcacttccttttgaaacatgatcctcaatcaatggctaagagagtttagtttggggattggaattacaacactgtgaactctagtcgatracaattaaacaagcataccccatgctttcatgtgaacttcactctccctttcactctgtcaaattatgctatttccatttcccaagttactttaaattgctcctggagttatcatagaaagtacaatgtcaaaatatctcatgacaaaacaggtgagttgattcagtatgatttcaaagaattctttactttccaaaggttaattattgactcccatattttaaaatgagacatttaaaagattttgatgcctaattttagtcatacatacctttttagaaatacattggttgagaccgggtgcagtggctcactcctgtaatcccagcacttcgggaggctgaggcgagtggatcacctgaggtcaggcgttccagaccagactgtccaacatgctgaaaccctgtctccactaaaaatacaaaattatccgggtgtggtggcacatgcctgtaatcccagctactcaggaggctgagggaggagaatcactagaacctgggaagctgagtttgcagtgagccaagatcacgccattgctctccagcctgggcaaaaacagtgaaactccatctcaaaattaataataaataaataaatayattagttgttaaaggcaagtatatttttgttccacactcaacaaccacaaaactttgcaagaagaatcttaatgttaaatatcagagctgggggtttggagagaaaacgcaactgttcctaagtcttggcactggaactcctgctttcaatgagtcctgtgcccttccattcacattcatgatacaattagttgcatctgtccctgcagccactggttttcattctctgatactctgctatgttccacctcccaaagagcctgggatagagcaagggctatcaaacttcactgatgagcccagtcaatttctctctaaccatttacaatgagcaagtgagcatgcacacgtgcaaacatccgtacacacaatatacaaataactgaaactaacaactcatcaaacattacttacctttcaacatgtcatgctcactgacattttctattcttttctattttatttttaaaagtaatgggctttcacaatctactgaaagattaccatgcatatttcagaaacactaacatagaaaataagactcagtccttggtttttaacagcagtgagtctgcatcccgatccatcatttactctgagaaagttactttaaaaacctcagtatcctcaaatgtaaaatgagaataacaactgcattcatcttaggtgatttttgtaggataaaacgaagagaagtttagaagaatgaccagtrtgtaactgatgttgaacaaatgctagctccttccatattgcaaaattaatgcagcaacatctcttcttccagcttataaaacaaaatgcaccccatagagttagaatacagaattacaaaagctgcagggattaacaatctctgtctgttgatagattttggatcttctagctacagttaaacaagtctgaggcctaatttctggttttgatcaaatgtagtctcacagtcaaagaggtgaagagtgacttagctccctgccggtcctccctgtcagtgacatcctctggtttcatggccagttcatgggttcccagggccttcacccagctggcttccaggagtgacttcattttagtccttggtgtagatattcatgtccatcaccaaccggagtgtgactgtgaacattgtatttctctgatgttccatttcattaactaaaaaattgagataacaatcatttcacgggactataaggagggttaaagatataaaatattgaaagggactagcattgaggaaggatcactaggaagttttcaataaatattagttcttgaattcttcctcttccaataactcctatacatgtatttttaccacatactctcacctcttatgctgccaagaaaagtcacagttagccaatgaagacttgagactggtttgctggaatctgagggtggccactgctgggtaacaatttgagccaagaaaacattccaggaactcctccaacacagtcatgaagaargaaggttcttcttcagtattgttggtggttttcaactacatatcctaaagtacatttttkattctatcgtttcaattattcattcattcattcattcattcaggcttagagaaacctccaggagactgctatcatggcagagaagcccaagctccactactycaatryacggggcagaatggagtccacccggtggctcctggctgcagctggagtagaggtaggttctgagttaggtcatcttaagttggatttaaaattgtgttatcacatacttttcccacagaaactatgagatgttgcttactgaagcattgtgccttaaataaaaakggactgtaattaagaaaaagatgaacagatttgacctattaattcttaaaatytcttctcatctaaaagcaaacatattaaaatacaattaagacactaatcacaaagtgcagaacttaagtggattagaatttaaacaaactgtaaagaataatttataacatttatacaattagaaacatgaatatcgattgaatatatgaagacatgaaataattattgttaatatttcatgtgtgataatgtactatggctgtctttagaatagttaatgtgttttaggaaaacacattgaagtatttaaggattaatcatatggatctgggatttccttggaattattacaagaggagaagtaggtgggcatatagatgaaaccatattggttttgattgataattattgattctaggtgagaagtataaggagaatcattatgcttttctgtttatatttattcatgttcataatttccacaataaaaaaataaaaatgcataatattaaaaaatgattgtaattagaggtaaaatgcaaactacaaatgagagatggaagggagtggattgtaacaaactacctattaaagattgactacattcacagcaattatttacttgagcacttattaattccaggttctgtactcggtcatggagatagtgaacaagacagacacagtccctgccctggggcagcctacgtgtctatgaggatgcagagaaataaacacgtggttaaaatgaggggaggaggcttctagaacacacaagcattccccaatgccacaaaaccacatcagaaaccagaggttttccttaaaaataatgctagtgtgggaccctaattcctttattaaattgagaattttaccctattgtgcctcgtacttcagaagagaaaattacagttgcaagtgtgaaagctgtgcaacagtggcracctatttcacacttagcagggttcctgagaagtggggagatacaaattacagcagaggctccttggtggcaaaatgtttgatagccattagcccatggcatgcctcatgctggggacacacaaggttgtggtctgatctcacttggagacacaggctttcctaagatatgacaacaccataactagaagaactgctcagtgccttttcttcagtgatgtccccctcaaaacatgacctaatcatagacattcatatcagggtggagttgaagtgaactaaaagatttagcagctatgtgctgtgacccatgcacttttctcaatgaattaggtctaaatttccaaatggccatgaccagccccctctgtgtaccctgccaaactcagaaatcttgtattctccaaatgatgcaccagatggggccattcaaggccacagtctataatagaatgaactaacaagaacgtatttactgtttctgcttccagtttgaagagaaatttataaaatctgcagaagatttggacaagttaagaaatggtaagatcaatctctaagttcctctgatgagggtatctagtagaaggtacacggggaggtttgcgcagccggcaatgtctatgggtgtggggcatggtatttgtacatggtgcagagggaraaagtggttaaaatggaagggatgtggctccttgagcaagtctggcaactctctccaggttaaaaggaccagacctctcagagtatttgctagaggaacaatctcccacysctgagaaagccctttctttgttttcatgcttggggcaccatgaatgagtrgtggtcatcagcacaggatcccatacagccctccccatccaagcacatgcaagaacatgcattagacaaaaggaggaggaatagatgtggccactgtcttgagttttttctttcatggggggagtgggactgggtaacactgtagcaatatcgcagactttgaagagcacagaaagggacccttacataaaaacctctcagaacctgccttaaatgtcacaacaccatgagacttactctgggaacttcctgttttaaatggcatcttgttgccagtcctattgtaacttgtcccaacctcttcctaaaatatccatgaagataaatcaacacaaaaaatacaagagtcccactatgtatctggaggggcaataaaaacatatatgaaataaatggataaaaagtaaaaggaaacttcttaagaaaaagaagaactacaggaagctttttaaaaatgttgtttggactgggtgcagtggctcatgcctgtaatcccagtttgggaggctgaggtgggtagatcatttcagttcaggaatttgagaccagtttggccaacatggtgagaccctattgcttgtaaaaatacaaaaattagccatgtgcactggtgcatggctgtaatcccagctattgggaggctgaggtaggagagtcacttgaacctgggaggcagaagttacagtgagccaagatcatgccmctccactccagcctgggtgacagaatgatactctgccaaaaaaaaaaaaaaaaaaatatatatatatatatatatatatacacacacacacacacacacacacatatatatatatatagtttttgtttcaagtgaaatcttaccaggcagtaatttctttgccattttacaaatttagtcatttccacaaccatttgttcatcccaaaagggtgggtttcatagacacttcactctccttttttttcttccttctaaagatggatatttgatgttccagcaagtgccaatggttgagattgatgggatgawgctggtgcagaccagagccattctcaactacattgccagcaaatacaacctctatgggaaagacataaaggagagagccctgtacggtatattttctgttcttccatccacagagaacacagagtgatttaggtccttccttgagtgggtgggacratggcagggcatcatgaccagcagcaggctgggccttrggcatgtacgctgaggtccagtattgcagagtcccatgkagatgagggaacagtgaacatggggagggttcaggcaagggtgattctagaagaggatgcagtccatggatccagcacctcacggtaatttccaaacacggatgaaccatgaactgaggaggatggggaatcatgattccaggtgctcaggacttcagaggctcgactctggccaacagtttaggacaggcatagagtatgtgagagtctgtagatgaaggactggggagggaaagttgcaaagacgccaaagctaaggtcccagtaattccaagaatgatgaccgggaacctaaattaccaaccaagtatatcaactggaatacttgagcagggctagtagaggctggcaccaaggatgctggggttaccttgacacatggatagaagcacaaaacagccagattgattcaataccagcaaaaccaaggggtctccttgctgttgtgatgagactgcatgattccaaataaatcctgaatgaaactgctggcagctcctcaaaaactttaatatagtattaccaatgacccagcagttcctctaacaggtatatccccaaataatcaaaaatacatccacactatatattttacataaataaataatgcgaataacaatattcatagaattcaaaaagtggaaacaactcaaatatccatcaatcaataaatgaaggagaaaaatgtgccttagccatgcaatggaaagatatttggtcatgaaaaggaatgaagtactaatgcatgctataagacagttaaaccataagacatgttacataaaaaaaacaagacacagaaggccacatattataggattctttttgtatgaaatgtccagatagtcaaatccatagaggtagaaagtagattagtgcttgcctggagctaaaggagtggggcttggagaaaaaagaagaatactgctaatggtacaggtgtccttatcagggcgacaaaaataattctgcaattagactgtggttatttttacagatttctgtgagtgcactaaaaaccactcaatagtataatatacctggtggcaattatagtatgtgaatatgcatcaataaagttcttgttttaaaaagtattgtgaaactccagtttgacacaaaagaagaaaagtttgcactggttgtaactgtatagagaatttcaccagggaaggggattcttaggtggggtctcaggaaaggcacacatggctagagttgsgcaacagcacatggaaagggctgtggaaatgtgtttcatgggtgtaattgaaagaactgcaaatatggggcatagaagcagccctgggagctgtaaaatgatgagagaggacaaggaatatggctgacatggctgtgccagggactctcttaggattacttaggaagcaggtctttggccatttgactcacactaagttcatgcacagaacaaaccacaatggagatgataaatcttggcacagcatcagtgggtactggcagtgattctgccaatttctctcatgactgtgaccaccgacgttctttttacctgtattaggtcatgtgtgtaacaaaatttagagatctatctaccttgataggttaagagataaatgttaatatacctgtaaaactcagagcataatgactagactataaaaggcacccactggaggtgmattattttgccatcacctgatactctactccsttaggtttttataaacctataaaatctaaggcaaaaggtatttgaccatttggttgtttctgtctttcaggattgatatgtatatagaaggtatagcagatttgggtgaaatgatcctycttctgcccktatstcmacctgaggaamaagatgccaagcttgccttgatcmargagaaaataaaaaatcgctacttccctgcctttgaaaaagtaagtgaagcagttcagtgttttggggaactgagtttagaggccaatagaaaaatagtggctgggcattcctgggtcactgatcttcactttcagtgagacttcctgaacaccaatgcagcactctgactctcaaggcattttatgaaaatagacttggagaaacaattgtatcatttatacccaagctatacttttccagtaaaattttaatttactggaccccaacatggaattacctgttcaacaagatttcatgttcataagtagaatgtgggctctggaccacactagaggttgctgttgagtctatggaaccccatggactttgactgaacaggggcatgatgaaagcgatccatcagaaaatattctggcaccatatgcaggaagataggagaccaattgcccaaccagagaatactgtagcgtttcagggatgggtattttttaaaaggagagtgattgtgggatgcagaggaagattttttaaaatggattttagagtaagttgcagacatcagtgcagttcacccgtaaacgcttcagcttgcagattataacatagtgccagktgggagtgagagtcaatgctgtaagaaagatgaattcaggttcacccaggtttcctacagatcccagggagatagagcagggaatgaggagagcagacaaagagaaatgaggactctgaaatagtctcctcctggggaagagtgttgtcatgaaggtggagtcactgcccaagggagattggagagggagagagcagaatgtagagccacatcctgaatgtgagggctccacgctgtagggcctggggcagacagaacacatggaggcaggtgctaagcccctggcccatgtggaagaagcaagctgcgtgggtggtgtagatgccacagtgatgtagaatgagaagagaaaatgggagcctgagctacaactgaggagtgagtagagttacagttcttactctctcattcattcagataatgtggagaaagctctggatttctgcacccatgcagtaaggcaacagaggtggggaaagtcagggtggagaggctccgaaagaagcaggggtcctagcctgggtgtgcatgtgttcctgatctgattcctcccattctccaggtcttaaagagccatggacaagactaccttgttggcaacaagctgagccgggctgacattcayctggtggaacttctctactacgtsgargagcttgactccagtcttatctccagcttccctctgctgaaggtgacccatttcacagcccagagaggcagccccacatctcccatcttgggatcttgtatctgggccctgcgactgaccaagttttgccccagtcttctccargccttcagtgccccaaggtctccaaaatgagcttccaggctccaattttgaggaatgaaaacacttttgttatggaaaggaaatctgtgctgcatgctaccccacaaagagtattttgccctttattatggaaagaacccagggcccagcatctctccccatccctctatttcaatgtggtttctgttcctgagttctctgtgatgtcctttatcccatatgtgcccacaatgagccggtctgagcagagccctttccatctggtttcctccctgggctccggctcctgctgtctgacattgtgttcctctctgcacagctctccaggacactggccccccacactgtatctctcactgagaaaaggtggtcccatggtttgtctttaatattttctataactattcccttcccaaataatttccccatgttttcacttctgcttagagactcatctgtgttgatatctcacaggcacattattttttcttgtcttatacaagagtcactaatctataggattagtgtgtaaggagaaagatagagatgactgaactgattaaaacttcaagacatctttggggaaaataaagtgagctacatgtccttccccttatcttcatttctcactgggtgtctgtttctgcctccatgcttgtgctgatggagcagactcacttggtctttgcaggaggggctcagattccctgggtcatgttaatggtggtgtcagcccttggcttcactctgaggctgtgctttatgaattacaggccctgaaaaccagaatcagcaacctgcccacagtgaagaagtttctacagcctggcagcccaaggaagcctcccatggatgmgaaatctttagaagaakcaaggaagattttcaggttttaataacgcagycatrgaggycaagaacwtgcaakaccartrttctaaagttttgcaacaatwaagtrctttacctaagtgttgattgtgcctgttgtgaagctaatgaactctttcaaattatatgctaattaaataatacaactcctattcrcysacttagttaaaattgatttsttytcattaggatctgatgtgaattcagwtttccaatctyctcctagccaacmattttcytggaattamaaattcagtaaaaaaggaaactatagattatgtggtttgtttgacttttccaagaattgtcccgtaacatacaatttgtcatacaatctattaaaatgtcaatgtagaaatgcacttctgacattttcaggtatgcacaggagaagagttaccatcctggataatggcataaagacattttcttcttttcctggacagtcattttatttctgataaaagcgttctttcttatgcatttgcaaaacaatgattctgtctgctgtggattcctcagttttctaggaggtgaggaaatactgaagagcaaacagacccaccctctgctctcaggccaccctattgtcccttacagtgtgtgtgctcctggctcatcctcactctgctccttaaggctctgtggggtcccaggcataagccttctctcagttccttcagtgccactcaggcctggctgccacgatacagatggtatatgtgaaatacaaataactatatgcaaaatcatttttccctggtgtgtcactgtgccagaatgcttagattaggagtgctttctagctccacccccatactggtcccatagtgttaatctctcccaggacacctgggcttctgcaatttgcactctcctcctcttagagggagcttccccacagttggcagaggtggttgagggagcagacaaacacacaggcttcctacctgcagcttcactttgctctagtctcttctccacttacaaccagagtagtttttccaaaatacaaattggaaaaatactcacagaattcttcagtgagtcctgactgcatatacaatgcatcctcacacctgtcttcactccgtgatcttcagcccagtcaactctccgagcatggtggggcctcttgccttcctgcctgggtgcgtttgctagccctgcctggcaagctccttcccagtggacacacttaacactacctcattgcttcccaggagcactgggctgtcctctgccctccacagagtcccagtgagcctctaataacacctgagggccactgtgtctgctcccctgtactgtgagcctgtggtgtgaggcttggcctgctgggtccccagtgcttcatcactaatggacaatgacatctgcacagacccatgcacagctctatgcaactccagaacctgggtatatgagattgggctttgagaactcacaaacccccacactctctacctgtctctattcattcattaatttctaaaaaaaaaaaaaaaattgactcatatccctcaaatgctttgtaaggaccttgcttgcatgctgaccaaaataaacaaactgctaagaaatttttatgggacacttacatgaactagaacgctggagctttgatgaaattaaagaattatagaattttaatatgataagagattatcatattaaacacaatcatagtgtgattatgtttagaaaagaagttcttcctttctagagatgaatactagtatttacagatgaaatgatatgctgtctgggatttgcttgaaaagaatcccctggtagtggtgggagtatgtgggagtttgtatcattttcttgtggctcctgtcacagattcctacaaactgggtggcttgaaacatcagaaaggcatttgcttacaattctgaaggccagaagcctgaagtcaggatgtgagtagggccacattcccctggaagtactagagaacaatccttccctgcctcctacagcttctgggggctcttggcatttctggactttcatggatcatggccacatcactctactttctgcctggggcttccagcacctcaccctctgtgtgtctgtgtcttctattcgctacattgcagggacatttgtcattggatgtagggcctatctggatataccaggatgatctcatctcaagttccttaacctcatctgcaaagagcctttttccaaataaggtcacatttacaggactcaaggatttggacatggacctctctttcttgggagccaacataacttaatccactgccaggtatagatgaagaaatgttgctggcaattgatgaatgcaggtcatgggtaccttcaagcttgttatattattccctctacttttgtatttgctagaatttttccatgtaaattttaaaactatcttactttaggagctcctacaatgtccatgttttgtcccagacaataaggactggactgacataagaaggctctgttctcaggagctcaaggtctagggagaaatcagatattgaatacatcatgtaaattaatgtagggaaagacacaatagagaaaatacagtaggaggtgaaagtggagtattccagtcaggacaaatgccatgtgcaaaggcccagaggccaggaagggtgatttgtgcaatgcagagaggtaacactgtaaaaatagggtggccagatttggcggataagatacaggacacccaaataaatgtgaatttttagacaaacaagcaatacttttttagtataaacatgtttcctacagtgtttgggacatacttatactaacaaatgactgatcctttgcctggaattcatatttacctgggtgccctgtattttgtgtggcaacccagtaagagaagacttccagagtgccatcagcctgcccttcacagacatcccctgccagctatgctcccagcagagatttctcatctgccttagtccttacatccaagtcattaaaaatgagcgtcttcaaaaagccagtttctactgacttactgtaaagagagcaaaatctgctgaaatttttggttagacttttattgccaaccttgaaaaggaacatattaactagttaccttgtgataagaggatgacttgcgatttttcttagaatctggtaggcagttctgcagccctgaaatgtgtgggagtggctgtttttaacttgactctattcctttcagtgggagggagctattgaagcgaacatgtagtttatacaccacattaggacctcaaattaagttgttgagccacaagggtgacagcctttaacaaagtaaatactgatcttagaagtctccctatattacctcatgacctcccatctaggtcactagaaaaatactttaaaatgtgtccttggcacaagaaaaatctgttttatacttatattagtgccttttctgtgtgcttggatgacagtttaaaagttctgcattcacctgcttttggatacattgtttcaacttaaataataaagagaccctttcaaataaaagatatttatttgagaattaagtgttgtaatgggtatatgtttatcacagtaaactatgtatgtattcagggaagttaaggaagacaaagatttttataggaataaaatgaggattaaataaacgttttgaaatacttatcagtcactacaaatgtcaataacaagggtaatgccaggccaagtttcaacaggcagttgctgagcaagtgtcctaacagattcttttattaagattgcgatggcctttgttcaaggttgtgtttttcctagtttgttttgttatcagataaacagtaagaacattctctttatggcctttttcagctctgttgtcagagttttcctaacattgtgactccttttgactctgacaactctcacaatcattaaagaaacgcaaaaatgaagaatttagaaaactagactatgagaatttaattatagtagaaaaattaataccatgaggggaaaaaatagtcacgatgttttgtccggaattggtgggttcttggtctcactgacttcaagaatgaagccgcagacccttgcggtgtcacagttcttaaaggcggcgtgtccagagtttgttccttctgatgttcagatgtgttcagagtttcttccttctggtgggttcgtggtctcrctggctcaggagtgaagctgcagactttcrcgtgagtgttacagctcttaatgtggcacctctggagttgttagttcctcccagtgggttcgtggtctctcaggcttcaggagtgaagctgcagacctttgcagtgcgtgttacagctcataaaagcagtgtggacccaaacggtgagcagcagcaagatttattgcaaagagtgaaagaacaaagcttccacagtgtcgaagggaactgagctggttgccactgctggctggggcagcctgcttttattctcttatctggccccacccacatcctgctgattggtccattttacagagagccaattggtctgttttacagagagctgattggtgcatttacaatccctgagctagacacaaaagttctccaggtccccactagattagctagatacagagtgttgattggtgtatttacaaaccctgagctagacacagggtgctgattggtgtgtttacaaaccttgagctagatagagagtgctgattggtgtatttacgatcccttagctagacataaaggttctccacctccccaccagagtaaccagatacagagtgcccatttgtgcatttacaaaccctgagctagacacagggtgctgattggtgcatttacaaaccttgagctggatacagagtgctgatttgtgtatttacgatcccttagctagacataaagatctccaagtccccaccagactcaggagcccagctggcttcacccagtggatcccacaccggggctgcaggtggagctgcctgctagtcccgtgccatgtgcccacattcctcagtccttgggccgctgataggactgggcaccctggagcagggggcagcgctcgttggggaggctcaggccatgcaaaagcccacagtcagggggcggggtagggggagaggctcaggcatggcgggctgcaggtcctgagccctgcctggcggggaggcagctaaggcccggcgagaagttgagcacagcagctgttggaccagatgctaagcccctcactgcctggggccggcggggccggccagccactctgagtgtggggcctggcgagtccacacccacctggaactcgcactggcctgcaagtgcctggcgtagcccaggttctcacccatgcctctccctccacacctccccacaatctaagggagctggttccagccttggccagcccagaaagggactcccacagtgcagcggcgggctgaaggggctcctgaagcgtggccagagtgggcgccaaggctgaggaggcgccgagagcgagcgagggctgcgagggctgccagcacactgtcacctgtcaatgtcattttaggtcatctgagaatatgatcattgccagagcaaaagtaggtgtttatgctaaagttacattttctagacaagtaatcaacacacaattattgtgaacttacatttggcaagatcacagacttgggaattcccaatgactggtaaaagggacatacaactagacagttccatgtctgcagttgcttctccaaacctccatctcctgctgagaaaagagccaccaacacctgccaagcacaagtctaatttgcaacttgatggtagatatcacacattaatgcttctttcaggaagtgctttgtgatttgttgtcaagtgttgatgccattggcttttcaatatttctttaagattgtaatgctccaaagggaggcagaatgttttgagagcagttttctagaacttacaggtgaatttaagtctttagaacttttagttctataaagcaagatgacctagattaatgattaacaaaattaaaaacaataatgcccttcttgtgaattttcagattcctgattcaacaaatatctgttaatccttgtcctttgcccaattaaacacttgcctgataaccttgctctttccaaattcctcctttcttagtccttctgggtctactcagtgagccacacccatatctttatttattctgtgaaattgtagaaaattgagtctgataatcaggattggttgatccattatctggaatctattatttaatttttctatttaattttttctatatcatttgattttctcatcaaggaagttcaaaagatgaaattatagaactctctgtgactgctaaaatgtctagcattgctgtgtgatctatccaagtatcagtgatatagtaatactaccatgtgcaatacactgtgttaaacatactgtgagacctctctgctctttcggaacctcacaatttagtggtgacac

SEQ ID NO: 94507 - DNA, 22298 bp, Homo sapiens
catggctccagcctacaatgggtgcaacacatgcttgatgggaaatggggtccaacctggggcaaatgaggagcagggcagagctgccaccacgccctgcaagtgggagcaggagccctcacgcaggctggccccgctctgccaatggccctggccatggcacccggggatggcagctcctcaccctcctgacccacaccatccgcccccgcagcaatgtgtgctgtgcattctggggcaggcagagctctggctgtcctccatgggagaggcggcctctgtggcgttcagtccggggggctggagaggacacaatggcagggaatgagctgagactggggtcctcatcctcacccaggtatggccatcacctgaggcctcgaaaccaggtgatgggccgccaagttgagggctctggcaaccaccttccccgtgggagcctgggtgtgcaacaggcagtgcatttgcacgcagcaccagggtccagggaacagaggtcctgaagacgggacagtagggtcctgtttattccagagtgattttcagatctctcttgcctgactgggaggtagatgcagtggggagctggagccagtccctggagcccagcgctgagctctttgtgatggaggggtggggtgagccgcaggatctaggtcaccgtgctctggccctgctctctgcctttcgcaagcgcttgctcccgtgggatgtttgtcatgcttccatgcatgacacaggagaatatcaacattggtgccatttcacatctcttcattcatctgctattcttccaccttcagcttctcataaaatcacagaactgcagtgaggacctctgcctgccgggacagcctggggatggtcccgtgcagccccctcaggcagcawccstgtggaggrttcccctccgccccctaccgtggggagctcttcccrgctgagtcacactgcacgcctggtccctaccctgggctgctctctgtgttatcttgcaggcgccgtcccagatccttcaggggactctgaaggcccatcagatgtggctgcagacccacctccctcagaccctcagctctggatccaggctggctccctgccgtggagcacaggcgccctttgtagcactcactccagctgcccagggaatcggggacttggtgtggactgagactcagcccccttgaagccctattctgtccaccgctgcaagacataggcggctttaagcaggaccaggccgcaccctccaggcagagacagctgctgtgggttctgtgctcttctaatgggcatgtcttcccatcggtgatgaggactgatttgtgcagtgacccccttacatttttctgaaaaggagatcaaggaaaacattcttcagtagaatcctcactgtgcacacacttccccttgtgctcggtgacagccactgcctttgggagcagggaggacgccccagaacctcctggtctccgcacacccccctgagctgggctgagcacacaagcacccctctgcagacagtagaggttttgggattcagaatatgcagtctgaagctccccagagcctggctctttagtcaggccctccttgcccgccctgtgaatccacgcctaggagcctgtgcccccacccagcaggagctgatgctgctgagcttcccaggtgccagacaggggctgagtgtgggggccagggagccagtcgggagtctgctgcctggcaggccatgtcctgcagaagagaggccagcatagggcacggtgggcctggaggggctggagacagtgctgctgggtcggcagagctagagaagggcagcccaggcagggggcacactagtgccaaggtgcaggggcatgaagctgcaggtcacacggcctccctcggagcccccaggtactgggggtgggttcaaatctcacagggttggcgggcgagggcttcaggaacagcagggacaggagcatgagagcagtagaaaaatgcaggggtcaggaggatcatctgggacccaccaggttgctggtgaattcaggggatagaagggatgtgagctcaggcctcgagcagctgcctgattgggacagcccctggctgggccgcgaccaggtcacagcactttgcaggagtcaggcctgggctccacggtcgtgggttctagtctcggctgtttagtctcaagcagatctccaccgcgccctgacctccacttcctgcgtctactcagggtgaaaaaacaccccattcccagcacaggtcagggttgcccgagttgatcatgcaggtaggcctgtggggctctcaggtgcctgacaccctgcatgcatcttggcctcttccctcatcctcagcctcagatggactgagccatctggaacctgtcagtggtggcctcagccctaactgcagatgacaggcttgggagtgtggcgacatgtgtcacctggagcaaactgctccccctctgaagcctgtcacccacaagacctgctcccaagggccaatggcaggtgccttattctttcgtcgccatcaccgttgccacctccccaccagctccatccttctccgggtcccagccctggggcgctcactcccctgtgtgctgagggaggcccagcatggttcaaatgcagcctctggagaatttcttcactaagaggctttttctgaaaagagtcaagctatttgtagcccaagttggttgaacagatttttcttggtgtagcttatttttttattcattaacttcttttccttaygaattaaaaaatagcattttttttttccacaaaggagtgctttatttacttctttttgtaccacagccagcgcttcctctgcctgctggggaaagtggatgcacacacccactttggcaggcagttttctttcaagccatggcatcttggagaggtaagtgtgtgtgttcagaccactgccctgtggctccagcccccctgatatcagccacagccccaaggcttgggtgttgtttgtttgttttttcattttttttgagacaaggtctcactctgttgcccaggctggagtgcagtggcaccatcacggctcactgcatgcagcctcaaactcccaggctcaagtgagcctctggcctcagcctcctgagtagctgagactacagactcatgccaccacagccagtttttttttttttaatttttaatttttatagaaacggggtctcacattcttgcccagactggtctcaaactcttggcctcaagtcatcctcccaccttggcccccgaaagtgctacaatgataggcgtgagccaccaggcctgcctggttggctttttggtgaacaggagcataataagggtttcactgggctgtcagcctccattgtggtggccagtatctcaaagcctcacctggcagaactggagacgcgtctgctgaccgatgccctcatgacccattttcctgacttcagaaatgtcccatgcagacactatgccatccagcaggcctcccagctagacagggtgcagcctcgatgtgtctgtggagggactcgggctgtccctgcactcacagtcatggtgaccaaagtcccagagtaagggagcagatgccgcttcccccttccagcccaggcattttacatgaggcgctgacccaggaccacccttgacttcactcttccaaggagtggctcccagtcctatatattccatcagcctccaggctggctgtcccttaaacactggtctccaatctaactgcatttctgtaagtaatcttttgggacagacttttttaaaaaagatcatgtttatgccgtattcctcatctttcttgtcttctatctccagatttgttttaaaacctattactcctgtatacatgtgcctcccaccctttgagctatgcccttgacctgctatgcacttgtctcaaggccaagttcaaaccccctaacccaaggctgtccagagctgccctgccacctgagccatggggaggggcgctgagctggtgcctttcacaggctgcctgcctccccctgggcagggctcctgtctctcctcctttgtctccacaagcacaggcttgcatgggtcagcacgtggtgaacagccaaccatcattttccaattctttccaaaaagtcctgtctatgctcagaagtcctgcctggccctttgagtgcccctacccccacacacacattcttttttttttttttttttttttttttttgagacggagtctggctctttggctcaggctggagtggagtgcagtggtgcgatctcggctcactgcaacctccgccttctgagttcaagtgattctcctgcctcagtctcctgaatagctgggactacaggcatgtgccaccatgcctagctaattttttgtatttttaatagacggggtttcaccgtgttagccaggatggtcttgatctcctgacctcaacacacatttctttatcgaaattccaaattctccaaagctcagaaacataaaggtttttcaaaactcagtggcaaagctggacctgaacgatgcgccatcacttactgtctttatttcttccagttcacctgaatacatatgttttgccccgaaaatataaatgggtctgattatgaggagcagccccaggttccaaagaggtgccacataatgtatgatgtatacaaaaaagcctgagttccaaacacatcttggatgagaggttgggactgtgggggatccctacactggttagagttctagacccagagcagggttatggtcaacggcgctctggccacagaatgcagcagagcaaggactgtggaacaaagacgcggcttacatgaatttttcacttaccgtgctgggtgctggtgattcagagatggaaaggccctagcgacacccccctccacccagggagcccacgggccagcagagggaccaaggggcacaggacgggtggggagcagaggcggattccctggctgtggaggtactgtctatacggggtgcaggagacatctccatacaagggggccctcacctggggaggtggtgaccgcaagcctgacagccccaaagccttcagagatgccgcctggggacactttgggaaagtccaggcggaggacacctgggaatgtgatagtgacacaaatgaccggagagacttgctctcagtcactgagtctggctgactcactgaagattagggcctgaacttccccctctgtaaatggggtgcaggccctggccctgccttcacagtgcccctcggtcccctacaagccttctccgcagggtgggatcgggtctgcctggagcatccccacagcctatgggtcagcagagaagcaggcgcagagctggggtgagacggtcagggccggtcctgccagacacctcagatcactcctcttcacaaataatcccattttacagcccaggaagagagaggccggaccactgcccaaaagcctgtggcctacagcctgccaggtgcgtctgctcgcagagcaggtctgcgcagcaccgagcggtcagcaggggcaatgctgggcactggccagccgcgccaggaccatccctgctgacctcggcggggtggggcggagcgtgcagggtctggcccggaaagccagggcaggctttagagaagggccaccggacggatggtccgaggaccggcatggacccgggtcccagcgagggcggggggagcgtaaggctgggcctgggctgcggcaccggggaggtggcggggaggaggccggcaggaacagccgtgcagggcgggggcggcgcgggtctggtcgggtgaccccgggcgcggccagggctgtaggaggcgagggcgtcgccccgaggccgtgggctcgggtccatggtgggggacctgggtccccgcccccccgggccgccctgggtcgcgcgtgggcgcggcgggcgccgattggctgccgggcgcgcgggcggagcgggcggcggcggcggcggcgcggaggggccgctcaccccgcagcccggcctcggcctccgccgcttgtygtcgcgccccgcccgcgagcccgccccgcacgtcccccgccggcggccaccatgagcacaggcctgcggtacaagagcaagctggcgaccccaggtgagcccagcgcctgcccgcgtgcccgcgcgcgcctttgtccccgccgcccgcgcgcctctcaccgtgtctctccgtctctcccccgcccgccggcccggacccgctcggaaccggacccggactcgaccccgaccccgaccccgcagaggacaagcaggtacgtgcgcagcgccgctcccccgccgggagacccggccggctgtcacccattgtgacactagcgccttgggcgcccaggcgcgaccccgcccccgccggccctcacccagccctgtcgcgatcaccgattgtcagccgggcagtgccgccgcgcctggggcttcagaggagaggagtgggggccctggtccccggacccgcacagcagggaccctgcgcccctccccaggatggggggatgggcagagtgtccccctcccacagggccagtgccagcatctcctgctgacctggcctgtaggccatgagctgggggtcctgggtgaggccatggtcgtggcaggccacgctgggggaggggagtcaggctccatcagccagcacagtccctgaacagccctacagcagagggcctgtggtcaccacccacctcccctgcaccttcatgcccctttccctccccatacacaaatttgagtgttcaggtctgcaacagggactcttccccagattgggaacccccagggtctggtctgagtcattctgggtgcccagatgggtcctgggaccctgtgggtacaaataggcttgtggcttctcaaaagggttggccccaccctccaggaaagcaagactggacaggaggctggtctaggcacctgggtgaaacccagccgagctcagggttaaacaatgctgtgaggcccctggggtggggcgggggctgacaaccaggtgggctgggggggctggggaaagcctgctggtgtcctctctggcttgagctcagccatctttggaggaaaaaagaagagcccaattctggcaccagggtggcactggcagcccccatcagggatggagtttctcaggagccatggatgctgagtggaactccagagtcctggcccagggtgcagcaggcagggcaggagggcgggcaggggggccaggagctgggggagtcactggctgaccagtgccattctcctggaagggacacaccccacccagaggtggatgaggctctctgggaggggccccttggggagccaggctgggagctgcctccccatcacagcaggtcagacaaagcctgagatgcagggacacatgcgtcaggctactgtttgagggaaatggaaggaactgaggctgggaaagccaggaggccaggcccctgaggcttctcctgtgcctgcaggtgtccccagcttgacccaagggcactctgagaccctgggctccagccactgctgttgggtgcagccaggttctcttgcccattactgcagggtggggaccccctcctgctgaggtgcccatcgtttgaggtcaaccgggagtccacctcaccccatcccaggcctcccaggcctccaagcccagaggaagaaggcactgtgtggccaaggaagggagccccggagcaggagccaggccaggtgyctgggtgaccagtgggtctgggggagctggaagcacatggcagcttccctgctaccaccgttgctgagcctcagcctgtccaagcattctttttgctctttgaaagggggctgtagaggcattgggggagttccgtcactacgctctgtgcccccacctcctcacaggcagcaccggtgatctcttggccctggctgctgctcccagagctgactcgggtgattctaagaatggaagtgccagagaggctcaggcattgggaggagatgggcgcagctgtgtcatatggctcaggaagccctgggagtatcttttgtcacttggggaccagagaaagggggtggcaggtacggccccttccttgaggctcccccagggaatccacaggccctgactgggccccagtgggtggcagggcaggtgggttgaacgctgagagtgagattcttgccctcctgacctgggcctccccagaggctgtgccttaccaatggggaaactgaggcaggcagtctgagagccacacactctgttagacacctcctagcctgaggcctaggcccagggctgtctgtcttcctggagatgccctgggcctgagatgccagcctgtctgggtgggtgctgggcttcgaggtgtggaccctcagttggaaactgggtgggactcagcctagaggcttcctgcaggtcagggccatggaaggctggggccagtgaggaggctttctggcagcaaggactgagggatgcactggtagagctggggggcctggagctgccccctttccctgggatgaaaggctctcctgttcccagctgtgggcctgcccctcctccccaggtgccagtggtccaggccccacaacaggaccagggcctggacaggaagtggaggaggtctctcagccaggagagcctaagggagggctggtggcgggtggggtggggtggggttggggcctccagcttctaatgttctaatgtgcaggggcttggcctgaccagtcctaccctggaacctttccaggccccatgtcctgctccgctgggcttgcctgttgggattctactggggtcatggaggtgggtggcccacagagcggagctcgggagacccccgcagtcccyggagtagccacatgggagggaggcccggctggcaggagctcccagtccctccaatcctgtgggtcagagctggtgaggatgctcagagggcaagggaatgtccacagaagcacgtgggagatgggtcccatcccacccccacccctgtctctgagggcagggccacctgagggctgcagggcagcgcatgggtggccggcgtttattcagcaggctggcgggggcttccaagttttgcagggacctccagtactccggcagcctgcacccttcctttcccttcccttcccttctgtccaccctaagcctcctaggggacaggcaggctggacttcagaaaaggtgggctctgccctcctccggtcccccgaatgtcttgggaaagagtccaccaaacacacatgcacacacccgcgcacacgcacatacccaatgcatgcacacacgtacacacacacgcatacacgcatgtatacacgcgcacacacgcaggcattacacacacacacattacacacacacacccgcacggacgcgcacacacaaacgcgcgcacgcacgcacgcacgcacgggggaggtcagccccaagcagggctggggaggggtgcagggcgcggcgtgtctgtgggcacttggggcgtcgagacgccgccgggaggttttcgggcaagtctgcgagaagacggcgggccctgaactgggcgggtacccgcgctgttgcgcgtgggtcccgggagcggcctccggcgccctctggcgggcggaagccgcgcagcacctcttgggggcgggacgcgcggtggctaccgactcccggcccgccccggcccgcgtgcaggacccggtcgtcccctcctgctgtcctggagcccggactgaggccccgggggcgcggcagggctcccggtccacgcgagccatggcccgaccgcgcctcggctcagccctgccctccgcagccgctttcgggtggctccgcccgcggcccaatttccaggcgaccgtttcccggcgacggcgggcggggccgtctctgccgccccccgccgcgcgctccgcgggcgcctgcgacgccccgcctctggctcgggtgcgggagcggggcctgcccggactgcgacgccgccacagcttggggccagttcgcccagtcagggggatggctcggtcggcctcgggggtcgacgatcccccgggtaggcgacgtgccctgtccaggcctcacttcccgcgtccgcaaaacggggtggacaacgcagcctaaggcagagccgcgccaaggtccctcgctgtcgccgggctctggcggcctgaccgggcctggggtccgagcgtgcccccgggcctgggggggtcgccgcgatggactcgctggcagcgccccaggaccgcctggtggagcagctgctgtcgccgcggacccaggcccagaggcggctcaaggtgcgtgtgtggagagggcggaacgtgggtctgtgaccccgcgggctccgggactcggcatggggtccccgtccccgcgcgccacggcccgccagcgcctaggctcagcccttccctccgcagcggcctcgcaggtccgcggccccacggtggggcgacgtgccctgtccaggcctcacctcacgcgactccaaaacgcggcggagaatgcggccgtgggacccctccaggggccccaagggtctgcgggggctgggcgcctgggcgcgcgggcgggggaggctcggcgccgcggtctataaataggcgctgctccgccaccgccgctgccgccgcccccgcggctggatccgggccaggtggggcctcccgccccctggcactctccggaggggtgagtgtcgaggcccccagcttctccggcttatggagggccttgagtgtgtcccaggggtcccaatcctgctgccctctgcccgaggagggaggacatcgcctgtgcctgctgcggcctgacatctccccacggaataaatacagtgtcggtccctgcagagccctccctgggattggggccaggggtgccttctcctgccaccacctcgcctgccttcttatctccaggcttttgcccacgggccctccccttatttttgccaacgaaatgccccaccctgggaaccgtaccctctgctgtctcctcataccgcatttggtaagagacagggtattgggcttctggagaaacctttgtgtccctaccctgttccatcctgtccccaggacattgacaagcagtacgtgggcttcgccacactgcccaaccaggtgcaccgcaagtcggtgaagaaaggctttgacttcacactcatggtggctggtgagtgggccaggctcctcgggggagtggctggggtcactggccagccaagctctgtcgttggagccccagacctaacgcagctccttctctgtacctgtgtgcaggtgagtcaggcctggggaagtccacactggtccacagcctcttcctgacagacttgtacaaggaccggaagctgctcagtgctgagggtgagtggcccccaggaggccctggcactgatccccagtccccttccatgggacctctccaaggactccctttcaggtccagctcccactgttctgttctcgcggtgtgggtcccctgggggtagggccaaggcaccaagatggatgaggacgagggtcctggctgccaagggtgaggggctgagggttggagaggcccttccagtggccccttccccgtagagcgcatcagccagacggtagagattctaaaacacacggtggacattgaggagaagggagtcaagctgaagctcaccatcgtggacacgccgggattcggggacgctgtcaacaacaccgagtggtgagtgaggcctgctgagaaaggccttgcctaggcggccacagcactcgaggcctggcctcacctccctcctgcccacagctggaagcccatcaccgactatgtggaccagcagtttgagcagtacttccgtgatgagagcggcctcaaccgaaagaacatccaagacaaccgagtgcactgctgcctatacttcatctcccccttcgggcatgggtgtgtggctgtcctggggccaggctcgggagtgcagcccctacaatatggccccctggctgtgcctatgcccacccttggctgctctcggcaggctgcggccagtggatgtgggtttcatgaaggcattgcatgagaaggtcaacatcgtgcctctcatcgccaaagctgactgtcttgtccccagtgagatccggaagctgaaggagcgggtgagcctgccgtcgcacaggggcctggccagggccctggggctgagagtaccagggggacttgtctggcctcaaatctgatggtccttgccccaccacagatccgggaggagattgacaagtttgggatccatgtataccagttccctgagtgtractcggacgaggatgaggacttcaagcagcaggaccgggaactgaaggtgaacatgcagactggtggggcaggggggatggagctggtgaggggcagaaccagagggctttgtctccttcacattgagcctgctggaggagggccaggtcagcccagttgggtgcaagagtcatttgttctaggagtagaggacctgtacccccttcatccagggctagaaggtaaaggtcaccatgtctttgcctggctggggtgggtcatgtgggccccgtgtggtgcttggcaggtatggagcacttgcccagatccagaggtgcagcagtgggccaggcccccaaccccaaccctcttcccatgggtcaccagaggaaggggctgccccagtggcacaccctggctcccagatttmtgagctccagggttggtggctttgggtgccccggcagctagagtgatgatggagaccatgccaggggcaggtggccaccagggcaggggcatcagcatggggagacataggctcagccctggggagggaaggggcagctggagggggtggttcttgatgagggaggagatgaggagggagcatgcctggttgggcatagcctggaaaggccctggaatgtgagccacatgggctyyggctccagccaggggcagagaggccagaaaggggcaacgccaggatctctttgaggagagatagttgatggtgatgctggaggggtgccccgggagttacatgcccgtttcccatcagtaaccgtgcaattacgctcaccgggtgtgagcctttctccctccttcccccaggagagcgcgcccttcgccgttataggcagcaacacggtggtggaggccaaggggcagcgggtccggggccgactgtacccctgggggatcgtggagggtgagtagagtcttggggtaccaggtctggtgggggaaggctgtyctgggccggcgccagcccactacccacccccaccccgcagtggagaaccaggcgcattgcgacttcgtgaagctgcgcaacatgctcatccgcacgcatatgcacgacctcaaggacgtgacgtgcgacgtgcactacgagaactaccgcgcgcactgcatccagcagatgaccaggtgcgcgccccagccgcgagccagacctcgcccctctggcsccgcccacgtctccataactgagggccggtcctgtcagcccacccagacttgaactttgcaccattccctaagccccccccctcccccagagcctggtctccctagaaccaagtccagggctgtgagggctccggagggcagggcctcagcagtggcggggatgggccaggcatcgccagcccacgctgagcctcccggtggcgccgccccgcccatcctcccccccgccccgcgcagcaaactgacccaggacagccgcatggagagccccatcccgatcctgccgctgcccaccccggacgccgagactgagaagcttatcaggatgaaggatgaggaagtatgtggggcggcgggggcggcggaggcgggcgtcagggatgctcctccgcggtgctgctcacccgccgggttgtctccgcccgcagctgaggcgcatgcaggagatgctgcagaggatgaagcagcagatgcaggaccagtgacgctcgccgcggacacaccgtccgtctccgggacgccctcgcacccctggacaccagaccggactgttcccgacccggagacgcggggccacagcccccagctgaccctaatttattctcagcaccaccccctcccaggtcattgtgtctgtttccgaggggcctggaccgtagcccccgcccagctggccctctctgaccttgggggatcaggagcgaagttgggcgggacttcagagatccgcctcccttgcccttcccccgcccccggacggtcacagcacccaaaccgcaggccctgctctggcaggcaggcaaagctaggcagaagaggattcccaggatcctgggtctgttccctgccccagtgctgcagaacggacttgggagccctcctttgcctgctcccgcgggtcacccagcgagtgctgagaccccattttctgtcgaggcsggccgagtcttcccttatccccagacgcctagcgggcagggttgggctgaatcaaatgggagccctccagacataaggaggccagaggctgcaaggagcggggtcgtgaccgcttamaccccttctccacagcccggcccgacctggagggcccccggggcactgggcggtgagccacctcctggcaactctcggtgccgtcccctgccctcgctcgaggcctcttctccccagcaccgctgtggtgtgccgggatcctgagcctaggcctcccgatgttcccacccgcatgatcccttcccgccacacgatgctccgttttcttccgttgtgaatgccgcgtcctgtcctggtgacaggagaacaatgttggtgaacgtcgcagcgggtgtccgagtgctccgtgtgcccctgagagcgggtgggagcggaagcctgagcggcctgcggcctccggcgatagtgtgctatctgccgctgcagcgcgcgtccgcgcggcctctgggctatttctggccaggccgcagcactgtggtcggtgcgggcgtggcaggggcggggcggccttatcgctcggctctcccgcctacgcctcccgctgcagagtaagccgggctgccgtcttctcgccatgggctccggtgagtctggagtccggtcgggcccccggctgctccctaggccgacccgggttgagaggagctctggtcstttggctgcagctggragagacttgggtcagacttagaggggacttccagccggcgtgcggggtggtcagggtggagaggctggcgggctaccgggacgccgggcatcaggggctggatggagccgggccggcagtctgggtactcagagatgtcgcccaggtgcccgccgaccgctcggcttactgcggcgcttcccttgcagggccgcgcggggcgctgagcttactgctcctgctgctggccccgccgagccgcccggccgcaggttgcccggcgccctgtagctgcgcggggacgctcgtggactgcgggcgcygcgggctgacttrggcctcgctgccgaccgccttccytgtcgacacaaccgagctggtgctgaccggcaacaacctgacggcgctgccgccggggctgctggacgcgctgcccgcgctgcgcaccgcacacctgggcgccaacccctggcgctgcgactgccgccttgtgcsgctgcgcgcctggctggccggccgccccgagcgtgcgccctrccgcgacctgcgttgcgtggcgcccccagcgctgcgcggccgcctgctgccctatctgsccgaggacgagctgcgcgccgcttgcgctcccggcccgctctgctrgggggcgctggcggcgcagcttgcgctgctgggccttgggctgctgcacgcgttgctgctggtgctgctgctgtgccgcctgcggaggctgcgggcccgggcccgcgctcgcgccgcagcccggctgtcgctgaccgacccgctggtggccgagcgagccggaaccgacgagtcctgaggagagaaccggtgcgtcctgaggagagaaccggcgctgggcaacacgggcctgcaaactcgacaggaccctgcccgaggggccctcgcgccaacctggaccggtcyccgcctcctccgctgcccaatctctcagacccaccccacctgcaggcccagaccacgtgggacagaactcctgcccaccctaccccgagggaggcgaacccgcacttccaggcttgggaggaccatggggcacaatgcggtccagaccctgctgcgtctcccttccaaactctggtgctgaataaacccttctgatctggtcttctctgcacgactgacctggaaattcccctcgccaaactcaggaaaaggccccaggaggcggttcaaggggacacaaacacatcctcacatgcccaccctaacctcaggggcagacaggagtcagtgggtgacctctccccttccagacacactcccaaaaggccacatgggaaggcatgagagagatgctaagtgataacgtgggggccagtgaggacgttgtggggacactgaggaccctgtgggggcagtgaggatgctgtggggatgctgtggggacagtaaggacactgggggcagtgaggacgctgtggacactgcggacgctgtggggacaatgacgctgtggacagtgaggacgctgtgggggcggtgaggacactgtggagtgaggacactgggggcagtgaggacgctgtggacagtgagggcgctgtgggggcggtgaggacgctgtaggggcggtgaggacgctgtgggggcggtgaaggcgctgtggggatggtgaggacgctatccggggcggtgaggacgctgtggacggtgagaacgctgtggggacactgaggatgctgtgaggacgctgtgggggcagtgaggacgctgtggaccgtgaggacgctgtggggatggcgaagactctgtgggggcggtgaggactctgtggacggtgaggacgctgttggggcagtgaggacgctgtggaccgtgaggactctgtgggggcggtgaggactctgtggacgcggtgaggacgctgtgggggcggtgaggacgctgtggacagtgaggaggctgtggagacaatggggacgctgtagacaggacgctgtggaggcggtgagggcgctgtgggggcggtgaggacgctgtggacactgacgacgctggaggtaacaatgaggacattggggacaatgagtacactgtgggggcggtgagaacgctgtggacactgaggacgctgtgggggcggtgagggcgctgtggacgcggtgaggacgctgtgggggcggtgaggacgctgtggggaccgtgaggacgctgtcggggccgtgaggacgctgtcggacgcggtgaggacactgtcggggcggtgaggacgctgtggggaccgtgaggacgctgtcggggccgtgaggacgctgtggacgcggcgagggagctgtcggggcggtgaggacgctgtggacgcggtgagggcgctgtggggacggtgaggacgctgtggacgctgtcggggcagtgaggacgctgcggacgttgaggacgctgtgggggcgatgaggacgctgtcggggcggtgaggacgctgtcggggcggtgaggacgctgtggacgcggtgaggacgctgtggggacggtgaggacgctgtggggaccgtgaggacgctgtcggggccgtgaggacgctgtcggggcggtgaggacgctgtcgggacggtgagggcgctgtggacgcggtgagggcgctgtgggggcggtgaggacgctgtggacgcgatgaggacgctgtggacgctgtgaggacgctgtgggggcggtgaggacgctgtggacgcggtgaggacgctgtggacgccgtgaggacgctgtggggacggtgaggacgctgtggacgcggtgaggacgctgtggacgcggcgagggagctgtcagggcggtgaggacgctgtggacgcggtgaggacgctgtggacgcggcgagggagctgtcggggcggtgaggacgctgtggacgcggtgaggacactgtggggacggtgaggacgctgtggacgcggtgaggacgctgtggacgccgtgaggacgctgtgggggcggtgaggacgctgtcggggcggtgaggacgctgtgggggcggtgagggcgctgtggacgcggcgagggcgctgtcggggcggtgaggacgctgtggacgccgtgaggacgctgtgggggcggtgaggacgctgtcggggcggtgaggacgctgtcggggcggtgagggcgctgtgggggcggtgaggacgctgtcggggcggtgagggcgctgcggacgttgaggacgctgtggacgcagtgaggacactgtggggacagtgaggacgctgtggacgccgtgaggacgctgtcggggtggtgaggacgctgtgggggcggtgaggacgctgtcggggctgtgagggcgctgtggacgcggtgagggcgctgtggacgcggtgaggacgctgtgggggcggtgaggacgctgcggacattaaggacgctgtggacgcggtgacgacactgtggggacggtgaggacgctgtggacgccgtgaggacgctgtcggggcggtgaggacgctgtcggggaggtgaggacgctgtgggggcggtgaggacgctgtgggggcggtgagggcgctgcggacgttgaggacgctgtggacgcggtgaggacactgtggggacagtgaggacgctgtggacgccgtgaggacactgtcggggtggtgaggacgctgtggacgcggtgaggacgctgtcggggctgtgaggacgctgtgggggcggtgaggacgctgtgggggcggtgaggacgctgtcggggcggtgaggacgctctcggggcggtgagggcgctgtggacccgatgagggcgctgtgggggcggtgaggacgctgtggacgcggtgagggcgctgtaggggcgatgaggaggctgtggacgccgtgaggacgctgtggacgcggtgaggacgctgtgggggcggtgaggacgctgtgggggcggtgaagatgctgtggacgcggtgagggcgctgtgggggcggtgaggacgctgcagatgttgacgctgtggatgctgtgggggtggcgagggctctttggacgcggtgaggacgctgtgggggcggtgaggacgctgcagatgttgacgctgtggatgctgtgggggtggcgagggctccgtggacgcggtgagtacgctgtggacagtgagggtgctgtggggacagtgaggatgctctggggggcagtgagggcgctgcgcggacagtgagggtgctgtgggggcagtgaggacacggtagacagtgaggacgctgtgggggcagtgaggatgctttgggggtggtgagaacactctaggcagtgaggacagtcccagcagtgtgtctcgtcctctgagcatgttcaggggctggttcttgtggacagtgccggccttgaggacaccaagagcatttcaagggttgggtttcctgatgcagggactgcggcgttggcagcattcagttcactaggggagcgttggggcaggtgaccagggctggttcaggtctgttgctccatccgggatccctggaccatccgaatgagaagatggcctctatgtgacagagtcacatgcggtgggggttcttggagggccccacagcgatgagtggacctcaggggttgcagggtctctggaatcattgtgttctggagtgaacttgcccccccacaggctccaccaacacccccaaaccctcttcctgccatccctccccatcccacagcagcggccctggccccagaccccttctgccagggctcagggctggcagcctgctcctgccagccaagagccgttcctgtccctgcccacagctgctgccttccccaggctcccaggctgcaccacacggggcctgcatgttccttctgactggcacaaggtactctccatgccactgctccttgctcatctcctgtgcctctggcgagtcccccaccgggccaccacttccctcaggaaggcctctccgactgcccagaccagcaaggggcttctcagagttctccagtctctggcctcccactgccctgcccggattctggagctgagcaaacaggtcagcacatggtgcccaacttaggaggtgactgacgccttcctcactatttgggctggcctggggtgccagggacagggttcctctgccaccgtccatgtggcccccacctgtctggccttatgaacaatggaaactattctccatgcatcccagagaggccccagatgaggagcctcaggtcctggctgcccggcccaggaaggccctcagcccccaatggccatcactgaccaccactgaccgggtcggggaggctgccactgacatggcctttgtcctggcctttgtgggacaagacagatggccctcctgtggggctgatgctatctcgaggctgccagtcagacgtgaggcaggaaccacccctgcctttgtgagcaggtgcagggcatccggcccattgtgggctgcagccgactgtggttgtccatccggccttatcaccacatcgaggacagtggccccctttatacaaatgaactgcccagcttgccctccccagcggtggcctggcacctccagaggtcctagtgtaggtcagaggtaaccatcgtcataacaccgtgcatgtgcaacactctaaactcagtccaagcagggcaggggagggggtgtgctccccactttctctaagaaaccagatcccagaagggggctctctgctgggccccagagcattttttgtgtgaactggaaacagggctgaggcaggcctcttggatcccttctctgcctcactgaggtctttggggtgcaaatgtacagcccaggagaaagtggcccagggtcttaggtggcccccagccaagagaaggamgctcctctggtctgtgggaaaaggccccagcaggagatagggggagtgggcagcccactgcttgcaaggcttgaggtctcctgggccagtgtgtcgctcagggggtggcagggggggccctgaagggcaggagctgcagaggcagagggactcctgttgaggaaagctactggaatcactgtgtggttagacctaaggaagaacttcctgcctgctggtcggcggggcagccgaaccctatgattcctccacaatccctcctcttgccggctctccgtggtttagactggttcgtgccaaggtactgactgtggaaggcacagggcttccctcgctggctgaccttccttggctgcctgggagcccccagtccccatgcctgactctgagctgaccctccacacactgaccctggggcctcagcctccaaggggtgtggggaagtgagtagtcccagttcagtatacctgaatggccctgtggggacgggagaaaggcacaccctccctgcagatctgggcaccaccttgatcccagcattgtccttcatttcacagacaacacacctgccccaggaccccctccccactgatgagctgggcccctctgtgacctcagactcttccttctaggcaggaacaggttgggggtcccgtctccaagccctgcctggaccccgcacctccagtcccaggctagctgattcagggctccttgccctgcagcccaagggccctctcaccaccattgcccaccccacctccctgggctcctgggatctcagccttaggtcaaggcccagccctggtgcaccctcccccatgggccaggccctccatgcctttgcccgcgccagtccctccacggggcacgcccttcccgctgtggctactcctcaatcttagaggcccctcccaagcccattctcacagagcttcctaggcctgccctggcctgacacatagtgcaggacagtgtccaggcctgtgtccccaagacccatctggggttcaagccacatcttgggcctatacacagccagctagtgagtgagcgagcgagtgagtgaggccctgcaagatggtcatctgtcttgtcccrcaaaggccaagacaaacgccgtgtcagcggcagcctctccaacccagtctgtgatggccagtggtggtcagtgagggctgggccgcgaggctcacagctcaggccgcacccgccggtttcacagaccggccaggaagctcccagggcgagggcctagtcgtgtcctccccatgggcgagcaaccctaggcaggcaccagagggcgctcgcggtctgcag

SEQ ID NO: 94508 - DNA, 23895 bp, Homo sapiens
ttatttatttatttatttaaaaggtggggtctcgctgtgttggtcaggctggagtgcagtggcctttcacaggtgtggtcagcaagggaattttgacctgcaccatttctgacctgggccagttctcccctccttaggcaacctggtgttcccccattccctggaggtcaccatactaatgccaaacttagtgcagacacccaatcggcatagtgcactacagcccagaactcctgtacagactcaagcaatcctcctgcctcagcctcccaagtacctgggactacaggtgtgtgccaccacatctatttattttttgagacagggtctcactctgtcacccaggctggagtgcagtggtgcaatcatggctcactgcagatttgacctcccgggcttacatgatcctttcacctcaccccactgagtagatgggaccagaggtgtgcaccatgcacccctaattttttaattttcttgtagagatggggtctccctatgttgctcaagctattattgttttaaatattttttgtttctttctcttctctttgtttctcttctctttcttgcatccccattatgtgtatgttatttttttcatagttgtcgcacagttcttgaatagtctgtttcactttttcagtctctttgttctttgcttttctgtcctggaagtttctattgatatatcctcaagcttagagattctctcttcagccatgtccattacactcatgggcctatcaaaggtatttttcatcactaggacagtgtttctcatctctagcttttctttttattctttcttaggatttccatctctctgcttcgcgggttcttgcatgctgtctactttattcattagagcccttagtatattagttatagttgttttaaattcccagtctgataaatctaacactcctgccatatctgagtctgggtctgatgcttgctctttttcttcaaactttgtgttttgccttttagtatgacttgtaatttttttcttgacatcagacatgaggtactgggtaagaggaactgcagttagtaggccctatagtaatgtcgtagtaaggtggcaaaggacagaaaagtgatcacagtcctatgattaggtctcagccttttagtgatcctctgtctctgaaatgttaacttcacaagtgcttcttggttttccccctttggatggaacaggacagttagagctctgtatacacctaaaaagcataagcaaatattgaactttagccaatgtgtgcatgttgaaatgtttgaggggggcagggaaagtgtactgatgtctataacttactttgaaagtcatcaaaagacaagatggattgatagacaggtggaaggatagatgtacatgtgataaggaaactatagtaaaacataaattgtaaggtctaggtggtgagtatacaggttttcattgtactttttttccaacttttttgtatgtttgaaaatttcataatacaatgttcaaaaaataagcccaacagcctaaggagataggtcagagtcagtaggatgaaatttaatgtcagtgaagggcaagtggtctcttcaggtgtagatgctcttttgcttaggtgaagaatgaggaagtcattttctgtcagctcttcatatacataaggaatgggttgcactcaaggtaattatcatgttcttctgtaagagatgctgaactcatagatgtttccgtaatctctggacaaggaattgggcatgctatcctactccaggccattcacatcctcttaaggtgagatatcccactttctaagagactttggcaaatgagtcatatcagtcaggatgggctgagttttgctgcaataacaaaagactcccaaatctcagtgtcatctccctcatattccacatccgatgtgagttggctgtggctcgatccatgtcgtttttactctgggacacaagctgacagagtggttcttatttagagcattctatctagtagcagagggaaaagagacatggcaaacacaggcaggcttttacagaagccttgtaaggggtctatgatgctcctgcccacatagcatcggccaaaacaagtctgatggccaggccttagttcagctagatgtgaacaccccatcctccagcaggaggaggcacagctggtgatgaccaacggtgactgaatctaccccaaggagattatcagaatgatgtgaggtctaagaaaggtgagggaagtaggggagaggtggcagaggaatgacatgctggttttattcaaacattttagaaaatgcaagacaagatgtgctctgcacagctccaggggcaagctgaagacatttctaccagctaggagtcacaggcttcaggttgtcacaggaagcacattctgacaggaaggactacccagcattagggaacaccgagggcacgttgttacctgggctgctccatgcgcccaggacagtgatgacacttgaagacagagttgccttccattctccccctccccataaaatactgggcccagccgcccacacagcagtgacctccctatccctgaaaaaatgtaagcagagcctgggtgctcctggacagagggctgtggatggagcccctgcatcgcagggtgaggccagaccacagcaagccagaggagggtgtgtctaacccagggtacacgtaggacagataacttggcagggatgctgtgctccttcttgctaacatgtgcccctctcaagctgccaggaaaaaaaaaaatcacataatgaggttgctaagatctacagaaagaatgaatcttctatccatgaaattgtgaagaatgaaaaagaaatttgtgccagttttgctgtcacacctcaaaatgcaaaacttatggctacagtgtgtgagaagcgcttagttagggtagaaaaagcattagatttgtgagtggaagatgtcaacagaaacgtattctgattgacagcaaccgtgtagcaccagattaacttcatctggattaaatttgttcactggcatctatgtataggaaaagacgtggcagatgtagggtttggtactatctgcagtttcaggcatctgctaggggtctttgaagatatccctcaaggacactccatataaatgaaatcatccaatatgtactcatttttaatctaccctttttcactccaaataattatcttgatatatttctatgttgtatcaataatttgtccctttttattgctgagtagtattccctagtgtggctatacacagagtgtttacacattcacctgttaatggaaaattgggtggtttccagtttggggattttacaaaaagcctgctgtgaacacttctgaatacatctttgcatgagcatatttttcttatttctcatgtaattactatcaaacaaaaatataaatctggattccataaaaagagaatttattcaaaaggattgttgtgggggttggggggggactattacaataaggagacagtctgacgatgtgatcctcaagtgtctcagaggttaggcaaagggctgaccttgtatagggaggcgtaaacatggctagaaagaactgttatgggaaagtgagctgagcaagagtgtcacgatcgagcaggtcttaccctgcagacagcctgttctcaggagggaccctcaggaaggcggtgggttggcacaagctgcgggtgggccaaaggtcaggggcttggagaaggagagaatctgaaccaaggtttggttacaggcattttgttcttattgatctgtggggacaagcagtccagctaatcatttatgatgtcaagaatgggaatttagagggtctgtgtatggtctggtcaggaggagacattcaggattcttattcaagctatatggaaagccactggttctttccagtagggtgttttctggaacaaaggagtggaaggattccttaaccttcactatttctaggagcaaagggctaaggtacaactcaatactgtcaatagttaggattgaaatggctaggtcatatggtaggagtatgtttaactcttcatacactgccaaatgattttcaattgtagtgatactattttataatcccataagcagcgtacaagaatcccaggtcctccacattcttgtgaatacttggtataatcagtcttctttgtccattctagtaggtgtgagacggtgtcacattgtgcttgcaatttgcatatccttaatgattaatgatgttgagcatcttttcatgtcttaattttctgtctgtatatcttatttggtgaagtgtctgttcaaatattttgtccatttaaaaaattgaattgtttgattttatctattgattttaagtgctctttctatattctggatacaagtcttttatcaaatatagcctctgaagatcttttctttcaggctgtaacttagcttttcagaaagtctttgggagctatggcttaatgaaacacctgtgccaggttctcctcagcacatccccctgatcacagccacccccataggctctttttttttttttttttttttttgagacggagtcttgctctgtcccccagtggtgtgatccgggctcactgcaagctccgcctcccgggttcaggtcattctcctgcctcagcctcccgaatagctgggactacaggcgcccgccaacatgcccggctaattttttgtatttttagtggagacggcgtttcataatgttggccaggatggtctcgatctcctgacctcgtgatccgcccgccttggcctcccaaagtgctgggattacaggtgtgagccactgcacccggccataggttccatttctatatcggtggtgaccttctgcaagctagactgaagtcccaagctccagacccacgtctccagctgcccactgttcaatgccctttggatgtcccatgcaaattggagctcactatcatctccccagacccgctgctcctccagaagccctgtctccatgaacagccctgcacctaccaggctagagacccaggagtcggccttgtacctgcttccttctcacttccacctcctgtcatccagagctgtcagttcttcctcctgaacatctatgaacactcaccttctccgccaagcaccgcaccatcattgttctcacccgcaccacccacccagatacctttccttagacaggtggccagagaaaaacttctcaaatagaagtcgggccatggcacgccactgaggaccttccagcggtctcctgtgcacttaaacaaggtccagactccttcgtgggacaagtaaagctcttgatgatctggtccttgagtaatgtgggggcctcttgcccagagcccctcatactcttcaaagccggcagccgaagagctgagcagtagctgtctgtggagttcagcctccgctccctgcacgcctgccctctgcaggggatggagcaccgtttccccacttccccacctgcgcccagcagtgcaggtgaaggcctggctgctgggagtggctgggaaacgctgagctttggggtcaggaatgccagctccactactcaccgcctgtgtcaccctgggaaaacagctctggccccaggttctccataagtaaaacagggtcactcatccctcccctccttaacgacatatgtcagaatcagaagccacaaatcattctctcccacccagcacgctgccttggtctcctagaccactttccccaacaatgggaaaggcgccaggcccagaacaaggccgagaccggatgaggccagcgaagcgcccagggacaaactttcaggcagcgcccactctcggtctcgggcaattgcagggtccctccgagagcgaccgtctccagaaaacgcggccgccgcctgcctatgccctgagcctgaagagcccccggcgccgcccgccccgcactgggcccgcccctccgggattggtgccctgctaggggtggttgcctgtgacgtcacaggacgcgcccgcttctcgctggagtgcgcaccgagcggcagtgacttcgccgctgctgtagttccccggctggatgcggtgactggtgccagtgctcaggcgcccgctgcccttgacctcccgccccgcgagccctaactcagcgcaggaggaccggctgccgccgccgccgccgccaggtagaccaggcctggctgggttaggccagaagggtgtccctggcgcaggtctcccgcggagggcagaactagaaccaggttcccggccgtttccgaccacacggatggggcggacccatgtgagccctcactaattgcaggggacgaagctgggcatatggggaaactgggggtttccaggcgagtggacggtgggatgggatccgacgtgcacacccacgtttcaggctactgtttccacctcacgtcgccgcccctttgcttatggactcttgcagagttggattgagctcggactgtgtgacatagtggttgttgcagaagccccagggccactttctgactagtaccttgggcacctgacgtcatccctttgagtctcagtgtcctcttctgtaaagtgagggcgctttacctgaggggattgctgtaaggttggaatgaacctgcatgtgtgagtcatgtgggaagggaacagtcaatggggcctggggttctcttggagagctggtaaccagcctcgtccctgaggcaacagccagagggcgcctgtagtttccccacgcatggctgttagcagggcctctgcaggatctcctgtgggaggtccctacttctcactacaatctttagggcctttggaggatttcctatggaaggtccccacttctcaccacaacattctgggttaaaatgtccttggtaggaagatggggctgaagctagattttcttgcttgcattacaagcttctgaaccaaggacttcaatgtcacctggacttggattcacatcccagctccttcccttcctagctttaagactgtgtaaccttgggcaaatcccttaaccgctttaagccttaactgtttcatctgtaaaatgggactaacagtacctaccttccacaagcgtcaagaattaaatcaggcctggcgcggtggctcacgcctgtaataccaacaatttgggaggccgaggcaggcggatcacaaggtcaggagatcgagaccgtcctggctaacacagtgaaacaccgtctctactaaaaatacaaaaattagctgggcgtggcggcgtgcacctgtagtctcagctgctggggaggctgaggcaggagaatggcgtgaacccgggaagcagagcttgcagtgagccaagatcgtgccactgcattccagcctgggcgacagagcgagactccatctcaaaaaaaaaaaaaaagaattaaatcggacattgtaggtagagcacttaatagttggcattcagcggcagcagttactgttatgttagcatgtggagtgtctgagtgtgtgcactttggctcgaacagccttttgacagtggcacagttggtgcttgtgtaagatagcagggcagagaagtcaaaaccctcggttttctagtcaaactggtgggccacaacagtggtgacctaagtctaatgagtctttcactgaacaaggcagattgaatctccaggcgaggaccaagagtctggggctcagctgcctcaacatttttgggcatagaaggctgtacaatacaaacagcctttgttgtaagagcaaggaaccattcagggaaggcaccatgtggtaaggaatagtggccagaattggattcagaacaaaacaagagaatagtgtttgtctttaagtggagccttggactcaaaataggacctgagctctgtggataatttcttttttttttttttttttggagttgytctgttgcccaggctggagtgtcgtggcatgttcttggctcactacaacctctgcctcctgtgttcaagtgattctcgtatctcagcttccctagtagctgggattacaggcgcctgccaccagtcctggctaatttttttgcatttttaggggagacagggtttcgccatgttggccaggctggtcttgaactcctgacctcaagtgatccacccacctcgaactcccaatgtgctagggatttcaggtgtgagccactgcgcctggcccttgtggatactttctaggtgatttgaggaggaaaggcacagccatgtctcctaaagttaacaagcactaagctttcccaagtagtgaaatgtcaagcctctgcttctgtcacttatttgttcattcagcagaaagtcactgagagccttctgtacaccaggcacagtgctgggcagtgaaagagacagacatgtccctggatccagggaggagatgaccaagtgatggctgtcaggcccagaccttgctgtttgtctgcagcctcttccctcaggcaacttgttctctatcaggagaaatgaaataattattatctggagaggcaggtgggggcgctgctcctagaagacaaggacagcctggtagaggttctagcttgatcatgtgagcagtggaaaccattttaagttggaggttaacaggaccaaaatagcatttaaaaaatggcttatggccactgtgaagccagtttcaccagcatcacttgcccatgctgggctgccacccagctaattcctggtcctgctcatttagcccagctcagctcacatcacttcctccagaaactagacaagggtagagcccctgaccatcttcacagcattagtcctgatagctgaatcttacgtcacttgttaacatctgtgacctgtgcagggagaatggcagggctgagtttcacctacattgtttccccaatacctacagcagagccaagcacagtgggaactttcagaaagcactggttgaaggaacactggaatccctgggacttactgcgtagcatgtagtagttgctcctgtagaaaagtttcaccttatgaagaatagcaggtaaaatacaagcctggaccacttcccgtgtggtatgcagggaacggttgatggggcaaagggcyttgggctatatagccctaggaatttcagagatcctgatgatggctctgggatcctccgtctcctggatcctgcatttttctctgcaggctctgatggtggtgtctggtagaaggttactcacagctctgctgcaggctcagaagtggccctttcaaccctccagagacatgagactagtgcagttctgggcaccccacctggtggggcctcacttgggcctggagacagggaatggtagagggattatcaacctcaatgcctttgaccccacactcccraagacaatgacgcagttcctagagcagggagaggccaccctctcagtggcaagaaggtaagtaagtgggcagcatcsccctgacacagctgccctggtccccccacatcctccccgctctgggaaacagcaccagcaggtagctcttttgcaagggagcagagtaaccccacctttccttttctcccattctcttaaaagatccttakaaatcttayataataacatcttcagttttcagaggagaaaacwgagagctaggggaggtgattaatttsaaggccatacatgtggtgctggaaycaggactctatacttcatcacrctgcctcctctgggaatgaagtcctggactgactgacgggtctgggcccgggggtcctaaaaggcatcttatgcagctgggggagtgatatagactcccagctcctacaaggagagaggactgcaaggaggttttctataagacacttggttcctgggtttggactagattaggtgagagtgtccctgaagcctggactcctatagaatctggtctaaggagctgatgaacaataaattaaaaatactttaagatgtcattttcatctattaaaatggaaaaaaatacaaatgtttcacagctcacagtattaacagtatgttcccatattgccataatctgcaaagattggaaaactccatgtccctcattagggacttgggtatatctctatagagcagtaatatgcagccacaagaaataaagaggacactctctatgtattgttacatattgttaagcagagatctccaaagtcagttgtttttttaaaagatgtgaatagtatgctatcatttgcatacaaaagggtgggagaagaatatccatagagtagctgcgaagagccaggggaacggggtaaccggaaggggaaagggaaacctttccatgtattccagtttgtatcttttacatggacatgagttacctaagggggagaggaaatcaacactggataaataaaagccctgctctgatagcaaaggacaatagtcagtgattttcacaatgactctgatggttgatagagctaggaaatagatttcaaaaagcaaaacctgtagctgctgcaggatctgcccagcctgcccgggattgcccacctgttcccagccagaccctctcacctgctctggtctctacagagccttggctgcccagttgccagtcctaccatggtcggaggtaaccttcctggctccagtcacatggccagataaggtggtgtgtgtgggcatgaattatgtggaccactgcaaagaacagaacgtgcccgtgcccaaggagcccatcatcttcagcaagtttgccagctccatcgtggggccctatgatgaggtggtcctcccaccacagagccaggtcagtgcctccccactgccctccctagtcactgggcccatcacaagggcattctgagctcagtattgagcctactggagccacctctcgctcagtagtgcattcaacagaaactctacaggattatacacacagtagtaacactggccttggaaaaaaaaagttaatgtacgtgttttcctggttacaaaagcaatacaccttcactgtagataaaacagagataaacatttaaaaattacgtcacccataatcccactgcccatggctcggaatattaatgtttttctgtctaccttcccagtgtttctccactcctgtatatgtttatactgtacatatacttaccttttacttaagactccatcaggagcattttttcatgccattaaatattctccctgacatatttaggttaccttggagttttgtgatgtacagggtagtttatattcctgagtaccttactgctggatacttgtttccagtttttggtttctataaataaatgtcgcaatgaacatccttatgtagaaaagactttgcatgtccattaatatattattatttccttttttttttttttttttgagacagagtctttctctgttgccaggctggagtgcagtggtacaatcttggttcactgcaacctccgcctcctgggttcaagtgattctcctgcctcagcctcccgagtagctgggactacaggcgcatgccaccacgcccacctaatttttgtatttttagtagagatggggttttaccatgttggccaggatggtctcagtctcttggccttgtgatctgcctgcctcagcctcccaaagtgctgggattacaggtgtgagtcaccacacccggccttattatttcctttgaatgaactcttaggatttgaatattatcaaactacaggcagtatttcaaaacccttgagaaaatctcccaattgtcctttaagcaaattgtaagagcaacttacacatccatcgttagtgtatatacccttactaacactggttacttttcctcgcaaatttttattttagaaatgtcttgggaattatagaaaagctgaaataatacagtgaacgctcatatacttttcacctggtttcactgtagacatttgctgtatttgctttctctcccttgccctctccctgcccttcacatggcaaacacacatttttttttttggcaggggttggggtgacacattgcaaatattgtcataaaaactgaaatagacattttataaggacaacggcttgcatgaccataccattatcacagccaagaaaattaacttgaatgatatttaatatgaaatccaattgccccaaagatgacttttaatttggttactttgttgctctgtgatcaaccaagggcacacactgtattcagttatatctctttagtagttttaacctagaacagggttccacagactgttttaaagggctgtattagtctgttttcatgctgctaataaagacatatccgagattgggcaatttacaacagaaagaggtttaattggacttacagttccacgtggctagggaagcctcacaatcatggcagaaggcaaggaggagcaagtcacatcttaggtgggtagcagcaggcagaaaagagcttgtgcagagaaactcccatttttaaaactatcggatctcatgagacccattcactatcatgagaacagcacatgaaagacctgcccccatgattcagtcatctcccactgggtccctcccatagcacgttagaattatgggagctacaagttgagatttgggtggggacacagagctaaaccatatcaagggccaattagtaaatattacactttgagtgtcatatggtctgttttgcaacaattcaactctgctgttatagtgtgaaaaccaccagggacgatacagaaatgaatgatgggtttccaatcaaagttgattatagcagacggtgagctggccatagtttgccaactcctgacctcaaacaatcccccctgccctttccttgaagaatccagttgtctcatagcatgtttcacatcctgggtttgtctggttgtttcttcatgattagtgtcagggtaagcatttttatcaagagatctacaaagatgttatacatttcccattgcatcccagaatttgaccacttggtttagctgacgttcactaagtccctccattgtgaagatgcatttccatttttgtaattaacaagcaatctatgtggtagtttgagatcacataaccatcttattgccccgtagatkctcatccaaggatcctgtagtcatccttactgaatccattattgcattgggggatgaagaacaatgacttttcttttcttttgtgatggagtctctgtcacccaggctggaatgtagtggcaccatcttagctcactgcaaccactgcctcccaggttcaagcaattttcctgcttcagcctccctagtagctggaattacagggatgcaccaccacacccggctaattttttgtatttctagtagagacggggtttcaccatgttggccaggctggtcttgaactcctcacctcaggtgatccacctgcctcagcctcccaaagtgctggggttatgggcataagccaccgcacccggccaagaacaatgatttttctaaatcatgcagtttttattaactggcattcttctatgaaaaaagcctggccaggcacgttggctcacgcctgaaatcccagcactttgggaggccgaggcgggtggatcacgaggtcaggagatcgagaccatcctggctaacacggtgaaaccccgtctctactaaaaatacaaaaaattagccaggcgtggtggcaggtgcctgtagtcccagctactccggaggctgaggtgagagaatggcgtgaacctgggaggcggagcttgcagtgagccgagatcgcgccactgcacaccagcctgggcaacagagtgagactccatctcaaaaaaaaagaaaaaaagctgcctcgctctttattcctgtgtcttcaatatcactgtgaattcctttttgtttttattcaattggttgtaatccatcatttacattcttcaggtgacctcaatttggccaatgagggaccttcaagtttgttccatccccaagcttttagcatatatttgctttctggccaagacgttccaggctcatcatgtactgtctgtcttggaccaaggaacccagtgctccttagtggggagtggtattagagaccaacatctggatgtcaggtgtacttataccaactctggttattattagaaagagccaccaattttgaaggccaaattatatctattttatagtgtattttatggattatgggagaggctgagcattttttcatgttttgtggccatgtccgttacctttttgtgaattgcttactcaagtcctttgtggcatgtcaatctttctcttactaaagtgagttaatagattaaaacacttagaacagtgcctgacacacagtaaggttacatattgctaggggatattacttcgtatttatcctttgttaaaagtatccagagtgacttttaaactcagtgccctggacacgtgttgctcttctgcagtcacagtggtgtggggacctgtgcctgtattccatgatgctgtctgccactgcccaaaatgtatgggtctacaagtcacacctcccttgtcattcactgggctctggttcagggtgatggcaaacgtgggatggcagccaagccatactgacagagatccatggcgtacagcctctgagcatagataatgggccccgaagccactgcggctcactattcctctcccaccctacaggaggtagattgggaagtggagctggccgtggtcattggaaagaaaggcaagcacatcaaggtgaggtggaaagggtgggctcccaggccagagtgcagcagaggccccagctcctgcctctcctagttctgacctcactcaccgacacatggtgccagctgtccctgacactaggaagcagtcagcctccttgctccctgacactgcctttcccttcacccacctttggctggctctggctactaacatgggataacagctttgagatcccttgccacaggtgttggtgtcacccgtgatctaacctcctgtatggccaaatcccctgcccccataggccacagatgccatggcccacgtggccggcttcactgtggctcatgacgtgagtgctcgtgactggctaacaagacgcaatgggaaacagtggctgctgggaaaaaccttcgacaccttctgccctctgggccctgccttggtgaccaaggacagtgtagcaggtaggtccctggtccctgccccctggtacctaccattgcacagatgaacagccctccagggaggagcatgggttcaggtacatgtggcacctgccctccctggctgccctttgactgctgactccatacagggaaagtcttttatcctcagccaccagttctcccatgggcttccttcccaagccccctagagggaacacaactgcagaggatgtgaaactgcatgcgtgaagtaaattacaaagaacactgagctgatgggtggatcgggcttcctgcggctgccaccatctgaaataatctaagttgagcatcatggagcatagctatcgcaaggcccaggcattttccacactacagatgaaagccagtgtgactcacccagccactgtggaaacaacagcattgaccacacacagtgaggggacagcgccaggttggaggcagtgtgccagagggcagagcgcagcctcttaacacacagccacccacaactgtggtggaggtggggggtgtccacatgggccagccatgccaggataccaaagaccccagtgcctcacagcacccacacagagtcctcggcaaagttaaattgtgtttcaggtgctctacttaagggtggtagaacactaagaccaacaccaacagttaaaagtgctggttagccaggatgttcttacagtaatccatcccctgccagcatccggtacacgaggcttctctgtcctggctagaaccattgcctcactgctttatagatgctgtctttttttttttttttttttttttttttwaagtatggtcttactgtgtcacccaggctggagtgcagtggcccaatcccagctcactgaagcctcaacctcctgggttcaagcagttctcccgcctcagcctcctgagtagctgggactacagtcacgcaccaccatgcctaatgtttttattattttgcatagagacaagcactcactacgttacccaggctggttttgaactcctgagcttaatcagttctcacctgctttgccctcccaaagtgctatgattacaggtgtgagccaccacgcttggccctgcccaggagtcatttttgtatctacaggtatcttcctatgctgtagacagatgccctttttcaaggcaaaaaccctagccatttttctcttctccttcagagtctgcaacatcctctcaactcatccaagtgactactgcctggtgctcttggggatgcagggaggcctgagaaggccaatgtctatacagaargttctaacatagtgcactgagtcaatgtgggcactttaaagccctttcacctgccaagtcacgaagcacccctatagttgtgtttgtaaaatactggggggtttgaaggggaaaagggataactccaaggtaccatctttgcatttcagatccacacaacttaaagatctgctgtcgagtgaatggggaagtggtccagagcagcaacaccaaccagatggtattcaagacagaggacctgatagcctgggtgtcccagtgagtgacaggggctatcctgccagccccgctccacctgccacacatgtggaggctgacctgagccctccacctttggctgtggccacctcagccagcccctggtctcaccgggtccttttgctttgctccaggtttgttaccttttacccaggggatgtcatcctgactgggacccccccacctccacccaggtgtcggtgtattcaggaaacctcctgtctttctcaaggtaggttagtgaaaagcaaagagagcaagggccccaaagggctggcaggcttggctcagacttgagaagtacaggcttgtgtacgtgtgtctgacggaagggctgacactctcatggcctgctctgttgcagaagggggatgaagtccagtgtgagattgaagaactaggtgtcatcatcaacaaggtggtgtgatggctcctgcacaggcccgacataggatgagggcatctgctcccactcagcctagcccagggaaaggcccagtgacaggtgtggacaggtgccagccctgcaagccgcctcttctcggtagaagggagaaggacagagctctcttcaataaattcgtcgggtcaaagcagcagcttggcttctgctgtttgtcttcgtttgggctttgtttcatgggacaagttagggcattttgtgggactggggaagaagagagcaaatacacacacatacaccaaaaagatgctgctgggctggggaaaagacaactcgtctcgtccccttgtttatcacatcaaagaagggaaaaagcaagagatggcaagggacaatcaagcctcaatgattatatttatagagcagctaagggtttgcagcctcctctccatcttctggctctaggacacagctgtgttctggggctgagaagtctcagcacaggctcctcctcacagttctagctacaaatgaactgccggatgaactgttctagtttttcctgattgtccaggctggcaaaagtaggggacaggtggagcctggggcctgcagggctcggcgtctgctgcagaacctgggccatggaagataagccgtgagtgcgctcaccacagggactgtgtacacatggcccaggggccaggcctgtcccccagaaacctgccttgagacctctggccccttagacctcaatgtttgcgtgcaaatgctgccgcaaagcagtcccaataccccacctagaaagatgagccagtgatttgggagaccaagaggcaggaaaccatcccaccttctccaacccatcaccaaatctgttgctggaagacaccaagtaaatcccagggtcttaatgaggcaccatcaggccagccctgtggagtgatggggacatagctgggtttccctgagctactctattggggtgggagcagggggacagaagatggtgacagtggctcctctcacccctaggtctctgaaggtccagacagcactgatggcgagctttgggtccgcacactctggaaagaagagagaagtgaaggctctaggtagggagaacagagagccactgggcacaggcttctctcctcttgtttaaagaagcccagggagggatagagctctgactggacagaagactgtactctgcagcctgccttcctagagttgggttgtcactgtcctgcagggggcagcagccaccagcaaacaccactgcctgcaggagcctgggctgactggttgggactcaccgaagatcccttcttcctgggcggtggcctgcaggaactggaacagctgctctgtgtagcccaactctgcagaagagagaagacctagacctggcacccagcacagacacagcctgcctcgaggactgcaagggaacaagggcctcaccagtatcgggcagctggccctggcggaggaaggcggcagcctgtgcaaaggccttgagcagcgggctgagcaggcggcagaggaaaagaaagaaatctgggcagtgtgactgctggctgagctggaggggacaggccggggtgagtgcagctccccaccgcctccctaccacctccctccaggggcagctttttgaaacacaccctgaagtaccggccgtcagcctctccgaagtcatcactgtcactatcagtaaagtccccactcggtttccacagcagctttctgctcaatcgctgtcgccctgtgtcacaggctggccgggagcctggggtctaggggccgtggagccattgttctctgacaagctggccagggatcaaccctacacccccagaccaggtacatgcaggtgaaaccagtaaaagcagacctagagacccaagaggatggccagagccatgccccagcacctgctgggccaacttgcagagtgagaggaagtgaattcccaccctcaagggcagtagccctgtggccaagaaatgtggggagcaggaggtgtgcagagaacctcagaggcacacatgtccagtgctatccagagagacacacagaaccggggcataggtggccatatcccaaggcacagggagcagaggtgcgagctaggcttccccgctgcaaggccaggggctgcccacccccacagcacacacggggcagaggaggagcctggggcagctggcactcagggtgggaggctggaggaggccaggctccaggcaaggatcttgtctccaactgccctgcctacctcctcagcaaccaggagcccgcattggatgagcctgtccagcacctcctgacagtagcagtaggaagactggcagggctgggagaaaaaggcacccatgtggcctcaggagagccaggcacatgggcaggggcctagccaaagaccgggcaaggccacacctactacccaggaggtttcagaggtagagcatgggcagggatgggccattcctaccaccaagaggggaaggcctaggaccaagtgggccgtaggggaggcctgacctttagcagcagcaggtcttgcggcagcaggtgcatcagcagcaggatctggcggtacagctcattctggctcagcagcaatatgccctgcagctcccagggcccctggggcggcactctgcctgccagcagcccccgcactgcacaggctgggggcggagggtccattatgaagaaggagccgttcccttcaccactgcacacacatcccacctaccccgtgcacctcaagactcaccgcccacagcctcgctcaggaagacgggcagcagctcagcactcagttgtgccaggtgtgtgaggcctgggccaggctgcggcaccaccagcaagtcaccctgacggatgcrcagcagggccacgtgcgcccgcagcaggctcagtgagtgctgcagcaggctccgcagctgcccagagaagcctacatcaaagccacgcaacagtatctcctccgtcagccaggagaactcccccaggagctgcgacaggaacacaccctgggtgggcagagcagggctaggcagcagggccacacatcgccaccccccccaccgcccaggtccccaccacattgcaccccctaccttctgatgcttgaagagcagcagcgttgccataatggccgtgctcatcaccgcagagctccctacactggctggagtggggcggggggtggagatgctggtcaggttgaggcccagcagcctggtccctccatgatctagcaagtcttcctagccacacatcccaactccaccccagggatgaggaacgtacacccggagcagtggtgtttatcatcacacaggctgagagcaggccaggagctgggggccttcccctggatctcatcgtagggcccacacatcaacccacagcctctactagaggggcactgaagaagatacagatggatctccctataagggccctctgtggaggcgctgtgctaagccccttacacgtatcattccattcagttaacaccatctccacccaaagctaaggagactccgctcagaaggcagggctgggtgtggccttggggaagcagctgcagcctcctggcctcaggccaccatctttgtgcatgcacttagctgctcccttatgatggccctggctgcctgctcctcctgtaggagaagggttccattcttcttcagatgtccccaaggtatcacagagcacctcaggtgcagacacttggaatggagaaccctggtgactggctgaccccgagaggggacggttcagtgacccaccckcaaaggcccagatctggttcaccctcaccactcaggacatgacagctcagtctcctgaccaggagctggtcctcttccttgagggccaggagaggcccagttatgggggtccactcctgctccttctcagtgtctgggacagcagtactgagatagagacacagattacaggatgaagggtccaaacacaaaaacagctgtgggaatgcctagagctttctaaaaggtgagggtgtttccccctcccagccccaggacagaggatggcttctataacccccagtcccatccaggcctctgtgccataccccacactcagactgttggcaaggcgagtacctggaactattctagatgaccccaggatacttggtgagggagggctgctagtgtgtgtatatgggggatacataagctggtgctgaagggctgcttgccttgccccctgagaccccacgctcctgtgcccctaccattggcccagcacgatgggctgcagtagctgctccagggtctgtctgccgccccagcagcttctggcactgacgatgtattcctgcccaagagaaggctcttaggtggcctgctcgggcccaccaggaaacttgcacacagcccactggaagtaggcaaagctatccctgcagtggctttgagggccaggctgccaggatgcctaggacagacaccccaggtactcccagccttccccagctggctccatacctgcagggaaaagggctgagctaggcgcacccgggagcagatccggtggctgcagccccagcggctccacaagctacgtaggacagccagagctcctgtccacagccccaggggggccgaggcctgcaaggagggaaaggataactatactcgccgaggacactgctctcgggcggacatcagggctgcccacccatcctggtctccagaggtatcctctggtcccaccctgctcagttttatctcaggcccaaactggtgcgtgaccttgtcccaagctcctctttccttatccatgacacaggaaaaatccctccctatcaaggtcttcagaggatgaaatgagatgatggtaatggccttgacaggtgctgccagatgattgtaaggacgattcctttgtgccccccacagccctaagtggggctcagccacaggacacaatattgtgcctcctatcgggagctggtgtccacctaggggcccaaggggctggaaggtctcacattctcacatggtctatgtcacacggtgcatccggaaccaggtcataggtgacggccactggtaccagcagagcatctgggacgatgcccacctggactgcctgcaccacaaaccccacccaagcctggcccagggctgacagccgtggccccagagccccaggaggttcctccaggaagatgagcaggggctgcccactaaccagcagctgctctatgacctggaataggaggggtcagagggggtgttaaggccagagcagaaacagacccctgtccccttagcctggcccatatgtaaccactgggggcactcaccgcctggaccacagccctggcaaggagcccctcagagctgtccagggagaggctggcctctgggggcaggaaaagccccccaagcttcctcagcagagctctgtgggacatagggcagagcctgataaggaaaggggctctgaagatgtgaatgagtaaggggctagtgagagtctcagctcccccatggccagcctgtgtcctacttgaataccctgaggcaaagccatggccctaggccctgtggctgacacctccatctaagccccacaggctagactgctgtatggctcggagcagagaggccacgaagagggcctttagtagggagctgctgccaacacaccccgatacacaccccgccccagcctgcgacttctcccatgtatgtctagaggcaaaaggtttttacctgagggcaggggagcaggcgcgggagtcccaggccacacgaagcacacccaggccctgggagagcagcataaagggcagcaggatcccatccaggagggttttgtgagtagagaggaggacaagcggcaagccctgctccggggagagccagagggaagtgccaacctgccccaccctgaggacacaggcagccaaagacccagggcagccccagagggagggacagttcagctgcagagttcttcctctgagcacatttcccaaaagcaaaggagcctttagacaactcttaaggtaactgcaccgacgcactgacgtcatggttgttaagaccatgatggaaagacgttagaggaagccccatgggagcagggccgtgagacataagggaaggtcggcaaagagcaggggatttttcccaccagctgatggggactggactgctgtatggctgggaacagagaggccaggaagcaggaccagatggggactgctcctgacttaagggcttggcccagcctctgctcttctgctcccaccatccccaacccaatggagggcgggccttactgcctgggcggccttctggaccatcttcatctgacccttgtggagctgcacattcaggaacaggcagttcaggaacctcagcagcgcccagctgaacagcctggggagggacaccaggcctgaggtgcggcaaggagtgacgctcggcccgtggcacttggagggctgcccagtgctccttagggcaggccccgccactatcctcattttacagaagaaggaaagtgagactcagggaagctacagaactgcttcctggtagtgaacgctaagaagtagcagtgctgggactggaagttctgacaccagagttcatgcccaccagacgctgctactctcccacgacctcatggtggagctgcctcacatcagaatcagagcatctgcctcaatttaccctaaaggagactagaggaccaagcctctctccaggcagaacccagcct

SEQ ID NO: 94509 - DNA, 114701 bp, Homo sapiens
  misc_feature (1)...(114701): n = A,T,C or G
atcacgccattctccggcctgagcctcccgagtagctgggactacaggcacgtgccaccacgcccggctaattttttgtatttttagtagagatggggtttcaccgtgttagccaggatggtctcgatctcctgacctcgtgatccacctgcctccgcctccaaagtgctgggattacaggcgtgagccaccgcgccaggactttttttgtttgtttttgttttttgttttaaacagagtctcactctgttgccgagactggagtgcagtggcgcgatctcggctcaccgcaacctccgcctctcgtactcaagcagtcctcccacctcagcctccccagtagctgggactacggttgtgcacaccacgcccagctaatttttgtatctttagtaaagacggtttcaccatgttggtcatgctggtctcaaattcctggccttgaaaccgcctttgcaaaatgatgactgagacagtgaaagagatccaacctaaccgactccatcttgcgtctaacctccaagctgcccttgttcattcctgggcgtaggctgaactaacttggggggaaacttaatttatagtttaaaacaaagacggtaacagccctttcccaaagcagacctccttcttgccgggggactagactaacattagtcacaagattagaaatgatggtttaggagccatgcagctggaggctacaagattctgaccctccctacactgctcctaagatcagcgcttgagatactttgcagaccctgcacttgatggatcagctggcaccacccaggtggataaactggctcatctgatcttgtggccccgacccaggaactgactcagcgcaagaagacagctgactccctgtgattccatccctgatcaatcagcactcccggctcactggctctccacacccaccaagctgtccttaaaaactctgctccccgaatgctgggagagactgatttgagtaataataaaactgcggtctcccgcacagccggctgtgcgtgaattactctttctctatggcaattcccctgtcatgacgaatcggctctgtctagacagcgggcaagtgaaccccttgggcggttacagcctcaagtgatccaccggcctctgcctcccgaagtgctgggattacaggtgtgggtcactggcacctggccgtctcccaaatctttcagcctcaggaagccttttgtggcatgactggttttctcagcccaggccctgttcgtcatttatgtcctcagactcccatttgctcctccctaggagcatcaccgacaaagtaacagcaagtagctccatctccagtagagccacactccgcggttattaacacgtctcaaagaggtgaagcttcagtgctttcatggcagcgaccgtgcctctgttgccctaggaggctcgccacatggaaatgaagagatagtcccaacgctagccttacgagacccgtttatctcaagtacatgatttcttaaagaagtgtcttgttcagccgggcgcggcggctcacgcctgtaatcccagcactttgggaggccgaggcgggcggatcacgaggtcaggagatcgagaacatcctggccaacacggtgaaaccccgtctttactaaaaatacaaaaattagccggttgtggtggcgggcgctgtagtcccagctactcgggaggctgaggcaggagaatggcgtgaacccgggaggtggagcttgcagtgagccgagatcgcgccactgcactccagcctgggcgacagagcgagactccgtctcaaaaaaaaaaaaaaaagaaagaagtgtcttgtccataagataatcattgaattaatcatcacaagtttacccgaaggagcaaaaacccacagctgccatcaccagccccacactaagtttgacactttaagggattaaaaacaaattccagcactttcctttgtcccacaagcaacattttaatgatatctacataagccattgggttggacatggagatatcatctaaaaatctgagtgctaggccaggcgtggtggctcacgcctgtaatcctagcactttgggaggccgaggaaggcggaacacaaggtcaggagttcgagagcagcctggccaacatagtgaaaccctgtctctactaaaaattagaaaattaaaaaattaaattagctgggtgtggcagtgtgagcctgtaatcccagctactggggaggctgaggcaggagaatcgagtgaatccaggaggcagaggtttcagtgagccaagactgtgccattgcactccagcccgggtgacagtacgagaccccataccgagagaaaaaaaaaatctgagtgatatacggcaatcagccattcagttattctgattgcctaaatatgagatgttctaacagacactgcatgcgaaatctcttttgctggccaggtgcagtggatcacgcctgtaatcccagcactttggtaggccaaggcgggtggatcacttgaggtcaggagttcgagaccagcctggccaacatggcaaaaccccgtctctactaaaaatacaaaaattagccaggcatggtggtgggcacctgtaatcccagctactcaggaggctgaggcaggagaatcgcttagaacctgggggtggaggttgcagtgagccaagattgcgccactgcactccagcctgggcaatagagcaagattccgtctcaaaaaaaaaaaaaaaaaaaaaaaaacagaaattcttatatagaaagcagctcataaacagtttagaagacttaaactgtgcttgctttgacaacacatatactaaaattgggacgatgcagattagtttaacgtggttcccgtgcaaggatgacacgaaaattaatgaagagttccaattttatttttaaaaatggaactgtgatagccagtcataacgatcccttctcatgtatgtgcatcaggggtttcctcagtaatcgtttgttttcatcactggaagtaaaatctctgtgcagagactgtgttgcatgaattatgcattgcacgaattaattcattcatcaagtcattcttgagcttctaccatgttccaagctctgtgtgaggctcagaatatacagagcagagtaagagttagtccctgcctgcaaggacctcacagcggtggagtaagaagtgagtcacactccagtgggaagtgggcaaagatttcctaagcagacacaaaaatattgaccataaaagaagatgcataaatggagcttaattaaaatcagtactttctcttcaagtaagcccaggcggggtggctcacgcctgtaatcccagcactttgggaagccgaggagggtggatcacgaggtcaggaaattgagaccatcctggccaacatggtgaaaccctgtctctactaaaaatacgaaaattagctgagcgtggcagcccatgcctgtaatcccagctattcggcaggctaaggcaggagaatctcttgaacccgggagatggcggttgcagtgagccaagatcgtcgtggcactgcactctagcctggcaacagagctagactctgtctcaaaaaataaaataaaataaaataaaataaaataaaataaaataaaataaaataaaataaaataaaataaaataagacataataaagagagtaaaaagtcaaaccacaaactgggggaaaacattcacaataaatttacctgataaaggtctcatacctggaattataatgaaccagaaaacagaaaaaaagataacccataacaaatgggcaaaaaccatggacgggaacttctcaaagaggatcttcaaatggctaatacgtatatgaaaaggtgcttactcatcaaggagatgcaaattcaaacacaaggagattacactaaacacccaccacaatgcctaaaattaaaaatgtttgtgagaatgtgtagaaactggaactgtcacacactgctggtgggtgtgtaaattaggactactttgggaatctgtttggcaatatctgccaaaattaaatattcacctgccctatgatagcaatcctactcctaagaatattccctggaaaaattagtgcatagttccttcaaaagacatgcagaagaatattcatagcagcattatttataacaggcaaaagttgaaaatataaatgtccattaagagtagaaaaagttgtaatatccaatgtaataatactcagcaataaaagaaaaataaattacatgatggatgaatcttacatatagaatattgagtgaagaaagccacacacaaaagccatactgggctgggcgcggtggcgcacgcttgtaatccagcactttgggaggccgaggcaggaggatcacttgagcctaggagttcgagaccagactgggctacatggtgagaccccatctgtacacgaaattaaaaaatcagctggcgtggtggcgcttgcctgtggtcccagctactcaggaggctgaagtgtgaggatcacttgagcctatgaaggcaaaaggctgcagtgagtcatgattgtgccactgcactcccgcctggatgacacagcaaaaccgccttttttttttttttttttaaagaaaactgtttgattccatttatgtgaaattcaagaacaactaaaacctaatcaattattataagagccaaaatgaaagttaacactggggacaagggatacgaatgacaggcgacacaatgaaacctctggggatttggaatgtcctgtatcttgatttctgtgctggttcaccagggtatacatgtaaaaattcatcagactttaacattaagatttgtgcactttaggctgggcgtgctggctcacacctgtaatcccagcactttgggaggcggaggcgggtggatcgcctgaggtcgggagtttgagaccagcctgaccaacatggagaaaccgtgtttctactaaaaatacaaaattagccaggcgtggtggcacgtgcctgtaatcccagctacttgggaggctgaggcaggagaattgcttgaagccaggaggcagaggttgcagtgagctgagattgtgccactgcactccagcctgggaacaagagtgaaactccgtctcaaaaaaaaaaaaaagaaaagaaaagatttgtgcactttactgtatataatatctagatgtttaaaatgcaatgggagcatagagaaagaagtacctaactcggagtaaagaaatcctggcagacttcactgggaatgtttgaactgaatcttgaataggagcttgtccatagagggtcacggatctcccacacagagagcaccacaaaatcctcagcaatttggtgagagtatggtacaagatgatagtggcctggggcttgaacaagaggctgagtgcggtggctcacacctgtaatctcagcactttgggaggctgaggcgaacacctgaggtcagcagttcgagaccagcctggccaaaatggcaaaaccccgtctctattaaaaatacaaacattagccgggcatggtggcaggtgcctgtaatcccagctactcaggaggctgaggtgggaggattgcttgagtgtgggaggcggaggttgcagtgagccgagatcatgccactgcactccagcctgggtgacagagtgagaccctgtctcaaaaaaaaaaaaaaaaaagttagacgtctagtacaggaaccatgcaacacatcgagtcagccaagggcaaggtaaggagagtgatgaggaaaaaggggtggctgccctgctcggtgctgttctgtcaaagagccgaaattcttcgcggggtggcagatgaggacaggaacagctggggtgtggcaagtgttgctgcctggggagagcggagggtgaggtgtttctcacgggtgcatccagtgactcatcaggacagcggagctcatgaggccatgtctcccgtttcctgccttagaatcacatgaaaatgagcagagggtgggtcatcaggacagggctctccggggagcggaagcgccttcaatgcaggcctgtgggcaggggcgtgggggcgcgcacacacacacgcctgggtgacctctacgtatatacagagcctccctggccctcctggaaagagtcctggaaagacaaccttcaggtccagccctggagctggaggagtggagccccactctgaagacgcagcctttctccaggttctgtctctcccattctgattcttgacaccagatgcaggtaagcagagatgaaagggtgaggtgacggccagggaacagcctagcctcacagatgagagtgcacgcttccactccagtgagcctggctctgcagcttggcgtctgtgtgactttgcgccattcacttaccttctcctgttgcctcagtctgtcaacttctggcctttgcacctagaatactcttcctgcctagtatctcatcgtccatcaagtttgggcatgggcagcccttcctccgggaagcttcgttttgcttctgccagataggattaggttcctccatgtgcttccatgacaccttaagttggatgcccctgcctggtacttactgttaccagctgtgaatccagcgagtctgcagcaaactcaatccttgccttctcgggggagagattcggctgaggggcagaagtgggtttaaggcagagggagaggctgaagcaagtttgagagcaggagtgaaggtttattaaaaagtttttgagcagsaatgaaaggaagtaaagtacacttggaaaagggccaagtgcgtgacttgagacacccaaatgtgctgttagacccttgacttggcgcctgcctgccgcacaggcacttgggaggggccgcatgcgcagtgtgtttactgaagtcgtgcgcatgctcacttgaggcgtttttcccttacccgcggagcagcactagaggaaggtcacacacaccagctaaactccrccattttgcttcttagtgtagatgcttgagcccactcgcccaattcctgagctcttaccaggaagctgctgatcaccaagttcaggtattttctatctattgggagactgtctttcccaacgctggctgtgaccaatattattttagaaagacagtgtaacaaccgcctggccatcacctgatagtcmcctgacattactggggtagaggccctctcccgccctgctcatgtctgctctatttcttaccacacttgattagaattactttttggccagcctgacccacatggcgaaaacccatcactactaaaaatacaaaattagccgggcgtggtgcatgcctgtaattccagctacttgggaggctgaggcaggagaataacttgaacccgagaggcggaggttgcagtgagccaagagcatgccgctgcactccagcctgggcaacaagagcgagactgtgtctcaaaaaaaaaaaaaaaaaaaaaaaaaargaattgctttttgcgtcagcagtgtccccactagactttaagctcctcaaggaaagggattacatctttttcatcgttatatccctagccccccaagtgtctgtcaggtagtgatcacttaataaatatccgactgaaggaagaatgaaagaaaagccttgctgggtggcgagggagagacacagatgtagagaatgtgcggtctcttcctccatggaattgagccgatcacttctgttgttgcctggacatctagccgatgacgtgctcacctagctaggacctcaggacagaacaaggaactccccagcagcctggttttaaggttttaccttctgatcttgcttgtctcttcagatatcaaattaggccacctctttgctaacctcctggttcacatttttggaagggtttctccaaatgttataatttctaggggaataaagtcaggaggaggggtgaaattcacacgaagccgcagtgcggcaagtgcttttagtgtttgattggcggacagccagggctctgaattccactcatccaaaagccatgctccagctggtagttttccctcgctgtccatcatttttagtttcccctttaagagttttctgggctgggcgctgtggctcacacctgtaatcccagcactttaggaggccaaggtaggtgaatcacctgaggtcaggagttcaagaccagcgtggctaacctggagaaaccccatctctactaaaaatacaaaattagccgggcgtagtggtgtgcacctgtaatcccagctactcaggagtctgaggcaggagaatcacttgaacccaggaggcggaggtagcagtgagctgaggccgcgccattgcactccagcctgggcaacaagagtgaaactctgtctcaaaaaaaaaacaaaaaacaaaacaaaaacaaaaacaaaaaaaacagacttttctgatgggaacgttttctgtagaagagatcgtcaggggggttgatgttgctgaagtgtgtagacggtgctttctcagaggtgccgtgatttgaaggcactaaatgcattcctgcacaacggcgtctcctggccccatgatctagagcacccgcttgaaaggccaaccacacacccatctttccttgggccccggtcagacatctgggtgggcagtggattaaagttgtgagttgttaacaccctgggtggttaatttgcctcaacacagaattacacactgcaagccccgcactgcacgatgggaccgtctcggagggaggatgtgcagacatgcggggacatcgcagcagtgtgggcaggctgtgagggggccgttctccacaggcgccctgctcccaggagcaggacaggttccttgctgtgactgaggagtccggtggcctgtcagccagagggttgatgggggaagagacaccccatccctcccgattcctgaccccaccctgccccaggacccttgggcccctggggtaggagtcactgttgcttcatatcctacgcccaccctctcagggcaccccacctctctcctacccccaccctcccaggcacccctcccctctcctacccccaccctcccagggcacccctcccctctcctacccacaccctcccagggcacccctcccctctcctacccacaccctcccagtgcacccctcccctctcctacccccaccctcccagtgcacccctcctctttcctacaacccctccccaagcacccctgccctctcctgcccccaccctccccatgcacccctcccctctgctacctccaccctccccgtgcatccctcccctctcctacccccactctccctgtgcactcctcccctgtcctctggccaccctcccagggcacctctcccctctcctacccccaccctcccagagcacccctcccctctccaacccccaccttctcagggcatcccttccctctcctacccccaccctcccagtgcacccctcccttctcctaacccccaccttctcagggcacccttccctctcctacacccaccctcccagtgcacccctcccttctcctaacccccaccttctcagggcatcccttccctctcctacacccaccctcccagtgcacccctcccttctcctaacccccaccttctcagggcatcccttccctctcctacacccaccctcccagtgcacccctcccttctcctaacccccaccttctcagggcacccttccctctcctacmcccaccctcccagggcacccctccccttgtcttctttaccataagctacagtctggccgggtttggtggctcacacctgtaattccagcactttgggaaaccgaggcaggaggatcacttgagaccaggagttcaagaccagcctggccaacatggtgaaaccctgtctttactaaaaatacaaaaattagccgggcatggtggtgtgcagctgtagtcccagctactggggagtctgaggcagaacaatcgcttgaaccggggaggcggaggttgcagtgagctgagatcgcgccactgcactccagcctgagcgacagagtgagactctgtctcaagaaaaaaaaaaattatttatcctggaccgggtctgtttctgagctccagcctgggagacagagcaagactccatctcaaaaaaaaaaagaaaaagaaaagaaaagctacagtcttgaaaaatggaaaacacccgactaaacaagtttctaaaacaattctgagttcctaagtcgtaaaactgtttttaaaaggatatgttgaagatgaaatataggatagtagttcctaggaaggaatccagaaagaaggcaggattggagagggcacacctgagtgtcagtgatgtgatgggtaatgacgtatgtttgatattggttgtgtttacatgggtgttaattatctcacacaagttacaaatatattttacacattatgtttaattcttttttaatgcaattttttttttttgagacggagtctcgatctgtggtccaggctggagtgcagtggtgcgatcttggctcactgcaacctctgcctcccaggttcaagtgattcttctgcctcagcctcctgagtagctgggattacaggcgcacaccaccattcccagctaagttttgtatttttagtagagatgaggtttcgccaggttggccaggctgtcttgaactcctgacctcaagtgatccacccgcctcggcctcccacagtgctgggattataggcgtgaactactgcacctggcctttaatgcaaattttaaaaatataatttcaacttttattttagatccggggatacatatacaggcttgttccgtgtctattgtgtgatgttgaggttagggtatgagtgattcccgtcactcaggtagtgagcgcggtacctacagatagtttttcagccctggccctcccccaatgtttaattcttcatgctgtgaaatatttcattatttatgtgtgatgtaaagtaatccccccttaactgaagctttgctttccaaagttttagctatctgtggycaactgcagttcaaaaaacttacataaaatattttcaatgagaaagaccacattcacataactttcattacagtatgttgttataactgttctattttattattattgttgcgaacttcttactatgcctgatttataaattaaactttattacagatatgtatgtataggaaaaagcatagtacagacagtcctctacttatagtggtttgacttctaagtttccaactttacgacaggtttctagggacctaactccatcatcagtgaactccttaccctttatgatgggattacggtttctactgaatactcattgcttttgcaccatcacaaagtcaaaagtaaattgggactgggcgtggtggcttacgcctgtaatcccaacattttgggaggtggaggtgagaggatcacttgaggccaggagtttgagatcagcttgggcaacatagtgagaccctgtctctatagaactaaaacattagccaggtatggtggcgcatgcctgcggtctcagctatccgagagactgaggtgggaggatcacttgagcccagatcagggctgcagtgaacaatgattgtgctactgcactccagcctgggtgacagagcaagaccctgtctcaaaaaaaaaaaaaaaaaaaaaattgtaagttgaaccattgtgagtcagggacagtctactgtgttgccagcattaaatgccttttgaacttaggatattttgacttacaacgggtttataggagttcgaccccatcataagtggagaagcatctgaatatacagagtttggtatgatctgtggtttcaggtatccgctggagctcttggaacatatcccctgcagatatgggggactattgtgtgtgtgtgtgtgtgtacgtacacacatatatacgcacattatacattatatgtatatgatatatatgtgtgtgtgcatatatatagagcctctgatccatatcttttatatatatatatattttttttcttcccttccccttccccttcctctttccttccttcctttcctttcttccttcctccctccctccctccctctctccctcctctctctctctctcttttgctctgtcacccaggctggagtgcagtggcgtgatctgggctcactgccacctctgcctctcgggctcaagcgattctcctgcctcaagctcctgagtagcttggattacaggcgcacaccaccacgcagttaattttttttttttgagaccgaatctcactctcttgcccaggctggagtgcactggcgtgatctcagccccccaggttcacgccattctactgcctcagcctcccgagtagctgggaccacaggcacccgccaccatgcccagctaatttttttgtatttttagtagagacrgggtttcaccatgttggccaggttggtcggaaactcctgacctcgtgatccacccacctcagcctcccaaagtgctggggttacaggcgtgagccaccgtgcctggcctctatacacatattttctgattaggtgcaaagcagtgtgttataggcgtgtcaagagcctcaagtggccaagtgcagtggctcacgcctgtcatcctagcactttaggtgtctgaagtgggagggcccttgagccaaggagtttgagaccagcctgggccacataaggagacctcacctctattacatttttttttcttctgagacggagtttcactcttgttgtccaggctggagtgcagtggcgtaatctcggctcactgcaacctccacctcccgggttcaagtgattctcctgcctcagccttccgagtagctgggattacaggcatgcgccaccacgcccggctagttttgtatttttagtagagatggggtttcgtcatgatggccaggctggtcttgaactcctgacctcaggtgatctgccggctttggcctcccaaagtgctgggattacaggcgtgagccactgcacccggctaaaaataawtttttttcaataaaaaataaataaataaattaaataaataaataaatagcgagccttaaggggagacagacgtgtaactgaactgcacagtgggaacaggccacttcctggggatgtcatgacgctgacttttttcagatccacattgacatgagtctgcccaaatattactagtcctattttaattcatatatatatgtatatatatatattttttttttagatagagcttcactcttgtttcctgggctggagtgcaatggcacgatctctgctcactgcaacttctgcctcctgggctcaagcgattctgctgcctcagccacccgagtagctgggattacaggtgcctgccaccacgtccagcaatttttttgtattttttaatagagacacggtttcaccatgttgaccaggcttatctcaaactcctgacatcaggcgatccacctgccttggcctcccaaagtgctgggattacaggtgtaagtcaccgtgcccggccttaattcatatttttctaaaaaacaagaagttcacatatcaatgaaaatataaaagagaggaacataaggagtggaagaggcattttataatttatctagatatgacattttaattgtaattagctttattgatatatagttaaaattcaataaaattcacctattttaagtgcaaagtttaatgagttttgtcaatatgtacagttatgtattcaccaccagaatctagacacagaatgcttccamcccttcagaaagcttcccatgccccatactaatcctctttcccattctcagcccatggcaaccgctcatctgctctccgttaaaagttttgccttttctagaatttcgtatatatagaaacatgtgagtagtcttttgtttctggcttcttccacttaacacaatgcttttgagattcatccatgttatatgtagcagaaatttacgcattttattacctaatagaactcatttgtatggataacacaatttgtcttgattcacctattgattactgataaggatttgagtaatcacaaattttttaattgattttttattgtggtaaagtaacatcagatttgtcattttaaccattttaaagtgtataattcagtgacattaattacatttgcaatgatgtgcaaccattaccattatctatttccaaaacttttcttcaccccaaacagaaagtctgtaacccttaaaccgtgggcagtggcccagatctggtcatagctactctggaggcacgggctggaggatcatttgagtccaggagttgaagaccagctggggtaacatagtgagactgcatctctaaaaaaaccccaaaaccaccgcgcgcggtgggaggccgaggcgggcagatcacctgaggtcaggagttcaagaccagcctggccaacatagtgaaaccctgtctctactaaaaatacaaaaattagccaggcgtggtggcacatgcctgtagtcccagctacttgggaggctgaggcaggagaattgcttgagcccaggaggcagaggttgcagtgagctgagattgcgccactgcactccagcctggctgacagagcaagactctgtctcaaaaaaaaaaaacaaaacaacacaaaacaaaacctgaaaacctctgtaaccattaaacaataactccccattctctcctccctccccacagtccctgataacctccagtctactttctttctctataaagttgttattttgaatatttcatataagtggaatcatacaatatttgtcctttagtgtctggcttatttcttttagcatgattttttttttttagatggagtcgcttgctcttgtcgcccaggctgaagtgcagtggcgcgatctcagctcactgcagcctctgcctcctgggttcaagcgattttcctgcctcaacctccgagtagctgggattataggcaagcacccagctgacatttaaatttttaagcagtctgattaatcatgttttgtggattgtactttttgcattttagtaagaaacctttatctaacccaaggtcccagtgtttttctcctttgttttattctagaaattttataaagcttttagacccatgctccatttcaagtgaatttttgaatatgttgtgaagtaatagtgaaggcagttttgttttgcatgtgcattgttccggcaccatttgtggaagagactttttcccgctgaattgtcatcttcttaaaaaatcatttattggccgggcgcggtggctcatgcctgtaatcccagcactttgggagcccgagacaggcggatcacgaggtcaggagatcaagaccgtcctggctaacacggtgaaaccccgtctctactaaaaatacaaaaaattaccgggcatggtggcgggcacctgtaatcccagctacttgggaggctgaggcaggagaattgcttgaacctgggaggcagaggttgcagtgagctgagatcgcgccactgcactccagcctgagcaacagagcgagactccgtctcaagaaaaaaaaaaaatcatttttcctggaccgggtctgtttctgagctccagcctgttccagtagtccatatgtgtttccttacgcgtggcttcagtgtcttcaattactgtagctttgtaagtcttgaaatcacatggcgtaagttctccagctttgtttgtttttcagaattgctttggctaatcttcacaattgctttgcatttccatataaatttagattcagtttgtcaatttctataacaaaactctcctaggattttgactgatattgctttaaatctttgcatcaatttagggagaacatgttaactattttgagtcttctggttcaggaacatggtatatgtctccatttatttaggtctccattaattttctcagcaatgctttgcaattcttactatataggtcttgcaaatattttgttaaattcatccatatgtattatatttttatgctattgtaaatgatatattttaatttcaatcctcaatttgtcattgcttgtatatagaaatacaatataatttttgtatattaatcttttattctatgacgttgctaaactcacctgttaattctaataaactttaggattttctacataatgtgatcacattatctgtgaataataacaatgttacttttttttttttttaagatggagtcttgctgtgtcacccaggctggagtgcagtggcatgatctcagctcactgcaacctctgcctcccgggttcaagcaattctcctgcctcagtctccccagtagctgggattacaggcacccaccaccgtgcccagctaatttttgtatttttagtagagacggggtttcaccatgttggccaggctggtcttgaactcctgacctcgtgatccgcctgcctcagcctcccaaagtgctgggattacaggcctgagccaccatgcctggccgacaatattacttctttctttcctatctgtgtggcttttgcttccttttattttcgtattgcactggccaggaccagtacaacgttgaatagaagtggagacaatggacatcatgaagacacctttaaacatttctttttgtcagaaataatcactggctgtaatagaggcataaacaaaatatgatggaatgcaaactatgtatgtgtgaacaggggttagcagaaaaggaaacaattaaatcctagtcactggggaagattcctaaggagcagagtttttaagcaggttgcttggctctcattggtctgaccctggaaggtggyggtttctgtagtctgtttccctcacccatgatatgctgctggagttcccttccccatccccccacagcagagctgcygcgactccctttctatctgttccaggatggtgtcctctccctgcacgcmggcaagctcacggacttgctcccgtatcctgggactgagccttgggactgcagccctgtttgctgctggggccaacgtggcactcctccttcctaactgggatgtcacctacctgttgaggggcctccttggcaggcatgccatgctgggaactgggctctggggaggaggcctcatggtaagtgtccggggttccctgaacgtgaactctcaaagagaccccggcggggagcaggaaggtggcatgggaagagtgttttgattccttgcagaaaagtttattctaacaagctgatcttgggtctgtagaagctctaagagacaggaagcctagcttgggaccaggcaggtcrggtgtgaaagttaacatccacagcgttagatcaggctcgtcatacaaatgtgggtccccagagtcagagtcaacaggactgygttcatgtgagctgccagccactctaacagctgtgggcagcacctagaaacagccggcaaagtcgatttccccatctcaacattcttctctctcctgcaggtactcactgcagctatcctcatctccttgatgggctggagatacggctgcttcagtaagagtgggctctgtcgaagcgtaagcaccagattccactcttctaacacccagaatgtctccacctctattactctagaggcagggcggtaaagaggcaattttggtcttggggcctgaagtcaggtcctcactgtgaccctcagtaacgctaagttcttgggcaagttgcttcatctttccagtttcaggctttcatcygtaaaatgggagctgatcaagtcaagggagtagtgcttagtgaagcccagacgtctgtaccagtgtgaggacccagacgtctgtaccagtgtgagaaactgttactctcttagggtgttggacaatatggacatgagttatgacactgtaatcatgtgtcattgatggaaattttcctagttattttaactaatattttcttagaacaggaaagttttccagagatcatctaatcactagattctaatctaacccctccattttacagataaactgaggcccagaataaatttctaccttattaattacagcagcaactgtataaacttgaaagatctcagtatatgtgtgtgtaacaaacacacacacacacacacacacacactcgttctcagacatgaatctgtggccttatggtaactccacagcctgctctgatatctgcagcccacatgttgggaagcccactgactcagttacatgttaaaaaatcaaatataggccaggcgcggtggctcacgcctgtaatcccagcactttgggaggccaagatgggcggatcacctgaggtcaggagtttgagaccagcctggccaacatggtgaaaccccgtctctaccaaaaatacaaaaattagctgggcgtggtggtgggcgcctgtaatcccagcaactcaggaggctgaggcaggaaaatctcttgaacccgggaggcggagcttgcagtgagccgagatggcgccactgcactccagcctgggcgacagagcgagactccgtttcaaaataaataaataaataagtacatagataaataaataaacacttgcacatttcattcactgtctgttctcattctggttttccccgtggcacgtagttctgacacttgaatgtgcatgagaatcacctggagggcttttgccggaacacggattgctgggctccctccccagagtttctgattcaggatggcggggaagttttgcatttctaacaggttctcaggtgatgtgatgcggctgggcagggaccccattttgggaaccactgccctaggcttactgattcatcttgactcctttaactcagagtcaaaacttactatgcacctttgtctgatccctccccaactccaaaccagcttgacctcagtgggagaatgactccatgactctgcagaaaaacgctatgtaggtgttattcacatttttaaaataggcatttttgggggagggagaaaaaaatctagaaccctaagaaagaatccaatatgggccgggcacggtggctcatgcctgtaatcccagcactttgggaggctgaagcaggtggatcacaaggtcaggagattgagaccggcatgaccaacacagtgaaaccccatttctactaaaaatacaaaaattagctgggtgtggtggcgcatgcttgtagtcccagctacttgggaggctgaggcaggagaatcgcttgaactcagaggcagaggttgcagtgagctgagatcgtgccactgcactccagcctgggcgacagagtgagactctgtctcaaaaagaaagagagagagagaaagaaggaaggaagggaaggaaggaaggaacgagaaagaagccaatgtagaagcaggctagaaacctgtcaaggaaggaaacccagttattttctgggagggcagtgggagcacagactgatggccaagaaagctctcagctggagaaacacagcgacagaagtggagtcatttcagagcttggctgcagcttctctctcgctgtttctctcccttctttccctccctcccacttctctccttcccttctttcctgcttctttctttccttccttccctcccttccttttttttatccttgatttgaaatagagaagaatcagagttgggaacctggaacttttgaaaatgcagcttttccttagaagagtcagtggtgggcctgtggtagcttcttctttagctcagaggctgaatggctgtaatgtgcaaaaggtttgtgatgccaagctgctgagcagctcaggcgaactcacggtcagggagatccggggcctgcgattctgcttcttggtcctttctctcctagaaacccctcacggcctccccaccatgggttatgcttcaaagggggtgccatggacagaattctcccccatgacaggacggaagaacactgagaccagagaagtcagacctgtgcagaccgccccacagactccccagcngcgaccccgtcttagctcagcgtttctcctccctccgcaggctccccagctgcgaccccgtcttagctcagtgtttctcctccctccgcaggtgcttactgctctgttgtcaggtggcctggctttacttggagccctgatttgctttgtcacttctggagttgctctgaaagatggtcctttttgcatgtttgatgtttcatccttcaatcagacacaagcttggaaatatggttacccattcaaagacctgcatagtaggtaaatgggtrgaggcttgggcttggtcttttcagacagagagagagagagagacaaaaagacacacagacgaactacaagctccwttgggtcacacatcctagcatcttgctcctctgatactcagaaaattgcaaatggagcagtaacggtcaccctcatgagcccagtcccatgacccggtcaggggagaccccagttttctactggggttgcctgtttggctttccttacttatcgcctgacccctggtctccttattttttgggataggaattayctgtatgaccgttcgctctggaactccrtctgcctggagccctctgcagctgttgtctggcacgtgtccctcttctccgcccttctgtgcatcagcctgctccagcttctcctggtggtcgttcatgtcatcaacagcctcctgggccttttctgcagcctctgcgagaagtgacaggcagaaccttcacttgcaagcatgggtgttttcatcatcggctgtcttgaatcctttctacaaggagtgggtacgaattataaacaaacttcccctttaggtatccctggagtaataatgacaacaaaattcactgcaggtcggtggaatgatagaatgcattttaaatcacattgtaaacttccaggtgatccatggataggataaataactaagttattataattgtttaggaatttatagtccataaaatatcctccagccagggtctcatttcagcttcttgacaatcccataaagttggccatttgttacacatagagaagttgaggctcacagagggtaacaggcttgctgtaaaagcacacagtgaagttaaggtgaagtcagcacctgaccccctatctccctgttgttttgttgttgctgagacagggtcttgctctgttcccctgtctggagtacagtggcacaatcatagcttactgtaacctacaacccatgcactcaagcgatcctcctgccttagcctccgagtagctgggactacaggcacacaccactacacctggctaatttttaaattttctgtagagagggagtctcgctatattgcccagtctggtcttgaactcctgacctcaagtgatcctcccaccttggtctcccaaagcgctggattacaggcatgagtcactgtgcctggccccaacccccatcttctaaattcaacttctccagttattgtggactaaatagtgtttcctccaaatctgtaggttgaagccctaacccccaatatgacagtctttggtggtggcactttttttttttttttttgagacagtctcgctctgtcacccaggctggagtgcagtggcgtgatctcggctcactgcaacctccacctcccaggttcaagtgattctcctgcctcagcctcctgagtagctgggattacaggcatgtgccaccacacccagctaatttttgtatttttagtagagacgggggtttcaccatgttggccaggctggtctcgaactcctggctgcaagtgatccgcccaccttggcctccaaaagtgctgggattacaggtgtgagccaccgcgcctggccatgatggcacctttaaattagtaattaaggttaaatgagactgggcgcaatggctcacacctgtaatctgagcactttgggaggccaatgtgggaagatcacttgtgaccaggggtttgagactaacctgggcaacacagtgagacctcgtctcaaaaaaaaaaaacacaacaacaaatgattaaatgaggccatagggtgggaccctaattaaataggactggtgtgcttataaaaagaggaagaaagaacagagctctctacactggctcaaagaaaaaggccctgtaaggacccagtgagaaggcggctgtctgcaagcgcaggggcgaggcctcaggagataccaaacctgctggcacctggatcttggacttctagcctccagcactgtgagaaaatctatttcagttgcttaagtgcccagttcatggtattctgcaacagcagcctggcagactaatacaccagcattctcttcactagtgttcaagagttcaacaagtagaggagcatcacctctgtccacacagtttggatatctgtcctcacccaaatctcatgttgaattgtgatccccagtgctagaggtggggcctggcagaaggtgtgtggatcatgaggcggatccctcacggctcagagctgtctttgtgatagtgggttccygcgagatctggtcatttagaagcgtgtggcacctctggcctctctctcgcctgctcctgctctcactatgtgactcgcctgctccctcttcacctgctgccatgagtaaaagctctctgaggcctccccagaagctgagtgatgtgggtgctatgcttcctgtaacccctgcagaactgtgagccaattaaatctctttttcttttttatggagtctcgctctgttgcccaggctggagtgcagtggcatgatctcggctcactgcaccctctgcctcccaagttcaagcgattctcctgcttcagcctcctgagtggctgggattacaggcacccgccaccacacctggctattttttttgtannnnnnnnnnnnnnnnnnnnnnnnnnnnnnnnnnnnnnnnnnnnnnnnnnnnnnnnnnnnnnnnnnnnnnnnnnnnnnnnnnnnnnnnnnnnnnnnnnnnnnnnnnnnnnnnnnnnnnnnnnnnnnnnnnnnnnnnnnnnnnnnnnnnnnnnnnnnnnnnnnnnnnnnnnnnnnnnnnnnnnnnnnnnnnnnnnnnnnnnnnnnnnnnnnnnnnnnnnnnnnnnnnnnnnnnnnnnnnnnnnnnnnnnnnnnnnnnnnnnnnnnnnnnnnnnnnnnnnnnnnnnnnnnnnnnnnnnnnnnnnnnnnnnnnnnnnnnnnnnnnnnnnnnnnnnnnnnnnnnnnnnnnnnnnnnnnnnnnnnnnnnnnnnnnnnnnnnnnnnnnnnnnnnnnnnnnnnnnnnnnnnnnnnnnnnnnnnnnnnnnnnnnnnnnnnnnnnnnnnnnnnnnnnnnnnnnnnnnnnnnnnnnnnnnnnnnnnnnnnnnnnnnnnnnnnnnnnnnnnnnnnnnnnnnnnnnnnnnnnnnnnnnnnnnnnnnnnnnnnnnnnnnnnnnnnnnnnnnnnnnnnnnnnnnnnnnnnnnnnnnnnnnnnnnnnnnnnnnnnnnnnnnnnnnnnnnnnnnnnnnnnnnnnnnnnnnnnnnnnnnnnnnnnnnnnnnnnnnnnnnnnnnnnnnnnnnnnnnnnnnnnnnnnnnnnnnnnnnnnnnnnnnnnnnnnnnnnnnnnnnnnnnnnnnnnnnnnnnnnnnnnnnnnnnnnnnnnnnnnnnnnnnnnnnnnnnnnnnnnnnnnnnnnnnnnnnnnnnnnnnnnnnnnnnnnnnnnnnnnnnnnnnnnnnnnnnnnnnnnnnnnnnnnnnnnnnnnnnnnnnnnnnnnnnnnnnnnnnnnnnnnnnnnnnnnnnnnnnnnnnnnnnnnnnnnnnnnnnnnnnnnnnnnnnnnnnnnnnnnnnnnnnnnnnnnnnnnnnnnnnnnnnnnnnnnnnnnnnnnnnnnnnnnnnnnnnnnnnnnnnnnnnnnnnnnnnnnnnnnnnnnnnnnnnnnnnnnnnnnnnnnnnnnnnnnnnnnnnnnnnnnnnnnnnnnnnnnnnnnnnnnnnnnnnnnnnnnnnnnnnnnnnnnnnnnnnnnnnnnnnnnnnnnnnnnnnnnnnnnnnnnnnnnnnnnnnnnnnnnnnnnnnnnnnnnnnnnnnnnnnnnnnnnnnnnnnnnnnnnnnnnnnnnnnnnnnnnnnnnnnnnnnnnnnnnnnnnnnnnnnnnnnnnnnnnnnnnnnnnnnnnnnnnnnnnnnnnnnnnnnnnnnnnnnnnnnnnnnnnnnnnnnnnnnnnnnnnnnnnnnnnnnnnnnnnnnnnnnnnnnnnnnnnnnnnnnnnnnnnnnnnnnnnnnnnnnnnnnnnnnnnnnnnnnnnnnnnnnnnnnnnnnnnnnnnnnnnnnnnnnnnnnnnnnnnnnnnnnnnnnnnnnnnnnnnnnnnnnnnnnnnnnnnnnnnnnnnnnnnnnnnnnnnnnnnnnnnnnnnnnnnnnnnnnnnnnnnnnnnnnnnnnnnnnnnnnnnnnnnnnnnnnnnnnnnnnnnnnnnnnnnnnnnnnnnnnnnnnnnnnnnnnnnnnnnnnnnnnnnnnnnnnnnnnnnnnnnnnnnnnnnnnnnnnnnnnnnnnnnnnnnnnnnnnnnnnnnnnnnnnnnnnnnnnnnnnnnnnnnnnnnnnnnnnnnnnnnnnnnnnnnnnnnnnnnnnnnnnnnnnnnnnnnnnnnnnnnnnnnnnnnnnnnnnnnnnnnnnnnnnnnnnnnnnnnnnnnnnnnnnnnnnnnnnnnnnnnnnnnnnnnnnnnnnnnnnnnnnnnnnnnnnnnnnnnnnnnnnnnnnnnnnnnnnnnnnnnnnnnnnnnnnnnnnnnnnnnnnnnnnnnnnnnnnnnnnnnnnnnnnnnnnnnnnnnnnnnnnnnnnnnnnnnnnnnnnnnnnnnnnnnnnnnnnnnnnnnnnnnnnnnnnnnnnnnnnnnnnnnnnnnnnnnnnnnnnnnnnnnnnnnnnnnnnnnnnnnnnnnnnnnnnnnnnnnnnnnnnnnnnnnnnnnnnnnnnnnnnnnnnnnnnnnnnnnnnnnnnnnnnnnnnnnnnnnnnnnnnnnnnnnnnnnnnnnnnnnnnnnnnnnnnnnnnnnnnnnnnnnnnnnnnnnnnnnnnnnnnnnnnnnnnnnnnnnnnnnnnnnnnnnnnnnnnnnnnnnnnnnnnnnnnnnnnnnnnnnnnnnnnnnnnnnnnnnnnnnnnnnnnnnnnnnnnnnnnnnnnnnnnnnnnnnnnnnnnnnnnnnnnnnnnnnnnnnnnnnnnnnnnnnnnnnnnnnnnnnnnnnnnnnnnnnnnnnnnnnnnnnnnnnnnnnnnnnnnnnnnnnnnnnnnnacccaggcctgccagggtggggaaggcggacacagaggcctgcgggagacacaaggaggcacagcctcttgagcaggcaggaagcccccaagtccagagagcacatcctatccctgcatacaacatccaggaagcttgcctgggcttgtctcacatttccctcttggctggttagtttcagggtcatggctaggatatgcctgatatggagaagcttctcttgctggggaaaggtactgacacctccacacaactcacgcagaatttttttttttttttttttttttgatacagagtctcatgctggagtgcagtggtgtgatctcggctcactgcaagctcggcctccttggttcaatcgattattctgcctcagcctccagagcagctggggttacaggcacgcgccaccacgcccggctaatttttgtattttcagtagagatggggtttcaccatgtcggccaggatggtcttgaactcttcctgactcaggtgatccgcccgcctcggcctcccaaagtgctgggattgcaggcctgagcccccgcacccggccgccgcaattacttctgcaccagcctaatacctcaagtccaggagcctcaggccccgcgtctatttcctccgactgcggcgcggctgatactgcctgaggcgggtggaagctgtcgcgcgtccggacgcgaccagttcccgcccagcagccggtgcgcaggcgcgggcagggagggcggctgtgcggggcgctcgcgggcttcagcgaggcgggagggcggccctgttgccctggagacgctttccctgctgccggccgcgaccgcaacccgctaggccttcatcgcgagctacgcccggaccgagaagccccggcatggccacgtccatcggagtgtccttctcggtgggcgacggggtgcctgaggctgagaagaacgcaggggagcccgagaacacctatattctgcggcctgttttccagcagaggcgggtagaggacgggstgtggcggggcgacctcgagcgcgctggtctgaggggcggagctcgcctgggacctgggccacggaaggagcgcgggggacgcgcggggtccgcggggcgggaggcgggaggccgcgaggcgggcgggcggccctgctgtgacgtccgggcgcccctcccgctgcaggggccgcaggggaccccacccgcttcctcagtgtttgggcgccgggcgcgtcttagggtggcgcggcgggaatggttggccctgggaaacccgcgatggcgtcctgagtaaggagatgggtagaatagaggcaggaagccactcgcgtcggatgccgttcagccgtgattcgagggtgactgtgcacacgggtgccaggatgggctcactcccggcgcgggagctgcatctgtgcgaagtcctacccgggtgggatctggaggcccttagaccaccgcagcgagccctcgctaggattaaggctcacgggccagagcagagggtactcagctaggtttgtgagatcactaactttacacacacacacacacacacacacacacactgaaaaaaatatcaggctcacgggccagagcagagggtactcagctaggtttgtgagatcactaactttacacacacacacacacacacacacacacacactgaaaaaaatatcaggctcacgggccagagcagagggtactcagctaggtttgtaagatcactaactttacacacacacacacacacaacacacacacacactgaaaaaaaatgtcaggctcacgggccagagcagagggtactcagctaggtttgtaagatcactaactttacacacacacacacaacacacacacacacacacacacacacactgaaaaaaaatgtcaggctcacgggccagagcagagggtactcaggtttgtaagatcactaactttacacacacacacacacacacacacaccacacacacaccacacaacacacacacacacacacacacactgaaaaaaatgtcaggctcacgggccagagcagagggtactcagctaggtttgtgagatcactaactttacacacacacacacacaccacacaacacacacacacaccacacaacacacacacacacacactgaaaaaaatgtcaggctcacgggccagagcagagggtactcagctaggtttgtaagatcactaactttacacacacacacacaccccatatttgcttggcaaatatggaaaacaggaattttgattataatgtgatacaaatttctttgtttatttttattctcttggtaactcacagaaaaagtgatacaaatttcatacaggattttttcccttgggtagaatgaacacagagaaagataccnnnnnnnnnnnnnnnnnnnnnnnnnnnnnnnnnnnnnnnnnnnnnnnnnnnnnnnnnnnnnnnnnnnnnnnnnnnnnnnnnnnnnnnnnnnnnnnnnnnnnnnnnnnnnnnnnnnnnnnnnnnnnnnnnnnnnnnnnnnnnnnnnnnnnnnnnnnnnnnnnnnnnnnnnnnnnnnnnnnnnnnnnnnnnnnnnnnnnnnnnnnnnnnnnnnnnnnnnnnnnnnnnnnnnnnnnnnnnnnnnnnnnnnnnnnnnnnnnnnnnnnnnnnnnnnnnnnnnnnnnnnnnnnnnnnnnnnnnnnnnnnnnnnnnnnnnnnnnnnnnnnnnnnnnnnnnnnnnnnnnnnnnnnnnnnnnnnnnnnnnnnnnnnnnnnnnnnnnnnnnnnnnnnnnnnnnnnnnnnnnnnnnnnnnnnnnnnnnnnnnnnnnnnnnnnnnnnnnnnnnnnnnnnnnnnnnnnnnnnnnnnnnnnnnnnnnnnnnnnnnnnnnnnnnnnnnnnnnnnnnnnnnnnnnnnnnnnnnnnnnnnnnnnnnnnnnnnnnnnnnnnnnnnnnnnnnnnnnnnnnnnnnnnnnnnnnnnnnnnnnnnnnnnnnnnnnnnnnnnnnnnnnnnnnnnnnnnnnnnnnnnnnnnnnnnnnnnnnnnnnnnnnnnnnnnnnnnnnnnnnnnnnnnnnnnnnnnnnnnnnnnnnnnnnnnnnnnnnnnnnnnnnnnnnnnnnnnnnnnnnnnnnnnnnnnnnnnnnnnnnnnnnnnnnnnnnnnnnnnnnnnnnnnnnnnnnnnnnnnnnnnnnnnnnnnnnnnnnnnnnnnnnnnnnnnnnnnnnnnnnnnnnnnnnnnnnnnnnnnnnnnnnnnnnnnnnnnnnnnnnnnnnnnnnnnnnnnnnnnnnnnnnnnnnnnnnnnnnnnnnnnnnnnnnnnnnnnnnnnnnnnnnnnnnnnnnnnnnnnnnnnnnnnnnnnnnnnnnnnnnnnnnnnnnnnnnnnnnnnnnnnnnnnnnnnnnnnnnnnnnnnnnnnnnnnnnnnnnnnnnnnnnnnnnnnnnnnnnnnnnnnnnnnnnnnnnnnnnnnnnnnnnnnnnnnnnnnnnnnnnnnnnnnnnnnnnnnnnnnnnnnnnnnccctgtctctactaaaaatacaaaaaatagctgggtgtggtggcacacgcctgcagtcccagctgcttgggaggctgaggcaggagaatcacttgaacccaggaggtggaggttgcagtgagctgagatcgcgtcactgcactccagcctgggtgacagagtgagactctgtctcaaaaaaaaaaaaaagcaaaataaaaaaataaaacatctctattaaaaaaacgtaaatagaatgttagctgtggattctattaaagacaactttttcttcagtgtcttgtcttctctaattatttgatgacttttactcatgtaagtttttgcagatgggggaaaagagtgaagatgtgaaataaaacactgtccaaaaaatcttagtattcagaaagaccagaaagtacagggactcctttcccctgtatttcttggttgtttcttcccccaagctgtcaagtcctcagcctggcatttagtacctgcagtccatctctcctccctaatccttagctacttcccttactcaaccctcgacccctaccaaactacatctgtagagcatattttgtgcttttcctaccctgttctctttgtctctctgattgttttgtttttttttgttttgttttgtttttgaaatagggtcttgctgttttgtccagggtggagtgcagtggtgtgaacatggctcactgcagccttgacctcctggctcaagcgatcctcccatctcagcctcccaagtagctgggtctacaggcttgtgccaccgtgcttggctaattttttaatttttaaatttttctgtagagatggtgtcttgccatgttgccctggctgatcttgagctcctggcctcaagtgattctcccacctaggcctcgcaaactgctgggattgcaggtgtgagccactgcgcctggtctctctcttttgttaataatgttataccgtctgatctgaaaagttctttttttttttttttttctttttgagacagagtctcgctctgtttcccaggctggagtgcagtggtgtgatctcagctcactgcaacctcctcctcctgggctcaagtgatcctcccgcctcagcctcccaagcagttggaatttcaagcatgcgccaccacacgtggctaattttgtcttgaactcctgaccctcaagagatctgcaagccttggcctcccaacatgctgggattacagatgtgagccaccgtgcccggcctatttccatctgctcttcttagaagacatcattttttgaagagaaagaatatcttcataaaagtaatacatgctcgttgtaataaacctagacaatacaaaaaagtatccataaggtttttttttgagatggannnnnnnnnnnnnnnnnnnnnnnnnnnnnnnnnnnnnnnnnnnnnnnnnnnnnnnnnnnnnnnnnnnnnnnnnnnnnnnnnnnnnnnnnnnnnnnnnnnnnnnnnnnnnnnnnnnnnnnnnnnnnnnnnnnnntgtgtttattgtttttttctgaatttgtttttagtttaagaaatataaaaaatacagaaaagtacaaagaatagcaatcctgtgtatttctatcacccagaattaactgctgttagtatattagcatttttgtttttagactttttaatgaaggttcatcgttaagattttttgtaaaaaatggtacacattcattatacaaaatttaaacactagaaaaataaaatgagaaaaatcacctgaatgccaccaccaataaacaatcattaatattggccaggcacagtggctcacgcctgtaattccagcacttttggaggttgaggcgggcggatctcttgagcccaggagttcgagaccatcctggccaacatggcaaaaccctgtctcttagaaaaatacaaaaattagccgggctggtggtgtgcatctgtagtcccagctattcgggtggctgaggcaggaggatcacctgagcccagggacggagattgcagtgagccaagattatgccactgtgctgcaacctgggcaacagagtgagactctgtctcaaaaaaaaaaaaaaaatcattaatactaggcaaacattacaacagacttctacatgtccatatacatggacaaatgacaatgggatattgtagacctgtttcccatagtcatgtcatattcattctgtaactggatcagttgcctcctgtttagttccttgaccatgtcattttcattgttgagttccttattttctttttttgagacagggtcttcgtcacccaggctggagtgcagcggtgtgatttcagatcactgcagcctcaacctcccgggctcaagtgattctcctgcctcagcctctcaattagctgggaagagttccttatttcaactcctagatgatgagattttgttgtaagttgttttcagaaaggactcagaaatgccgtattccctggattcttttgtgtttgagaatgcctgccttttgcctttaaagtagaatatactatgggccaggcgcggtggctcacgcctgcaatccaggcactgtgggaggcggagccgggtggatcacccgaggtcaggagtttgagaccagccttgccaacatggtgaaaccccgtctctacgaaaaatacaaaaattagccgggcgtggtagtgggcatctgtaatcccagctacttgggaggctgaggcaggggaatcacttgaacccaggaggcagagtctgcagtgagccgagatagtgccactgcactccagcctgggcgacagagcgagactccatcccccgcccctccacccccaaaagtagaatatacatagttttgaggtaataatttattttcttgacccttgtgcttcattgccctctgacattcagtggtaacttgttgtcaagaaatctgagcccagcttgatgttctctgcttaaggaatcctcacctttggctggacgtggtggctcacgcctgtattcccagcactttgggaggccaagacaggtgagttacctgaggtcaggagtttgagaccaccctgaacaatatggtgaaaccccgtctctagtaaaaatacaaaatttaggggctgggcatggtggctcacgcctgtaatcccagcacttagggaggccgaggcgggcggatcacttgaggttgtgagttcgaaaccaggctgaccaacatggagaaaccctgtctctactaaagatacaaaattagccaggcgtggtggcgcatgcctgtaatcccaggctgagacaggagaatagcttgaacccaggaggcagaggttgcagtgagccaagattgcaccattgcactcaagcctggccaacaagggcgaaactctgtctcaaaaaaacaaaacaaaaattagccgggcttgctagtcccaaactcctgacctcaggtgacccacccgtctcggcctcccaaagtgctgggatttcttgggaggctgagacaggagaattgcttgaacctggggggtgaaggaggttgcagtgagctgggatcgtgccagtgcactccagcctgggcaacagagcgagactctgtctcaaaataaataaataaataaataaataaataaataaataaaataatcctcatcttcacctttatgctcagtagcttttctaaagattctgactttctaatgagcattttatagctttcaatctgcagactttattctttccatataaaggaaatttccttatatctctgaatatgtttcctattccattcgttacttccttttcttcaggacaccaaatattgttatgttgagccatctttgtcttctatatttattagtttttctttcccataatttctttcttcttctttttttttttttgagacagggtctcactctgttggccaggctggaatgcagtggcgcagtcttggctcactgcagcctcaagcaatcctcccatctccgcctcccaagtagctgggactacaggcgcctgccaccacacccggctaatttttgtattttttgtagagacggggttttgccattttgcccaggcttcttccttttttattgccatttacttgtgattttcttaaaccagtaattgttttcatttgtgtcttttttcttgccattttgaatttattagttctggaatgatcttttctgggtattctgtttgttccctagggccgtggtctttcttttcatctctttatgttgcttaataacctgattgaggctgggtgccgggactcacacctgtaatnnnnnnnnnnnnnnnnnnnnnnnnnnnnnnnnnnnnnnnnnnnnnnnnnnnnnnnnnnnnnnnnnnnnnnnnnnnnnnnnnnnnnnnnnnnnnnnnnnnnnnnnnnnnnnnnnnnnnnnnnnnnnnnnnnnnnnnnnnnnnnnnnnnnnnnnnnnnnnnnnnnnnnnnnnnnnnnnnnnnnnnnnnnnnnnnnnnnnnnnnnnnnnnnnnnnnnnnnnnnnnnnnnnnnnnnnnnnnnnnnnnnnnnnnnnnnnnnnnnnnnnnnnnnnnnnnnnnnnnnnnnnnnnnnnnnnnnnnnnnnnnnnnnnnnnnnnnnnnnnnnnnnnnnnnnnnnnnnnnnnnnnnnnnnnnnnnnnnnnnnnnnnnnnnnnnnnnnnnnnnnnnnnnnnnnnnnnnnnnnnnnnnnnnnnnnnnnnnnnnnnnnnnnnnnnnnnnnnnnnnnnnnnnnnnnnnnnnnnnnnnnnnnnnnnnnnnnnnnnnnnnnnnnnnnnnnnnnnnnnnnnnnnnnnnnnnnnnnnnnnnnnnnnnnnnnnnnnnnnnnnnnnnnnnnnnnnnnnnnnnnnnnnnnnnnnnnnnnnnnnnnnnnnnnnnnnnnnnnnnnnnnnnnnnnnnnnnnnnnnnnnnnnnnnnnnnnnnnnnnnnnnnnnnnnnnnnnnnnnnnnnnnnnnnnnnnnnnnnnnnnnnnnnnnnnnnnnnnnnnnnnnnnnnnnnnnnnnnnnnnnnnnnnnnnnnnnnnnnnnnnnnnnnnnnnnnnnnnnnnnnnnnnnnnnnnnnnnnnnnnnnnnnnnnnnnnnnnnnnnnnnnnnnnnnnnnnnnnnnnnnnnnnnnnnnnnnnnnnnnnnnnnnnnnnnnnnnnnnnnnnnnnnnnnnnnnnnnnnnnnnnnnnnnnnnnnnnnnnnnnnnnnnnnnnnnnnnnnnnnnnnnnnnnnnnnnnnnnnnnnnnnnnnnnnnnnnnnnnnnnnnnnnnnnnnnnnnnnnnnnnnnnnnnnnnnnnnnnnnnnnnnnnnnnnnnnnnnnnnnnnnnnnnnnnnnnnnnnnnnnnnnnnnnnnnnnnnnnnnnnnnnnnnnnnnnnnnnnnnnnnnnnnnnnnnnnnnnnnnnnnnnnnnnnnnnnnnnnnnnnnnnnnnnnnnnnnnnnnnnnnnnnnnnnnnnnnnnnnnnnnnnnnnnnnnnnnnnnnnnnnnnnnnnnnnnnnnnnnnnnnnnnnnnnnnnnnnnnnnnnnnnnnnnnnnnnnnnnnnnnnnnnnnnnnnnnnnnnnnnnnnnnnnnnnnnnnnnnnnnnnnnnnnnnnnnnnnnnnnnnnnnnnnnnnnnnnnnnnnnnnnnnnnnnnnnnnnnnnnnnnnnnnnnnnnnnnnnnnnnnnnnnnnnnnnnnnnnnnnnnnnnnnnnnnnnnnnnnnnnnnnnnnnnnnnnnnnnnnnnnnnnnnnnnnnnnnnnnnnnnnnnnnnnnnnnnnnnnnnnnnnnnnnnnnnnnnnnnnnnnnnnnnnnnnnnnnnnnnnnnnnnnnnnnnnnnnnnnnnnnnnnnnnnnnnnnnnnnnnnnnnnnnnnnnnnnnnnnnnnnnnnnnnnnnnnnnnnnnnnnnnnnnnnnnnnnnnnnnnnnnnnnnnnnnnnnnnnnnnnnnnnnnnnnnnnnnnnnnnnnnnnnnnnnnnnnnnnnnnnnnnnnnnnnnnnnnnnnnnnnnnnnnnnnnnnnnnnnnnnnnnnnnnnnnnnnnnnnnnnnnnnnnnnnnnnnnnnnnnnnnnnnnnnnnnnnnnnnnnnnnnnnnnnnnnnnnnnnnnnnnnnnnnnnnnnnnnnnnnnnnnnnnnnnnnnnnnnnnnnnnnnnnnnnnnnnnnnnnnnnnnnnnnnnnnnnnnnnnnnnnnnnnnnnnnnnnnnnnnnnnnnnnnnnnnnnnnnnnnnnnnnnnnnnnnnnnnnnnnnnnnnnnnnnnnnnnnnnnnnnnnnnnnnnnnnnnnnnnnnnnnnnnnnnnnnnnnnnnnnnnnnnnnnnnnnnnnnnnnnnnnnnnnnnnnnnnnnnnnnnnnnnnnnnnnnnnnnnnnnnnnnnnnnnnnnnnnnnnnnnnnnnnnnnnnnnnnnnnnnnnnnnnnnnnnnnnnnnnnnnnnnnnnnnnnnnnnnnnnnnnnnnnnnnnnnnnnnnnnnnnnnnnnnnnnnnnnnnnnnnnnnnnnnnnnnnnnnnnnnnnnnnnnnnnnnnnnnnnnnnnnnnnnnnnnnnnnnnnnnnnnnnnnnnnnnnnnnnnnnnnnnnnnnnnnnnnnnnnnnnnnnnnnnnnnnnnnnnnnnnnnnnnnnnnnnnnnnnnnnnnnnnnnnnnnnnnnnnnnnnnnnnnnnnnnnnnnnnnnnnnnnnnnnnnnnnnnnnnnnnnnnnnnnnnnnnnnnnnnnnnnnnnnnnnnnnnnnnnnnnnnnnnnnnnnnnnnnnnnnnnnnnnnnnnnnnnnnnnnnnnnnnnnnnnnnnnnnnnnnnnnnnnnnnnnnnnnnnnnnnnnnnnnnnnnnnnnnnnnnnnnnnnnnnnnnnnnnnnnnnnnnnnnnnnnnnnnnnnnnnnnnnnnnnnnnnnnnnnnnnnnnnnnnnnnnnnnnnnnnnnnnnnnnnnnnnnnnnnnnnnnnnnnnnnnnnnnnnnnnnnnnnnnnnnnnnnnnnnnnnnnnnnnnnnnnnnnnnnnnnnnnnnnnnnnnnnnnnnnnnnnnnnnnnnnnnnnnnnnnnnnnnnnnnnnnnnnnnnnnnnnnnnnnnnnnnnnnnnnnnnnnnnnnnnnnnnnnnnnnnnnnnnnnnnnnnnnnnnnnnnnnnnnnnnnnnnnnnnnnnnnnnnnnnnnnnnnnnnnnnnnnnnnnnnnnnnnnnnnnnnnnnnnnnnnnnnnnnnnnnnnnnnnnnnnnnnnnnnnnnnnnnnnnnnnnnnnnnnnnnnnnnnnnnnnnnnnnnnnnnnnnnnnnnnnnnnnnnnnnnnnnnnnnnnnnnnnnnnnnnnnnnnnnnnnnnnnnnnnnnnnnnnnnnnnnnnnnnnnnnnnnnnnnnnnnnnnnnnnnnnnnnnnnnnnnnnnnnnnnnnnnnnnnnnnnnnnnnnnnnnnnnnnnnnnnnnnnnnnnnnnnnnnnnnnnnnnnnnnnnnnnnnnnnnnnnnnnnnnnnnnnnnnnnnnnnnnnnnnnnnnnnnnnnnnnnnnnnnnnnnnnnnnnnnnnnnnnnnnnnnnnnnnnnnnnnnnnnnnnnnnnnnnnnnnnnnnnnnnnnnnnnnnnnnnnnnnnnnnnnnnnnnnnnnnnnnnnnnnnnnnnnnnnnnnnnnnnnnnnnnnnnnnnnnnnnnnnnnnnnnnnnnnnnnnnnnnnnnnnnnnnnnnnnnnnnnnnnnnnnnnnnnnnnnnnnnnnnnnnnnnnnnnnnnnnnnnnnnnnnnnnnnnnnnnnnnnnnnnnnnnnnnnnnnnnnnnnnnnnnnnnnnnnnnnnnnnnnnnnnnnnnnnnnnnnnnnnnnnnnnnnnnnnnnnnnnnnnnnnnnnnnnnnnnnnnnnnnnnnnnnnnnnnnnnnnnnnnnnnnnnnnnnnnnnnnnnnnnnnnnnnnnnnnnnnnnnnnnnnnnnnnnnnnnnnnnnnnnnnnnnnnnnnnnnnnnnnnnnnnnnnnnnnnnnnnnnnnnnnnnnnnnnnnnnnnnnnnnnnnnnnnnnnnnnnnnnnnnnncactttgggaggccaaggtgagtggatcacctgaggtcaggagttcgagaccagcctgggcaacatggtgaaacaccttttctactaaaaatacaaaaattagccaggtgtggtgatgcatacctgtagtcccagctactgaggaggctgaggtaggagaatcacttgaaccctggaggcagaggttgccggtgagctgagatcgtgccactgtactccagcctgggcaacagagtgagaatccatctcaaaaacaaaacaaaaaaaagatactactatatcttacctaaccttataacaatcttgggaggtaggtactgatattcctgtttaataagggagacttaaactgaaaagttaaattactttctgaggttatacacttgctgagttatagttaggatctgccttcacgtcctcctgacccccaagcttaccaccatattcattaagtacttgtggattgaatgtttatgtccatttctgggcaaatttgtcttcaataagtaattttactacatatttgcttataaataaccttattttttctttctagaaatgggatttgaccgatacaaaatggtggtgcaagtagtgattggagaacaaagaggtgaaggagtattgtgagtagctggattttccttcttgttttagtcatctatatttcttatgaggtatctgtcctttggacaattcagtaagagtgcctttacaagagtgagaagggccgggtgtgatgggtcacacctgtaatctcagcactttgggaggctgaggcgggtggatcacctgaggtcaggagttcaagaccagcctggccaacatggcgaaaccccgtctctactaaaaattagccgggtgtgatggcgtgcgcttgtagtcccagctactcaggaggctgaggcaggagaatcacttcaacgcaggaggtggaggttgcagtgagccaagatcgtgtcattgcactccagcctgggtgacagagtaagactctgtctcaaaaataaataaataaaatatctttattatctctaaaatattgtcagtccttaatatcataaaatatgctgttattattcagatatgcctcatatatgtatgtatgtgttttctttcttttcttttttttttgtttaaagagacagggtgctcattttgtcacccaggttggtgtgcaatggcactatcacaactcannnnnnnnnnnnnnnnnnnnactgcaggtgtgcaccaccacacctggctaattttctttctttcttttttttttttttttttgcagagatgggtcacactctgttggccagtctggtcttaaactcctgggctcaggcaattcaccagccttggcctcctaaagtggtggacttataggcttgaaccaccatgccagacctattattttctttttacaattttttcaaattaagattcaaacaaggtccacacattgcatttggttaatatgtaaattaggatttttttttaagacgtaagatcttgctatcttgcccaggctggagtgcagtggctattcacagatgtgatcataacacactacagactagaactcctgggctcaagtgatcctcccacctcagcctgccaggtagctgggactataggtgcacaccacagcatctggctttaaatttacttcaatgtgttgtttttgctgcctcatttctctctttcttcttttaatcctgccatttgattttatttttatgacagtcttgcttcctcacccaggctggagtgcagtggcatgatctcggctcactgcaacctctgcctgccgggttcaagtgattctcctgcctcagcctcctgagtagctgggattacaggcgctcaccaccacgcccaggtaatttttgtatttttagtagagatggggtttcaccatgttggccaggttggtctccaactcctgacctcaggtgatccacccaccttggcctcccaaagtgctgggattgcaggcgtgagccactgtgccctgtcagttatttatttatttattttttcctgccatttatttgttgaagaaattggtttgtttgtcctgtagagtttcctatattctggcagttgctgattatatacctatggtattgtttaatatgtcttctatttcctgtacttcttgaaaataagtagttagatctagtcttaattagccataggtttgaggttggggaaatactgttttctatacatcctattgcatcttctcagaaggtacaaaatagctggtcatctctttttgctttgttaaggttgatcatggagttcagatattgtcagatggatccatctattataaagtttcccatcagggccgggcgtggtggctcacacctgtaatcccagcactttgggaagctgaggcaggaggatcacttgagcccaggagttccagaccagcctgggcaacacagcaaaactctgtctctacaaaaaaatacaaaaattagccgggcatggtggcacacgcctgtggtcccagctacttgagagactgaggtgggaggacctcttgagcccaggaaggttgagactgcagtaagccgtgattgtgccactgtactccagcctgggtgacagagtgagaccctgcctcagataggtaggtaggtaggtaggtagataagtgcttaccttgtcttctagtttccattgtttctgttgagaagtcagctgtaagttttattattcaatttaagatggtatgtcctctctagccactattactttctttgtatttattctgcttagagcactcagagtctcttgaatctatggattgatttttttgttgttttttttttgagatggagtttcgcttttgtctcccaggctgtagtgcaatggtgcgatcttggctcactgcaagctctgcctcccaggttcaagagattctcctgcctcagcctcccgagtagctgggagtataggtgccaacaccatgctcggccttctaaagtcctgggattaccagtgtgagccactgcacccagccaggttgattttttttatcagtttgggaaaattcttagccattacctttgtttaaaaaaaacagtttttggccaggtgcagtggctcccacctgtaatctcagccctttgggggaccgaggtgggtggatcacttgaggtcaggagttcgagaccagcctggccaacctggcgaaaccctgtctctactaaaattacaaaaaattagccgggcatggtggtgcacacctgtaaccccagccacttggaggctgaggcaggagaattgcttgaacctgggaggtggaggttgcagtgagctgagatcacgccactgcactccagcctggggaacagagtgaaactctatctcaaaaaataaaaaaataaaaaaaccaagtttttattttaaaatagttttagatttatagaaaagttgcagagttagcgtatactccacacccagtttccctgttactgtaagaatagtaattatgctattgagacagttcttgctctgtcgcccacgctggagtgcagtggtgcaaccgtggctcactgcagctttgacctcttgggcttaaccagtcctcctgcctcggcttcccaaaacactggggttacaggcatcatctaccgcacccggactccctatggttaacatctacatagtatggaacatttattataattaatgaaacaatattgatacagtgttatcaaataaagctttgttctgatttctrgtttgttcctaatgtcctttttctgctttaggattctatctaggatacmacattaaatgtctctttgggctcttcttggcggtaacagtttctcagactttcttgtttttcatcaccttgacttttttgaggagtactggttaggtgttttgtagaatgttccttcactgggatttttctgctaatgattagtctgaggttacaggtttttggaaggaagatcacagaggtaagacgccattctcgtcatatcatatcaatggtacatactgtcaacatgacatgttactgttcatatgaactttgcctccctgcctgagctaatgcttctcaggtttctttactataaacttactctttctataactgctcagtgggttcacttgcccgctgcctagacagagccgattcatcatgacaggggaattgccatagagaaaaagtaattcacgcacagccggctgtgcgggagaccggagttttattattactcaaatcagtctctcccagcattcggggagcagagtttttaaggacagcttggtgggtgtggagagccagtgagccgggagtgctgattgatcagggatggaatcacagggagtcagctgtcttcttgtgctgagtcagttcctgggtcggggccacaagatcagatgagccagtttatccatctgggtggtgccagctgatccatcaagtgcagggtctgcaaartatctcaagcgctgatcttaggagcagtgtagggagggtcagaatcttgtagcctccagctgcatggctcctaaaccatcatttctaatcttgtgactaatgttagtctagtcccccggcaagaaggaggtctgctttgggaaagggctgttaccgtctttgttttaaactataaattaagtttccccccaagttagttcagcctacgcccaggaatgaacaagggcagcttggaggttagacgcaagatggagtcggttaggttggatctctttcactgtctcagtcatcattttgcaaaggcggtttcatttcctccgtgttcatcctgtactcattaggaggaaatcatcgtgtgcagcccacactgaaagagcagggagttatgacccacctcctcaagggcatcgtatctgcgtaaattctttggaattttcagcacaggaaatttgtctctcctctcccatttatttatgtattctgtcatttatttcaacatggactcatggatattttrtactttggatgattattcaatactactttatttattttgtagttctaattgttccagcttggccattgagagctttcagtggattcctgtgtcccactgactctactattgtgggtttctttgagcacttccttactttccagcactatcagaagctccactgtgttcattccctaccccagccctacaattcagccatttctccaaggagcccctgttcaatgtgttggagaatggcattagaaactaagcttggggccctagaggtagccgttctcttttaaaacactgctgctgccccttccactccgctctctttttaggatttaggttacatgtatgtttggtcttttctcagtattccacatgtctcttatgcttttttctgatttttctatttcctctctgtgcttcagtttatatattttttcttttttcagacggagtctcgctctgtcacccaggctggagtgcagtggtgtgatctcgactcatcgcaaccttcacctcctgggtttaagcgattctcgtgcttcagcctcccaagtagcagagactacaggcgtgagccaccgtgcctggccaatttgtatatttttctattggccttttaggtcaatcatcctcttttctgttgcatctgatctgcagttaaacccataacctgagttcttaatttcagttattgtatctttcagtttgggaatttacatttagtttttatagatttcagttatctagtaaaaggctttatccttcaatcttttttaaccctccccactctatttttacattttagtcatactaattattttattttattttatttttgagacagagtctcactctgtcacccaggctggagtgcagtggcgccatctctgctcactgcagcctccaccttccrggttcaagcaattctcctgcctcagcctcccgagtaattgggattactggtgcccaccaccacacccgcctagtttttgtatttttagtagtgacaggatttcaccatgttgaccaggcttatctggaactcctgatctcaagtgatctgccccgctcagcctcccagagtgttgggattacaggcatgagccactgcgcccagccacagtagttatttttatgttgttatatgcttactctggtatctgggtcatgtgtgagtttgtttccattgtatttttcttgataatcatgtatatggctttgtctcttggcatgcctagtttgaatcttagatattgcttaaaagaattatagacctccagatgatattattttcttccagaaaggacttaactctctcttctgctgtgcaggaagagtattggccgcttagcttcaggtactgagctgaattgaggttgggttacagttttatctttttaaaaaattttcttttcttgtgccaactcatctgagagttgtggttttaaaaaggccctatcttaaattcatcccttttttttttcttttttgagacagagtctcaactctgttgcccaggctggagtgcagtggtgcgatctcagctcactgcaacctctggctcctgggctcaagtgatcctcctgcttcagcctcccaagtagctgggaccgtaggcatgagccaccacgcccaactaatttttgtatgtttttgttgagatggggtttcaccatgttgcccaggctggtcttgaagtccttggctcaagtgattctcctgccttggcctccccaagtgcccaagtgctaggattataggtgtgagccaccacacccagcctcacccttgkttctattttttttttttttttttttttggagacagagtttcattcttgttgcccaggctggagtgcaatggcatgatcttggctcaccacaacctcagcctcccgggttcaagtgattctcctgcctcagcctcctgagtaaccgggattagagacgcacgccaccacgcccggctaatttctgtatttcagtagagatggggtttcaccatgttggccaggctggtctcaaactcctgacctcaggtgatccacccactttggcctcccaaactgctgggattatgggcgtgagccactgtgcctggcccccttgtttcttaattgtagccctccaagtctttcaaccaagaacctcgaatgttcattaggcctctgcaggcctctacctccaacaggtgctgactttcagatcttgtctcctcagcataaaactttgctcttcatgtcagaggctttttccttagtgtactagtttcctgttgctgccgtaacaaattatcacaaactcagtgctgaaaatggcacaaatatattactttacagttctggagatcagaaatccaaaatgggtttcattgaactaaaatgaagatgtcagcagggctgcattccttctggaggctctaagactgaatccatttcctcgtctgttccagttagaggcccctgaactccttagcccataagccgtttcctccaatttcaaagccagcagcacagcatcttcaactctctgactctgacccacctactccctctttcttttgtaaggacccttgtgatttagtcatactagttactttattttattttattctatttttgagaaagagtctcactctgttgcccaggctggagtgcagtggtgccatctcggctcactgcaagctccgcctcctgggttcacgccattctcctgcctcagcctcccgagtagctgggactacaggcgcccgccaccacacccggctaattttttgtatttttagtagagacggggtttcaccacgttagccaggatggtctcgatctcctgacctcgtgatccgcctgcctcagcctcccaaagtgctgggattacaggcgcgagccactgtgcccggcctgaattcagcatgtcttgaaaagaaaacctaccatgtgatacgctcagttctactttctccttttttatgggatcttccctccagaatctgattttacctccttagctttgttaagactgccgactctgctgggcacagtggctcactcctgtaatcctaccactttcgaaggccaaggcgggcagattgcctgagctcaggagttggagaccaacctgggcaatatggtgaaacccygtctctaccaaaaatacaaaaaattagggccaagcacagtggctcatgcctgtaatcccagcactttgggaggcygaggccggtggatcacttgaggtcaagaattcgagaccagcctgcccaacatggtgaaaccccgtctctactaaaaatacaaaaattagccgggcgtggtggtgggtgcctgtagtcccagctacttgggaggctgaggtaggataattgcttcaacccgggaggttgtggttgcagtgagccaagattgtgccactgcactccagcctgggcaacagagtgaaactccatctcaaaaaaaaaaaagaaaaaaaaaaattagccaggcatggtggtgcatgcctgttatcccagctactcgggaggctgagacatgagaagtgcttggcctggggaggcagaggttgcagtgagctgagatcgtgccactgcactccagcctgggtgacagagcaagactctgtctcaaagtaaaattaataaataaaaaaattttaaaaagtaaagactgccaactctcctactagttaaattttccctcagtaatttgttctttacctgagcaaggcccagattctcagcatctagccctgtgccctgaattggcaaatcctccaggaaaaaaatctgctgcggaatatcagcttacctcctagagttcacctctttctggaattttggctcctctaggcctgtttgctttggcagctccctgattcattttatccagcttttcttactgttcttggtgggagcattattagcctgctacaaactgtaccattacactttttccaagtcacacctgtaatcccagcactttgggaggctgaggtgggccgattgcttgagctcaggagtttgagaccagcctggcccacatggtgaaaccctgtctctacaaaaaatataaaaattagccaggcgtggtaatgcacgtgtgtagtcccagctactcggaaggctgaggcaggagaatcattgaacccgggaggtggaggttgtagtgagctgagattgtgccactgcactctagcctggttgacagagtgagactccctctcaaaaaataaaaataaaatataaataaataaaacaattggggtctcactattttatatttttgtctcaaaaaacaaacaactctctcttgtggtgtgtgcttgattctgcttcttgtcatgtcttctcacaagtcttttaagagtaagcgattcctggccaagaaacaaaagccaaatcgtcccattctccagtggatctggttgaaaactggtaataaaatcaggcacaactggaaaggagacattgcagaacagccaagctgggtctataaggaactgcacgtgagctggcacacatattcacgctgtatcaaggtcacggccatcttactatagcaagctgaaaacgtcaccactgtctgaacagttggacgtgttttattgggaatatattttttctctttgcttatatgccctgcgatagtaggctgggttcagtaataaatatgtgagaccttttgtttcaggaaaaaaaagaaccaatataatataaggtatatgtgtatgtttctctgtgggtatgggttgtgaactgcctgggtgcaaagccaagctttgttacctagttgtatgaccttgtacacttaatttctctaatcctcatttgtcacattcactaaatgggtaaaattatagtacctcataggattcagtgagttaatacacgtaaaacacttagactagtgaatggcacaaagtaagtgctcaataagtgtttgcatgataaatcatacacatacgtttaatagaaatgtaaaacatttgtaatttttttttcacttattattattatttattattagtttttgagacagagtctcactctgtcgccaaggctggagtgcagtggcacaatcttggctcactgcagcctccacctcctgggttcaagtgattctcctgcctcagcctcccgagtagctgggattacaggcgtgtgccacgatgcccagccaatttttgtatttttagtagagatggggtttcaccatgttgggcaggctggtctcgaactcctgacctcaggtgattcgcccacctcagcctcccaaagtgctgggattacaggtgtgagccaccatgcccagcctatttttttcactcaacattatattgtgaatagcttttcatgttcttggaattttttttttaagagccagggtcctgctgtgtctcccaggctggagtgcagtggtgctatctcaggtcactgcaagctccgcctcccaggttcacaccagcctcctgagtagctgggactactggtgcctgccgccacgcctggctaattttttgtatttttagtagagatggggtttcaccgtgttagccaggatggtctcgatcccccgacctcgtgatctgcccgccttggcctcccaaagtgcagaattgttttttttttaagagccagggtcctgctgtgtctcccaggctgaagtgcagtggctgttcacaggtgtgatcttcacatactacatccctgaactcctgggctcaaatgatactccctgtctcagcctcctgagttgctgggactacagggacacgtcactgtgtcttgcaaaacttttctttaaggtctacatagaatttcattgccagaaaacatcattatttcttttttctttttttaaaaaattctcccagatcctgagaaataccataatttcatttaccaatccagtcctattgggcatttaagttgtttccatttttaattggcttttattttgactaatatttttttcttatccaagaattgcagagaggagaatagccaatttcaaggtagtttagcattctgtagagatatttttggagttataattcgttagaagactgaattctagttcagagtttgctcctttttctgggactctataaaatgatcaggttggactaaatctgttgggctctttctgtgccttcctcgtcctgttattgtgcaggagctgagctcattaaaagtcacacacaaatctctagtattgatccctgtagccatcaggtagggtctgaggctgtcagagtacctggctggtcacctctagttgcaagcagcttcatctgactctagtttctccggtttacccagtatactctctggtacaaatacaatactctgtgggtacctacctgtgaaaggtttggaagtacagatctatgagaatgtattaaggaacactgtttctcgtggcagatatgtgtcgtttaggtccttgttagattgttgataattcttcattcttggattttttagcatggcttctcgctgtttctgggatgctgacactgacaactatactcatgatgttttcatgaatgtaagtgtatttggaaacctcttttccctttctaagaacgtgggcaccgcaaatcaaactatttactgttgattgggatggaaagacactgctgtcttagtcattcatctttgacttgtgaatgaartgattttactgttagtttttgtgttactaaagcagaaacctagagtgctgcttataggcaaggaaacttacatgtttacatatgacataatttttcatgggtttgaatttctgaatagcatattatttagttagcatattatttaaacattatttttagccacttcctccataaatcagtgttctaaaactcaatcctgataatccttattaaagtaataatttataactaaaattttaaaatcacttatttgttcatttgaaccaatcacactttgctaagttgcaaacaaatgtggatggcagggattccatgagcaaaggtcatttttttttagtagtaaaatttattactttatcttaaagccatttattaaaattaagcaaaaataaagaggaatctttaaaaagatgtttcaggccaggcgcggtggctcatgcctataatcccagcactttgggaggccaaggagggcggatcacctgaggtcaggagttcaagaccagcctggccaacatggtgaaagcctgtctctactaaaaatataaaaattagccgagcatggtggcgggcacctgtaatcccagctactcaggaggctgaggcaggagaatcgcttgaaccccggaggcagaggttgcagtgagctgagattgtgccactgtattccagcctgggtgacacacacacacacataaaagaggtttcattgaagttattattttatatttactccagaaaggattgcatcctctattcgtctactcccaggttgtgaatacatagagtcagagttagagtagaacagaaactagattgagtaaattaagagagtgaggccaggtggggtggctcacgcttgtaatctcagcactttgggaggccgaggcatgtggatcacttgaggtcaagagtttgagagcagcctggccaacattgtgaaacctcttctctgctaaaaacacacacacaaaaaattagccgggtgtggtggtgcacgcctgtaatcccagctacttgggaggctgaggcaggagaattgcttgaacctggtggcggaggttccagtgagctgagatcgcaccactgcattccagcctgggcagcagagcaagactctgtctcaaaaattaaaaaaagaaaaaagaaaaaagtaaaaagaaataagagggggattccatctccagttctgtcactttctaattgaatgacttcaggtaagtcattggatttttctcacattgtatcagtgacattaggaagctgaagtacattttcccaaagactggctgtgactgcctaaggatcatctgggaagttgtttaaaatatagacgctgggtccctattcaaatagattctgatcaaataggccaggggttagatcagtgaatcagaatatttaaaaagttccccatgattctgctgactgccagatatggacactgcttatgtagatgattttaaggtagcttttagctctaaaattctatggtctcaccaaggttttatttttatttttattattttttgagacagaattttgctcttgttgcccaggatggagtgcaatggcacaatctcagctcaccacaacctccacctcccgggttgaagtgtcctgcctcagccttccgagtagctgggattacaggcatgcaccaccacacctggctaattttgtaattttagtagagacagggtttctccatgtcggttaggttggtcgctcccgacctcaggtgatctgctgcttccgcccggcctcccaaagtgctgggattacaggcatgagccactgggcctggccaaaaaatgcatctttagatgatacaattcattcattcaacaaatagttctgagctcctattatgtgtcagcttctgcacctgaggggctagggacaaaatgatgaataagacaggcatggtttctgcctattaacatccagtgggggccactcaatactcaaatgaacaaatatgtaataaaaaactttaggctgggtgtggtggctcacgcctgtaatcccagcactctgggaggccgaggcgggtggatcacctgaggtcaggagttcaagaccagcctggccaacatggtgaaaccccatctctactaaaaatacaaaaactagccgggcaaggtggcgggcgcctgtagtcccagctacttgggaggctgaggcaggagaattgcttgaacccagagggcggaggttgcagtgagccaagattgtgccactgcactccagcctgggcgagagggcaagactctgtctcaaaaaaaaagcactttatttgggagattccaggaaacattagtagaggcagaggaaatgagaaaggagggaaaatcatgtggtattgagcggaaaactgctggatgacagggctcagtcctgttggagaactctgggtggtgctgtagaacagggccactcacagtggggtgcacagaccagcacggctctgtgacctgtttgttacaggtccatgatgaggtaaacaatacactgagtataagggttggtttagaaactcttacagcaatttgacaaagtaatcttctgtgcagtgaatctaagaaaaaaattggggctgtatttgtatgttcctttttttcatttcatgttctgagttacctatttttattgcattttacaaaagcatccttccatgaaggaccggaagttaaaaacaaagcaggtcctttatcacagcactgtcgtagaacacagttcagagttatccacccaaggagccagggagctgggctaaaccaaagaattttgcttttggttaatcatcaggtacttgagttggaattgttttaatcccatcattaccaggctggaggtgaggttagtggtgcaggagttgctgaggcaggtggaaatcttgtaataaatgcctaaaaatgttttaagcaatttgactgggctctggaaagcattttgtgattctgaactaaaagatggacaagtaaattttatcaattaagaacaaacacccagagactatttctcttatccagaatttatgacaaggtcctgttgttcttattatcagtgatacttataatatggtttcttgggatgagtaatggagtttactccaagaaactcaaagcatttcatacattatttctgtgataaatcaggaaatatgtgaataattattttatgaatatgtattacctaaagttcattagttcacattttatttttgcattcagaaaatctaattctttacccatcctaaccttttagcaagcaattttgtagtcaccctcaggcaagcaatagtgtagctatactctggaaacccttcacttcttgaagaaggaaaaagtcttcctgattgaaaattggtggctgggtgaggtggctcacgcctatgatcccagcacttttggagaccaacatgggtggattgcttgatcccaggagttcaagaacagcctgggcaacatagtgagacctcatctttacaaaaaataaacaaaattagcctggtatggtggcaggcacctgtggtcctagctactctggaggctgaggtagaaggattgcctgagtgtaggaggtcgaggctgcagtgagctgagatcacaccactgcactccagcctgggtgatagagtgacaccctgtctcaaaaaagaaaaaaaaaattggaaagatctgagatggtgttagtttcagttgcctgtgctgctctcattccctctttagtactaacattctggatgtgtgtgtgtgttgtatttattttttaggacagtttattctgcgttgtagcagcatttggctgtttctactactgaatgaatctttgaaaagctggtaaaagacatgaccatgaagaaatctgaactttttaatattgttaaatatcttgacaaaataaagatgttagtagtttgacaactgaatctgttgtgttttaggccttatatttttaatgttttgattttgttacactatgttctgtttctttctttccttccttctttctttccttccttcctctctctctctctgtctctctctctctctccctctctctctctttctctctttctttctttttttttttgagacagagtctctctctgtcgcccaggctggagtgcagtggcacaatctcggcccactgcaacctccgcctcttgggttcaagtgattcttctgcctcagcctcccaagtagctgggactacaggcaagtgccaccacgcttggctaatttttgtatttttactagagacggggtttcaccatattggccagactggtctcaaactcctgacctcatgatccatccatttcagcctcccaaagtgttgggattacaggtgtgaactactgcgcccggccctactatattcttgttacactggaacacagagaaaaaagtaggggaaaagccatttcaattgttcaaacataaccaatggtaaaaattttggtatattttctaccaatgttttttatttccaaggtttaaaaaacatataattttgtaccctcatttttcatttctcatgatgttatgaacagtttttatgtcattttatttgcattatgattttaagatgcatgacttaatagcggcatttatttcaataggttataccatattgttatttttgccagttccttattgagggtctgcttatttctgatttttcactattataaaaaataaagacatggctttatttgtgcataaagctttttcctacatctttaaaataacttttgaatttatttatttttattttcagagaatgggccttgttctgttgcccaggctggggcacagtagcgggactgtaacttgctgcagccttgaactcttaggctcaagtgatcctgccacctcagcctcctgagtagctgggactacaggcatgccaacacacatggctatttttaaaaaatgtttatttttatttttttatttattgagacagagtgttgctctgttgcccaggctggagtgcagtggtacgatctcggctcactaacctctgccttctgggttcaagagattctcctgcctcccgagtagctgggattacaagcaggcaccaccatgcccacctaatttttgtatttttttttgtacagatggggttttgccacattggccaggctggtctcaaacttgtggcttcaagtgatctgcctgccttggcctcccaaagtgctggaattacaggtgtgagccaccacacctggccagtaattttattttatttatttagtttttgagacagagtcttgctttgtcacccaggctggagtgcagtggcgccatcttggctcactgaaacctcagcctcccaggttcaagagattctcctgcctcagcctcccaagtagctgggattacaggcatgcgcccccacgcctggctaattttgtatttttagtagaggcagggtttcaccatgttggccaggctggtctcgaactcctgaccttgtgatccgcccatgttgccctcccaacagtaattttattttttatagagatgaggccttgctatgttgcccaggctagtgttgaactcctggcctcaagtgatcctcctgctttagcctcccaatatgctgggagtacaggcatgaaacaccatgcctggctgctttttcctacattttgaattgttgccttyatctttctcacacagtgtttttgctcagctcttgccatcctatgtcttacatagcttattagcctaaacacccatccattttctttgtccacagtgtcagggtcttatgaaattcatcctcccttaagactgagattctgatgttggttactatctcaactctatttttgtagtgatgttccccttagaggccscggtgtcttctccagctaactgtccttatttggggtaccttagtctaaccgccatgttcaaagacatatttgaaattcaggtttaaatcctttttccccctggaaactcctcagcagatgcagttatacccatcctctttcttctcagccactttcaagttaagcatgtagaccaagcttgtccaagccgcggcccagaacagctttgcatgcggcccaacacacatttgtaaacttctaaaacacatgaggttttttttttttttgcgatttttttttttaagtcatcagctattgttactgttagtgtactttatgtgtggcccaagacaattcctcttctaccaatgtgccccagggaagccaaaagattggatacccttgatgtagacaaaaaaagcaaaataaaataaaaaaagcaaagcaacaacaatagcaacaaaaagttgactgggcgcggtggcctgtgatcccaacacttcgggaggctgaggcgggcagatcacttgaggtcacgagttcgagaccagcctgaccatcatggtgaaaccccgactctactaaaaatacaaaaattagccgggcgtggtggcgcatgcctgtaatcccagctactcgggatgaggcacgagaatcccttgaaccckggaggcggaggctgcagtgagcygagatcgcgccactgcactccagcccgggcracagagcgaggctccgtctttwaaaaaaataaaagaataagtaaataagtttaaaaggtcttttacttcagtccagttggtaactaaaaaataataatacwttttttttacatccttcttccataatattgtgtagcctcttacatctacggaatcaaaagggatccttcccaaggttcattctagcaaaggaaaacgtttctttccaccatacaccctgcgacacgtgtcttaatccactcctgctcaactggctcccagtggatccctagggatttttttttttggagccaacgtgggtcagaaaaaggaagagggtgggtcagccacaggttttcagcggactgggctggcggtcgcaaattccccttacttccccacgtaggtaaaagctaacgctgcggcgaggcagccgcggtcggggcgtctccgctgaaggcgcccgggcctcctgcacgttggctgcccgggtgcgggggtgcgggctgcggtaggcgcggaggtgcagcggtaggacctccgcgcacaggcccgcctgggcggacacagcccgagttggacacgggagcagccgggcagcgcgtcttgacggaccggcgagcacttgggccggttcacatccgtatcccacttcaaggagacgtcttcgctgcatcctccggttccgggtggaggctgaccctgggccattccgtctccggtctctggtatttctgctgggtcacttcatcccgggggcctctgaggaggcggaactactgtgtcaggagtcgtggttttcaaggagaagtcgtggtcggattgacagaggtaggggaagtaggcggaacttccggctggctcttccatcagctgccttccccgggcgtctccccgcaacctcctcaacttccctagtcagtgacgcggcgccggccagaaatccgaccggaccgggctcgggggagcgtgagttgcaggtgtgtgcctatctttgcgtctctgtttgagaggacaaactgtggggctgggaccgcgaggtgactgtgactgaggaagagtggtaagtgacagcgagggcagtgggagccaggggctgggaggctactgtgaccgagggccagtgacagcgaggggactgtgacccaggagcagtgaatgcgaaacacggtgacctcggagagcgcgaggccggggctgcgacggcacttggaccgaggaagtatgaggcagtgactgcaagggactatgatcaaggggcaaggactccaaggagactctgatcgattggtagtgactgtgggggatccggacctaagggaacacgagcagcggccgcgaggggactccgacccagagcagtgacttcgaggggctgacttggagaagaggatggcatccgtgatgggcgatggcgctgtagggttgtgtttgggcacggggtgtgattggccgtgactgggcagagaaggtctttagtggaaagaacactggtctggaacttaacaggcctgagtttaatttttacggacaaacttcaccactgagttacagtttcttcatcagtgaatgggaagtttggactagtttaatgcctcccacactatgggtttcttcctagtattgagctgtgaaaccaatttagtggatggaacctgtactttttttctttttctttttttgagacagtttcgctcttgttgcccaggctggagcgcagtggcgcgatctcagctcaccgcaacctccgcctccctggttcaagcgattctcttgtctcagcctccctagtagctgggattacaggcatgcgccaccacgcccggctaatttttgtatttttagtagagatggggattctccatgttggccaggctggtcttgaactgctgacctcaggtgatccacccgcctaggcctcccaaaatgctgggattacagtgtgagccaccgcgcctggcctgaacctgtacttttcttttaaaaagtggaatagaatagaaactttcagtgtgtttacatagtaagggtaagtattgtttcatgtgatttgtttgagttatgtgtgtatgagattatgatgtaaaatagattttgtacatctcaaagtgtaagaagcaaaatgtactttaaaagtttgaaaaacattggaccggatgatttctgagttttcttttggttctaaaatgtaatgattctatgaatagggaactctttggaagtacaaagatgcaattgggaacaggctgtattagcctggcctaactggaggaggcttcctgaatgtaattgaggtgactagctgtgagagctgaaactcggcatctcagttgggagaaccagaaattatattgaaatagggacactgggcgggtgtggtggcgcatgcctggaatcccagctactggggaggctgaggtgggaggattgcttgaacccaggaggcggtggttgcagtgagttgagattgtgagactgcactccagcccgggtgacagagggagactctgtctcaaaaaaaaaaaaaaaaaaagggacagtggtatttgtgatatttatagaggcagtgaggatttaggggtttgtggtatgagaaactgctcatgaggaacgggaagctttgagcgtaggaacaagggttgggaaggaaactcaagataggggcagaaaataatctgccaacaataaaatggaagtaggaaggcagatatgacctccagagcctatttatcttgatatttagtgatttggcaagtacagagaattgctagtaaaaagacattgagaatgggatttagtgcagtaatagcagtaaactatgaccatgatgagaaagaaagggggacaaaatgatgacactcgcagtgtcaataatggtgattgggatgccacatgggagagacttcaatgtacttagctctctaattcaatgatttgtacactgaggccaagcctggcatgctaggaatgataccacactatgggtaatgtaaatgaagctttagctgctgactttatttcctacacattccctttctttagggctgtgagtgatgtagatgaaattaaagtgaatgttactacttccttctctcttacagccctttttattttatttatttatttatttatttttgagacagagtctcactctgttgcccaggctggagtgtgctggcacgatcccagctcgctgcaacctccgcctcctggttcaaagcgattctcctacctcagcctcctgaatagctgggactacaggcatgtgccaccatgcctggctaatttttgtatttttagtagagacrgggtttcaccacgttggccaggctggtctcaaacttccgagcttaggtgatctactaacctcagcctcccaaagtgctgggattacaggtgtgaccaccacgcctggccttacagctctttttagaaggtgctattgattgtgccaccagtgctttttataataggagaagtatgaggtcatttaatttatcgtacagtgtattaatctgataaccactcctgccccctacactctgtaataggggaatagagttcagataggttcttgaatgggaatgagttgagaatggtgggggatagccttttcttggctaaataaattggttagttacacctttttctagcacattagatgtttacttgacttacattctacatagctaaaaggaactacccaggggtttcttctagaacagcatctatgcttcaaggtaacagactgtggaagaggcttgggattcagcagtactccctctagggtcttttttctttgctgaatgaaatgaatctttttgtaggacaaaagatttgctttgcaaattccctttgaaaactagcatgatggcctggttgataaagaatgagcttcattccccctcagtctatgactctcctcccataagcagtggggttttattttccctggggacctgctttttggatatgtgatcccttaagaagaatgacctcgtcagatagagcctggacttagcagtccctggtgactttctccgatgttaacatttactcgccctgtgactatgtatggaaagcattattgctttctcttgttgtagattttctaaccatggccagaggtaactcttcttatgattaaacagccctttaataatctgaaatatatgtgaacttaccaaattttgtatgtaatttcatagagtttgtaaaccatctgactccatttataattcagagctgtctggcctttaagttagacagtatttccctagggagctgaataacctctcctagagatgttataagtgctgatgagaattagtttttgaaatgctcaaataaaaagcataattttccattgttattaatgatggataatagcaaaatatctgctaataatagtagagttcttacttaagcatcatgcttttctaagtatttacataactgatctgaagcagaccttctgatttttctactaatagaaatttccctttctgaatcaagcagaaataggtctcccttacatcaaagtttgtgttaccttgaaatagattggaaagaatacatttttgtaaaagtcatttttttcttggatttgtttccagttggagaaaccctaaagtcagggcacttgccaattatcacaggactgtgagagtcccttttttgctcaagattgtggctggctgcttgtacatctttgacattatcacacatcaagcatattagaaaaaggggtgacttgggagagtgaggggatcagcactttaggccttgtcaaccctcctgcttatctgcttggcagcttctggcatctccttttccctaagtccttgaacctctttcctaagcgtaaacctttctgtttttagtcctaaacctctcttttcacagtattcctgtcaaatgagtacttaaacacatgtttcatctgtgatttgttttgttaattgctttgtggattatttgtggcagaatttaaatcctaattcctttctacaatttagccagtaaattcaargaatgtacctttttacgtttgcagcatgtgccgaagcgccacctcagaagataaaaagaaatgagtctcatatttggcattcttttaggtttgttacctaccttattcattaatgtaaataattgaattacctgtattttaccattcgtaaaccaggttaatagatatatattaatagcaggctttctgtgtgtgtcttttccctcctttctttctatttatttatttatttattttttgagaccaagtcttgccttgttgcccaggctagaatgcagtggtgcaatcttagctcactgcaaactctgcctcctgggttcaagcgatctcctgcctcagctgggattacaggtgcccgccaccacgcccagctaatttttgtattttagtagagacggggtttcatcatgtgggccaggctggtcttaaactccagacctcaagtgatccatccgcctcggcctcccaaagtgttgggattacaggcgtgagccactgtgccttgccccttgctttcttttgggaattctcttgtaccacaagttgaaagttatattagtttgaggctttctatgtttggactaggatgactgccagtgagccaggggaacccatgaatctgctaggctgttatatcacattcacaactacttgcaaaccagttttgaagtgaaggctgccaaaaataatgacatatggtccctgctctatagaaaatgagcatatgacccttaataaaaaacaggtagtttttttatatacagaaaattaccctaaatgtgattatgtttctttattttttgaccgtagaacaggaatcttaatcttttttgtgttatggactcctttggcagtgtggtgaaagcttttagagttcctttttggaatatgtttttatatgcaaaaataaaatacatagaactataaagaaaaccagttatattgaattatattgatatatagttatcaaaatttaagaagtatgatatggtatgaaaatatccatgatttctactggtaacaaatccatttgtctaataagtctgctattactgctgtagcttatgttcatcactgaagtgaaaataaagatacagtctttttcatccaaattcacagacttcctgaattctatcatagaccctgcctcagagatatgagttccataacccactctaggaagatcacattctaaacacaagagtttactcaccaaatattctggtagaatagtggcagagtaaaattgttcaactgtaagaactattacatgtgtccctcatggttttttctttcctgaaatattctactacatgtccaggccgaagaagtatwagctttattatgtgtgccagtggctaacccagggtctggcacagagtaagtgccgctcagtgtttgttgaataagggtttctctgacgaaattagagggaagagatccagttcaaagctaaggtcttaaatgtgacagtttatagggctcatgacaagtaacgttgaactttagtttagaactaatctgtcagagaagctcatgttttgaaattcacttttacatttataagttctcagcctggtgtgatagttcatacctataatcccagcactttgggaggctgaggtgggaggattgcttgaggccaggagtttgagaccaacctgggcagcaaagtgagacccccatctctacaaaaaattagctgggtgtagtggcatgtgcctgtagtcctagctacttgggagggtgaggcaggaggatcacttaagcccagcagttcgaggctgcagtgagccatgattgcaccactgtactcgaaataattctatttctaacactgtttttcactttagattgggtaaatttaggtagaatttgccaccaaattattaataaagctggtcctgatttcatctaggatgagaggtagcaaactttttcagtaacgggccagattgtaaatagtttagggtttgcaggtcacacagtatctgtgactactcagctctgctgttgtagcacaaaagcagccatggacaataaacacatcagtgagtgaacatggctgtgttctgatcgaattttaattacaaaaacaggtagtgggccatctttggccagctagctgtagtttgctgacccctgatctagattttctggttcttgagtccagctcttttccctactttcgcttagccatatactccttcaagcttcaaaggcctttacatagggggcaatgtccttacactgttatctccagaaagacctgagtgtacagcaagatgataggattaatgaatgccaggaatattagatgcactttaacccttgagtttccagagcttgcctcttagagcaccagctcattaagcaccaccacggtagaagcagagaaacatcccaaatgtaaagtctgcttgcgcactcggctttggaactgggcattgatatgctgatagaaaaatactgggcattgggttttagtggggaagataatgtaggcctagagatggggaaggcaggaatagagtgcaaaggaaaaattatgcctcatctttttgcaaatagttccttgtagtaattggtcaagtttgagttagatttttgaaatgtggaatagcatatgtaattgcaacttgctactacaagagctcacccttagtcgcagttttactttccgtggtttcagttacccacagtcagccacggtcagaaaataggtgagtatgatgtagtaagatattttgagagtgagagagaacagccacattcagataacatttattacagtatattgttataattgttttattattagttattcctgttaatctcttactgtgcttaatttataaataaaactttatcatagctctgtgtatatagggagaaaacaaagtagagtcagcccttcgtggccatgggctccacatccgcmgattcagccaaacttggatcgaaaatattcagaaaaaaaaaaaaaaaaaamcawtaaaaataccaatacaacaataaaaaacagtacaaataaaaaaccaatattgtataataactggttacatagtatttacattgtattaggtgttgtaagtaatgtagagaagattgaaagtatatagggggtatagattatatgcaaattcgacaccgttttatatatataagggacttttgagcatctgtggattttggcatctgcaggagatcctggaaccagtgccctgcagattctgagggacaactgtccatatagggtccatactctctaggggttcaggcatctgctggcgtcttgaaacatttcccctgtggataagagaggactctgctatatttagattgttacatagttcaggaagcaaagtccaactcctctttcccttggtaggtctgtttgcaataaggaagttgaatagaaaggattggataggccgggtgcggtggctcacgcctgtaatcccagcactttgggagactgaggcgggcagatcacctgaggtcaggagttcaagaccagcctcaacatggagaaaccccatctctactaaaaatacaaaattagccaggcgtggtggtgcatgcctgtaatcccagctactcgggaggctgaggcaggagaattgcttgaacccgggaggtggaggttgtggtgagctgagatcgtgccattgtactccagcctgggcaacaggagtgaaactctgtctcaaaaaaaaaaaaaaaaaaaaaaaaagaaaggactggataggagtccctaaaactacttgtaggagcctatcatctttcagactcaagcatagacatgccagcacctagattctgtctccttcaggacattcacattggaaaaatatgactagctgtatccttagtgtctcctcagtgccacccctccctccacaaacacatcttccacttgtctagcaaagctgatgtgcctcagcaggcatgtgttggaacgtggaggaacaaggcaagcagtgtgtactggtaggtgagtcagcagaaaccaaaccaggtctttgtgagtcggagtaaaaatcacaggcacagatactgcattctgtatttcgagggcactttggagacactaatgtacttagcaggcagggtgttgggggatgggtttttatgtccatatttagagtctgtgctcaaatttcagtgattaagataaggtgacttatctagggagtgaataggcagcagttggaaagatcaggtcttaacaattgctgtattctggctgtcagccctttttttttttttttttgatagagtttcactcttgtcacccaggttggagtgcagtggtatgatcatggctcactgcagcctccgtctcttgggttcaaaygattctcctgcctcagtctcctgggtagctgggattacaggcacctgccaccacgcccagcttatttttgtagttttagtagagaccgggcttcaccatgttggccaggctggtctcgaactcctgacctcaggtgatcctcccgccttggcctctcaaagtgttgggattacargtgtgagccaccacacctggcctagctttttttttttttttttttttgagatgaggtcttgctctgtcacccaggcgggagtacagtggaacgatcttggctcactgcaacctctgcatcctgggttcaagcgattctgccaccacagactcccaagtagctgggactacaagcatgtgccaccactcctggctaattatttgtctttttagtagagatggggtttcgccatgttggccaggctggtcttgaactcctgggctcaagcaatccatccgccttggtctcccaaagtgctgggattataggcatgagccactgtactgggctgttatagcctttttgacaaagaaagtgttctggaggatgaaccactaaacaaacaggaagtgttggcccatcctagtagggctcttgagggaggttctctattctatctccaaatacttttcttyctgtctcattcctaagggtcagtctgcagggcattgagtaatgcactgccccatgttcgcctcctactgtattggctctgaggaggcgcgatcatttcccagtcccattgcccgctggacaaacagggatattaaggcagcctgtgtgtgtgcgtgtattttttttcccctttgaatgtagatatttaaagccacctccttttccagagccatcrctgtaccttacttgaatggtattggttgatgacagaggcrcacttatcataaactgagagtccaagaaatattgttcctcattgttggaggtattccaaatggttactgggcagttatcgatgttgtaatggtggtgtggctttaggtacacctaagtttcagtgtaacaaattaagaagccaacacgatgttaggatgtatttactgtcttcagtacgccctcatcctcccacacaccttttctctacactttctcagtagcaaaggtgatgtgtccgggcaagcatctattggaacatgagggagactgggggtacctttttccatgattttaaacatcagttattattctgtatgctttggtgctgcggttataagttagtagatgtgagagaacattgggatggcataagaaggccgggaaaaaatgaaaaaaacttgtgagacctacagagtaaaagtttattattgttattattattttgagacaaagtctcgctctgtcgcccaggctggagcgcagtggcgtgcgatttaggctcactgcaacctccacctccagggatcaagtgatcctcctgccttagcctcccaagtagctgggattacaggtgcatgccaccacgctcagctaatttttgtatttttagtagagatggggtttcaccatgttggccaggctggttgcgaactcctgacctcatgtgatccacccaccttggtctcccaaagtgctgggattacaggcatgagccaccgcgcccagcccagagtaaaagtttaaacagcagtagttctagaggaaagtcatgaggagtaatctttgcataatttctaaattcttttagggttatcattatggaatatctgtgacccagatgttttccatctcctgagaagtggatgagataaagaagtgtcttacactaaaacccaaaaagcagtgggtgtgttttattttaaatccgaaggatctaaagacttcagtttaaagaacagtgtagaatataatgtaaaacccaaaagtcatctttagaaaatagaagaactgtatgtaagcagataaggaatagtataaacacataatagtgtaagcaggtaaagaaaaaaatatatatatttttttgaaatggagtctcactcttgtcacccaggctggagtgcaatggcatgatcttggctcactgcaacctctgcctcctgggtttaagcaattctcctgcctcagcctcccaagtagctgggattacaggtgcccgccaccacacctggctaatttttatatttttagtagaaacggggtttcaccatgttggccaggctggtcttgaactccagacctcaggtgattcgcctgccttggcctctcaaagtgccaggattacaggcatgaaccactgcatgtggccttttttttttttgagaaagggtctcactttgctgtccaggctggagtgtagtggcatgatcatggctcagtgcagccttgacttgctgttctcaagtagtcctcccacctcggcctcccgagtagctgggactacaggcatgtgccactacacctggtcaatttttcgtaactgcaaatatcctattcctcagcaaactttcaccccatggttttagaatcctgtagagcatttttatatcataagcatttttgaggtggagctctgtgtgtgttttccatgccttaattgaagcttccttgagaaaatagtttgtacttaatttttttttttttttcattttttgagacggagtctcactctgttgcccaggctggagtgcagtggtgcgatctcggctgactgcaacctttgcctcccagattcaagtgatcctcccgcctcagtctcctgagtagctgggattacaggaatgcaccaccaagtctggctaatttttgtatttttgtagagatggagtttcaccatgttgcacaggctggtctcaaactcctgacctgaggtgagctgcccacctcagcctcccaaagtgctgggattgcaggcgtgagccattgtgcctggcctttaattttttaaattgataaataatagttgtttatatttatgggatacaatgtgatacttcgatatatgtttacatgtggaatgattaaatcaagctaattaacaaattccttgccttatatacttatttttttgtggtgaaaacatttaaaatctactcttttagcaattttgaaatataaaatgcattattatttattttgttttggttttttttttttttggagacggagtctcactctggcgcccagactggagtgcagtggcacgatctcggctcactgcaagctctgcctcccgggttcacaccattctcctgcctcagcctccccagcagctgggactacaggtgcccgccaccacgcctggctaattttttgtatttttagtagagacagggtttcactgtgttagccaggatgttctcaatctcctgaccttgtgatccgcctgccttggcgtcccaaagtgctgggattacaggtgtgagccaccgtgcctggctgcattattatttattatagtcaccattctgtgcaatagatcactaaagcttatttctccattctttttttttttcttttttgttgagacagagtcttactctgttgccaggctggagtgcagtggtgcgatctcagctcactgcaacctctgtctcctgggttcaagggattcttctgcctcagcctcccgagtagctgggattacagatatgcgccaccacacccagctattttttgtacttttagtagagatggggtttcaccatgttggccaggatggtctcgatctcttgacctcgtgatccacccgcctcagcctcccaaaggctgrgattacaggcgtgagccactgtgcccagcctrtttctcctttcaaaactgaatttttgtactcgacatctccctttttgctctccaccctcttctgtccatctcttgtaaccaccattccattctgtacttctgtgagttccactcttttagattccacaaataagtgaggtcatttgtggtatttgtctttctcgtctggcttatttcacttagcataatgtcctccaggttcagtttgtacttaaaaattatgatacagtactttgtaagcagtaagtactcatakttttgactgcctgatattattgacttgccagatgccaaattgctgattatatttctcatagtggattttgtctctctacacttagaagaattgagcagatacttacagaagagtactgtgcaaattagaaaacaatcattaattggatggattaggcattttgagtagttcactcagaccactgagatgagagtattgacctctgaatattatgaaggaatcattaagaacaatagtgaagacaagctctgatcatcatcactgaaagaactcggagtgaaatgtatagaacccttcttccattttaatttgcatttgtgatgaaaggaagtttctaggtggtgctcatctttcactttcgactctgacattttttcatgttggccatgactcatggggtgtcaccttcagcttctaagaattaggccagtttcttgtagatcttgtcatattgccactcggagttgagccggaggaaagaaagtaaggcacagttgcagttgtttagacgaacatctcagtcaggcttatgagaggcagtagggcagagcagactgtcctcattctgtctggcattggttttccacctgttctgaagatttttctctgaaccgtatcttgtgcagagatgacagtttatcatagagtttcccctacccccaatttctggctgattcctaaaatttcatcagtatcaagaaagtaatttatttgtacaaattgtgttacttaagaaaaacgcaactatccctgcagggggctgaaaagccaacatctaaatgatggcagcggtggcctgtctggatgggctgctgccatgatgccggctgcagtcggggaggcatggtctgtgctgcacgctccatggagccactgggagctgggagtaggtggaagccctgcccgtttccaagttggcagggcgggagcagccgtggctacatacccgggcttccctgtgcttttgggggcccaggaacctcccctgcccctgcaggcttgaagtgcctgctcccactgcctggcctctccttgctcctggtgcctgctctgattttggagcaaagttgaggccaagcctgggcactgtcatgacctggctgggtttgcgtgtgctaggggcagtgctgacatgccagcccccttctgccttggccccctctggattttgggtgtccagcagcacaggaggggacgccaaggcggagctgagagcagctccattcaggcctgcaggcgccccttcgtgaatagcctgggcgctgtggacagcaggttgatgacagcaggaggcagacaggctcctaggcggaaatgggcgggtccctggtgaagccccaccttcaagccagggatggcctgaagcctggggcccaggctgccagttctgtggactggaatgagaacttacgatgctttttccgggctgcctgtggctgcccatggaccaatcagcatgcacttcctgcccgctgaagcccgtagaaaccctggactcagccatacttgatgggatgacctgcctgcggataggagcttcccactccaggtctcctctccactgagggctgcagagacgtcaggatgacctgcctgcagataggagctatccactctgggtctcctctccgctgagggctgcacagatgctgggacgacctgctgcggaaaggagctacccgcttggggtctcctgagggctgttgtgttgctcaataaagcacctcttcaccttgctcgtcctccagttgtccatatacctcattcttcctggacgtgggacaagaactcgggatctgccaaatggtgggactgaaagagctgaaacacaaacagagccgaaacacgtcctcccctcccccactgcttgccacgctgtgggcaacagaaagagagaagagaggagagagaaagagaagagctgtagccctttgggaagcccagacctaggagctccttgagccagggctgtgacaccctctttggagctctgtggttccyggcctctccaagcttctgggcagcaccatgttccccagtgcctgcagtggaagctgcttgtagtacgcctggttcagctgcagcctctcagggagctggcgcctygagctgctcaccccctggcagctggcgtgcctggctgtgcgcagtggccggaccctgtgctggctcgcctgtgcacctcttgccgctccgtgcctggcttgtccttggcatgcatggaatctgtgctggtaacacaagctgagcatagcctaccaggctgagtggacggaacgagcccggcgggcctgagcaaaactcaggcaaaggtgccactggccacagaggtttctggctagcgaagtgacaccccaagtattctgtgacttaaacatgaaatacagaatattcagaactttgctgtaatagctagttgctagaaactctctgctaaatgagacaataataaataagttcctttgggggaaggagaatccctgagggggttttaatagctggaaactgtgaacaagcttgaggtgttaagaccctgaaagaggaaagggaaatgagtactgagaaaagaaggggaagggccaggtgcagtggttcacacctgtaattccagcactttgggaggtcgaggtgggtggatcacctgaggtcaggagttcaagaccagcctggccaacatgacaaaaccctgtctctactaaaaatacaaaaattggctaggcgccatggctcacgcctgtaatttcagcacttttggaggacgaggcaggtggatcacgaggtcaggtgttcgagaccagcctggccaacatagggaaaccctgtctctactaaaaatacaaaaaattagccaggcgtggtggtgggtgcctgtaatcccacctactcaggaggctgaggcaggagaatcgcttgaacctgggaggcggaggttgtagtgagccgagatggtgccactgcactctagccagggtgacggagtgagactctttctcaaaaaaaaaaaaaaggaaagaaggagaaggacatttaaaaaatacattatgctggtcctagctattctggaggctcagatgggaggattgcttaagctcaggagtttgaggctacagtgtgctatgattatggctgtgagagccgagatcgtgccactgcactctagccagggtgacagagtgagactctttctcaaaaaaaaaaaaaaggaaagaaggagaaggacatttaaaaaatacattatgctggtcctagctattctggaggctcagatgggaggattgcttaagctcaggagtttgaggctacagtgtgctatgattatggctgtgagagccgagatcgtgccactgcactctagccagggtgacagagtgagactctttctcaaaaaaaaaaaaaaggaaagaaggagaaggacatttaaaaaatacattatgctggtcctagctattctggaggctcagatgggaggattgcttaagctcaggagtttgaggctacagtgtgctatgattatggctgtgagagccgagatcgtgccactgcactctagccagggtgacasagtgagactctttctcaaaaaaaaaaaaaggaaagaaggagaaggacatttaaaaaatacattatgctggtcctagctattctggaggctcagatgggaggattgcttaagctcaggagtttgaggctacagtgtgctatgattatggctgtgagtagccactgcgctccagcctggacaacctagcaagacccctaaaaaaataaaaacaataaaaaagtaaataaaaaccattatgctactccacaattttcatgcaagtaactctggtgaagtggtcactgaaatctatagaacttttagagttaagaaattcactcagtgatgtggttcatgcctgtcatcccaagtctttgggagtttgagttgggaggatcacttgaggccaggaattcaagaccagcctgggcaacatagcgaggcctgtctcttaaaaaaaaaaawaactaggtgtggtggcatgtgcctgtagtcccaactacttgggaggctggggcaagaggatcgcttgagctaacgaggttgaagctgcagtgaggcaagatcataccactgcaccccagcctgggcaacagagtgagaccccgtcttaaaaaaaattagagttaagaaatccgtgttttgttaatccaggacttggtgagagccatccgtttacaaaaggctcttttctctacctgcaccagtcataccttcacattgccttatacctgtcatatcgatgatgcggaggatagtgggagagtctgtgtaactatctttctcagccaaattattccaatcttttgcatgcaatcaggatttaaaatgagcagttagtatgtaggctgcactgtgagggggaatgacttccgacttcaggcaattcactgtggccattgttgcacagagaggcgtttcagtatttctactagagcctgtgttttgtgaagcttcgctggttttgccagatgccattggctcatcttggtgaagtgcagctgtagaattggtattttgctgagtgtatccacgtcaacgtctctgaaatactggtgacaaactttttcccaccccaatgagaaaatttttgttttcactttctatgaccagttaaaagaagatggatgcacagtgttcagccaaggtcaatgcaaggaagaggagaaaagaggcgcccggacccaacggggcaacagaagaagatggggttccttccaaagtgcagcgctgtgcagtggtaagtggagattaacctggcagggggagggtagaaaccgatatgacattgatgatatcagtgttacatgtcttctgaaataatgaaaagaaggaatagtaagtgtattttcacagtcactggaaatctgctgcctttttactggattatgactcacagctcagttgtagaagctttacattgggtttagaaaaagaagtgttaggaaaatatggaagttgcatgtgtattaggctgaaactattgaaatatggccaggtgcggtgactcatacctgtaatcccacactttgggaggctgaggtgggaggatcacctgaggtcaggagtttgagaccagcctggtgaaaccctgtctttactaaaaatacaaaattagccgggcgtggtggcgcatgcctgtaatctcagctgcttgggaggctgaggcatgagaattgcttgaactcgggaggcggaggatgcggtgagccgagattgcaccattgcattccagcctgggcaacagagacagaccctatctcaaaaataaaaataaaaagtaaataaacaaataaataaaactaatgaaatagaaaaattggggctctaggcagtgatttgatcttcgtatcatctcatggtgtctagtgcgtcttttctgctgttttttctccctctatcattcctccatcctgttactagttgtatcttagatgagaacctttttccgtttatgcctaccttatgctcctttatctctggaaaattatctttgtatttcctaattattgccaaaccttagatgaaagaccccattccacactgcctatcccatctcagcttgctacccttcctaaagctttcctccacactgcctatcctgtctcagcttgctacccttcctaaaactttccataataaaaacatgtcagagaacacttacacacaattgaagctactgttgttaatattattatgaaatctgtgtttcaaaatcccagtgacagaattgtatgtttctttacctatattgactattagccattgatcaaactcagtttccactgcttagttctagagcttcccagcccaaagggaaaaatctattctgaaacagttaatacttattccaaatgaatgctctgtcttgagcaataaaagcaaataataccctacaaatagacaagtgcctgcagggctgatattgatcataagggcaagtatatatatttgtttcctgttgcatttgtaacaaattaccataatacaaatatacaaatgaattatcttacagttctggatatcagaaatctgaaatgggtctcagagggctaaaatcagggtgttggcagagctggagggtccaggggaaagtccatcttcttgccttttccagcttctagagggttcccacattgcttagtgcttggcaccagccagtgctcacatcactctgacgattgcttctgccatgtctcctgctctgattctgaacctcctacttccccttttcacttacaaggactcttgtgattacgttcggtatacccagataaaccagaataatcttcctttatttaatcatatctgcaaagcctctttactatttttatttttatttatttttatttgtatttttgagacagagtctcgctttgtcacccaggctggagtgcagtggtgcrgtcccggttcactgcaacgtctgcctcttgggttcaagtgatttccctgcctcagcctcccaagtggctgggattgcaggtgcccaccaccatgcctggcttactatttttatttttatttttatttttagagtaagggtcttgctatgttgcccaggctggtcttgaactcctgagctcaagtagtcttcctatctcggcctcccagagtgctaggattaccaggcgtgagccactgtgcctggcctgcagagtctcttttgccatgtatggtaaaacagtcacaggctccagggaatgggtgtggccatctgcaggggggcattattctgcatactacagcaaataagctcagaaagtgactcagcaatcaacaaaacagggcattgttagtttctgaatatttcttagataattcagattaaagaaatggtggtgtgtaccaattcagcaacatcacttggagtaggaacaagttataaccaaataggtgatactgtcagctaatcagccaatcactgtagctaggaataaagcaaaggaagccagtcttttcagtggaatgagctctgagaaaacttaaatttcttggtctttagactctgggaatcttttttttttttwaattcttctggggagtcttaatgctttaaattactttgcttcatatattcatgtgaaatcagttcagtgacttgctgctacctattccacattcctccctgaaacacacagactatttggcataggtgaatggtcagagatccacccaacagcctggcccaccttagtgaggaggaatgtctgctagtaaactttctgccatctcactgtacacctgtactttctagctctgaatctcctttgaactctataacaaaagcaagcaagacttttttctttttttaacagctttattgagttataattgacatatcatttacagtatacaattcagtggttttcagtttattcacagagttgtgcaaccatcaccatgaccaattttagaatttttttctttttttttttgagacagggtcttggtctgttacccaggctgcagtgcagtggtgtgatcatagttcactgcagcctcaactttctgggctcaaacagtcctctcacctcagcctcccaagtagctgggaatataggtgcacatcaccatgcttggctaatttttaaatttgtttttgtagggatggggtctcactatgttacccagactggtctcagtctcctggatcaagcgattctcctgcctcagcctgccacagtgtgggattacaggtgtgagccaccatgcctggcctgggatatttttatcaccccagaaagaaggcctgtactcattagcagtcactccccatttccccccagtctctccagcctctggaagccactaatctgctttctgattctgtggatttgcctgttctggacattcatacaaatgacatcatacggtatgtggtctttggggctggcttctttcactgagcttgttttgaagattcattcgtactgcaacatgtacaagtacttaattttttttttttttttttttgagactgagtctcgctctgtcgcccaagctggagtgcagtggcgcaatctcggctcactgcaacctccgcctcctgggttcaagtgattctcctgtctcaccctcccgggtagctgggattacaggcgccagccaccacatccggctgattttttttaatttttatttttggtagagacggggtttcaccatgttagccaggatggtctcgatctcctgacctcaggtaatccgcccgcctcggcctcccaaagtactgggattataggcgtgagccaccgtgcccggcaatttttttttttgagacagagtctcactctgttgcccaggctggaatgcagcggtgtgatctcggcctcccaggttcaagtgattctcctgccttagcctcctgagtaactgggactacaggcatgcgccgccaccacgcctggctaatttttgtatttttagtagagatggggttttaccatgttgctcaggctggtttcaaacttctgacctcaagtgatccggcccacctcaacctnnnnnnnnnnnnnnnnnnnnnnnnnnnnnnnnnnnnnnnnnnnnnnnnnnnnnnnnnnnnnnnnnnnnnnnnnnnnnnnnnnnnnnnnnnnnnnnnnnnnnnnnnnnnnnnnnnnnnnnnnnnnnnnnnnnnnnnnnnnnnnnnnnnnnnnnnnnnnnnnnnnnnnnnnnnnnnnnnnnnnnnnnnnnnnnnnnnnnnnnnnnnnnnnnnnnnnnnnnnnnnnnnnnnnnnnnnnnnnnnnnnnnnnnnnnnnnnnnnnnnnnnnnnnnnnnnnnnnnnnnnnnnnnnnnnnnnnnnnnnnnnnnnnnnnnnnnnnnnnnnnnnnnnnnnnnnnnnnnnnnnnnnnnnnnnnnnnnnnnnnnnnnnnnnnnnnnnnnnnnnnnnnnnnnnnnnnnnnnnnnnnnnnnnnnnnnnnnnnnnnnnnnnnnnnnnnnnnnnnnnnnnnnnnnnnnnnnnnnnnnnnnnnnnnnnnnnnnnnnnnnnnnnnnnnnnnnnnnnnnnnnnnnnnnnnnnnnnatgacaggcgtgagccaccacacccggtggagctcattagctttagaaaaaagtactttccttgcatgtaaagaaaggaataggaaggatcaccaagtagtagatacctgggttggtgggtcaggatgaaatggatagaaaagagacaaaggagttaagaaggaaaaactaggaaaaactttatggctattttgtcgataagtataaatcatttattgatacagatgtttctaaaggttcaatcaaaaggatcacaaaagtatttacaaaacataagacgtttagcttatcttaatatatatcaggctgggcgcaagtggctcacgcctgtaatcttagcactttgggaggccgagaagggcagatcacgaggtcaggagtttgagaccagcctggccaacatggcgaaaccccgtttctactaaaaatacaaaaaaaaattagctgggcatggtgatgtgcgcctgtaatcccagctactcaggagactgaggcaggagaatggcttgaacccaggaggcagaggttgcagtgagctgagatcacaccactgcactccagcctgggcaacaaagcgagactctgtctcaaaaaaaataaataaataaataaaataaaaataataataaataaaataaaataacttacaaagaatatcatatgtatgaatgagtcatgaagtatctaaactgtgggggaaattggccatagttctgcttatggcaaagtaggcctcacaatctcatttcaaccaaaatgtttcgagaacctctacttgccagttgcattggagatgcaaggatgaaaagatgaccttgcccttggaaaactcacagacaaaaaagagaaagaaacagcagcaaataattatgatacagtatgaaattatgatacgtatgaaaagtgccaaatagacggaagttacaaagtcaatctcttgagaaaaaaggagtaggaaggataccaggtattagatgcctgggttggtgggtcaggatggccatagttctgcttatggctaagtataggcctcccaatctcatttcaaccaaaataatcttgagaagcaagagactgactttgaccaagaggtaggggcagtggtttgggaaaagcgtcatcaaaagggttatttctgagctgaactttgaaggatacaaggaattcaagaaatgaacaagagatggggtacaagttcagaatcatgaagtagggcttaaactatgacattaggtacagagagtgcgagataaactttgcacatttctagaaggtaaaatcggctgggcatggtggcttcacgcctgtaatcgcagcccttcaggaggccaaggtgggaggatcccttgagcccaggagtttgagagcagcctgggcaatatagggagaccctgtctctattttaaattaaaattgtaatttttaaaaaagatgtaaaatggacagttcttggagattactgagatatgaaggacaaaaggtgttaagagtgactcctaggtttcagtcttaggtacgttgtgtagatggggtacttcccattgagataagaaataccaggaggaaaagcaggtttaggaggaagacaaagagtttaacttagtacaggttcaatttagagggcctataagacatccaaatagtaattggacagatgagctcattgtttacattcactgaaatggcaataggagtcagggagaatgattgcttttctttyatttttaaaaccagatcctggctgggcgcagtggctcatgcccgtaatcccaacactttgggaggccgaggagggtggatcacgaggtcaagtgatcgagaccatcctggccaacatggtgaaaccccgtctctactaaaagtcacaaaaattagccgggcgtggtggtgggtgcctgtagtcccagctactccggaggctgaggcaggagaattgcttgaaccctggaggtggagcttgcagtgagccgagatcgcgccactgtactccagcctggcgacagagcaagactctgtctcaaaacaaaacaaaacaaaaaaacagatccccggggggtggaatctttcagctctgttctttgtcccttctttctcataccacatggtattcctcttgactctgtagcgtttcccgtggcattattgaaagaattgggccaagcacagtggctcatgcctaaaatccaagcgccttgggaggtggaaggatcccttgaggccaggaatttgagaccagcctgggcaatgcattatagagagacactgtccctacaaaaaaaatggaaaaattaactggatatggtgatgtgcccctgtggtcctagctgctcaggaagatgaggcaggaggatctcttgagcttaggaagtcaaggttatagtgaggtatggatcgcactgctgcattccaacctgggcaacagtgagaccctgtctcttaaaaaataaaaaaaatagaaacaattgggatctcgggaggaccctttatcattaatacagaatgtttgggtgaaagggaaataaatgtttttctgtggcattcagaaactttttgctgaaaaatatttaagaatccttagagttggatgcggtggctcacgcctgtaatcccagcactttgggaggccgaggcgggtggatcatgaggtcgggagttcaaaaccagcctggccaacatcgcgaaaccctgtctctactaaaactaaaaaaattaagcaggcgcagtggtgggtgcctgtaatcccagctactcgggaggctgaggcaggagaatcgcttgatcctgggcggcagaggttgcagtgagctgagatcgcgccactgcactctagcctgggcgacagggtgagactgtctcacaaaaaaaagccaaaaaaaaaaaaaaagaatccttagaaagtaaaaagtgtactgggaagacaatatcaagttctagtctatattatttgaattatgtccattttcctgttagtgtggatgccagaatctcttgttttcactgaaattttaaggaatagtgaaataatgtgtgtgaatatagtctggaaaaagttgttatggaagcaatattgcattcagagacaattcataatttggggactgttgatttccattataacttttagmtgcatgcatttggaaagtttatatagcattttagaagctaacctcttagattaataggagttaattttgttagcatgctgaaatctgtgttctatagaatacaagaggaaatgagctaacgacaaattcgtcgagtgcctacttttgtgaaacattatgctaattactttgcggatgctactttgtttaatcctcatagtaaacttgtagggcaggtattgttgttttctattttgtagaagatgaaatgaaagctttagaaacttgctgtgatttcacaggtattaaatgatagagttgggatttagatctaaattttccaagtcctaaccccatgttctttcatttatacctcactaccagatagtcttaagacttgaaagcgatactgtggcattcccttgaggttaaaatgaaggagatgtgttttaggagaacacagaaatatttagtcctacttttataaacctcagcttctagagacactgttctttgagaataacacagtgttttaaaaaaatactaccttttctagctggaaacaactctagaaaaaaagattttgctgctttgttatagctgcacaacgttaggtttcactccctatacttaggagaaacggattcagcctaaaccccagccaggaaggacagctgtatttgtcttctacctgsaaatatacacagtatgtgagaaagactgaagaaacagttgtgaaagataagatacttaaaatatctctttttttttttttttgagatggagttttgctccactgcccaggctggagtgcagtggcgtgatctcggctcactgcaacctccgcatcccgagttcaagcaattctcctgcctcagcctcccgagtagctgggattgcaggcatgcaccaccccacctggctaagttttgtatttttagtagagatgggattttaccatgctggccaggctggtctcgaactcccgacctaaggtggtctacccgcctcggcctcccaaagtgctggtattacaggcgcccaccactgcgcctggctaatttttgtatttttagtagtgacggggtttcaccgtgttagtcaggatggtctcgaactcctgacctcatgatctgcctgcctcggcctcccagtgctgggattacaggtgtgagccaccacacctggccaatgtatcttttaaaatttgggtaaaattcacataacataaaattcactattttaaccattttaaagtatataagtcagtagtttatagtctagtcatactgttgtacaaccatcacaaccatctaattccagaacatttcatcaccacaaaaagaaaccccctgtattcattagcagtcactccctattacccctccagctacctcctggcaaccactaatctgctttctgtctctacagctttgcctagtctgaacatctaatgtaaatgaaatcatacaacttgtggacttttgtgtccgacttccttttttggcataatgttttcaagatccatccaagtggtagcatgtatcagtactttattcctttttatgggtaaataatattccattgtgtggacataccatttgtttatccattcattgatggacatttgggttgtttctactttttggctattacgagtaatgcaagtgtgaacatttttcatgtataagttttttgtttttgtttttgttttrttttgtttttttgaggcagagtctttctctatctcccagacgagtacggtagcacaatctcagctcactgcaacctccacctcctgggttcaagtgattcttctgcctcagcctcccaagtagctgggattgcaggcatgcaccacgccacctggctaagttttgtatttttagtagagatgggattttaccatgctggccaggctggtctcgaactcccgacctaggtggtctacccgcctcggcctcccaaagtgctgggattacaggcgtgagttaccgtgcctgacatagttgtttttttcttaatatatgttttcagttatcttgggtatatacctagcagtataatttctgggtcatatggtaattctatgtttaacattttgaagaactgttttccaaagctgcacattattttatattcacagtagcaatgtatgatggttctaacttcttcacatccttaccaagactgtttgctattgcctgtctttttgctcattttctactttgcagacacgaaggaggatcgccttggggagaggacaaacaactagggccttgggtctatttttaaaagtatttttaagaagaataacacatacacatctaaaaatgaaggtcttgggctgagcatgggggctcacacctgtaatcccagcactttggaaggccaaggcgggtggatcacttgaggccaggagttcgagaccagcctggccaacatggaagaacccggtctactaaaaatgcaaaaattagtcgggcatggtggcatgtgcctgtaatcccaactactcaggaggctgaggcaggagaatcgcttgaacctaggaggtggaggttgcagtgagccgagatagcaccactgcactccagcctggacgacagagtgagactctgtctcaaaaaataaaaaaagaaaaagaaaccaacagctctgaagcactcagactgtccacctcactgtctccagacctggggctcctgctccgattctgtgtctgaaactgcctgacactccacgggaccaaagccagggtgagctgcttcttgctccgtctcccacccaacccccctctccccattccccgccagggatcagggcatctggcttctctctctttttgtcttttcgtccctcccaaagtgctatggattcctttgttggttggttcactcactgtttcaggaatattttggggccttaaaaatgttccaggggccgggcgtggtggctcatgcctgtaatcccagcactttgggaggccaagatgggtggagcatttgaggtcacaagttcannnnnnnnnnnnnnnnnnnnggtacagtagttcatcatgggtaaataatattccattgtgtggacataccatttgtttatccattcattaatggacatttgggttgtttctactttttggctattacgagtaatgcaagtgtgaacatttttcatgtataagttttttgtttttgtttttgttttgttttgtttttttgaggcagagtctttctctatctcccagacgagtacggtagcacaatctcagctcactgcaacctccacctcctgggttcaagtgattcttctgcctcagcctcccaagtagctgggattgcaggcatgcaccacgccacctggctaagttttgtatttttagtagagatgggattttaccatgctggccaggctggtctcgaactcccgacctaggtggtctacccgcctcggcctcccaaagtgctgggattacaggcatgagctactgcacctggccaaaacaaaacaaaacaaacaaacaaacaaaaaaaacgtgttttaatgttaaaacaattttgaaaatctacacttacctgaaaacaaaacagtatcttcccagtctctggattcagcccaatcatgatacgatctttttagaacggaacatcactgcagccatacagaaattagaaggattataagggagcaatttcatgccaaaaatttgacaatttaaatgtaatagacaatttcctagaaagagacaagttgcaaaaactaaccaagacaaaggagaaaatcttaatagacttatatcaagttaaaaaagaaaaaaaaggaattagtcattaaaaatcttctcacaaagacaggtccaggcccaaagttaaaaaattagctgggtgtggtggtgcatgcctgtagtcccagctattagggaagctgaggtgagagaattgcttgagccccagagttggaggctgcagagagctatgatcgtgccgctgcactctagcctcggtgacagagtgtctttacaaaaaccacaaaaacatttaaggaataaataatacgaatcttacacaaaaataaggtaaagagaacacttcacaacttattttgtgaggccagatatcaaagccagacataaacatcacaagaaacaaactatagttaaaaatcccaggccagaggctgggcacggtggctcacgcctgtaatcccagcactttgggaggccaaggtggaatgattgcttgaggccaggagtttgagaccagcctaggcacgtagtgagaccttgtctctacaagaataaaaaatcagctgggtgtcgggtagtgtatgcctgtagtcccagctactcgggaggctgaggtgggaggatcacttgagtcggggagttggaggttgcagtgagctgaaatggcgccagtgcactccagcctgggcaacagagctggaccctctcaaaaaaaaaaaaaaatccagattggaaaagaataagcaaaactatattcacagatgacatgatattatatgtagaaaatgctaaggaatccatgaaacaacaacggatactagaactgataattaactttagcaaagttataggacataagatcaatatacagaaaatttcagttacacaaacacaaatacaaatcaattgcactgttacataatatcaaggaacaatccaaaaataaaattcagaaaacaattccattcacaacagcatcaagtagaataaaatacataggaataacaaaaactcttttttttttttttttgaggtggagtcttgccctgtgggctaggctggagtgcaatggtctgatcttggctcactgcaacctctgcctcccgggttcaagcgattctcctgcctcagcctcctgagtagctgggattacaggtgcctgccaccacaccaggctaattttctgtatctttagtagagacctggtttcaccatgttagccaggattgtctcaatctcctgacctcatgatccacccacctcggcctcccaaagtgctgggattacaggcgggaataacgaaatctcttaaacgaagccatctataatagagagatcaatctcctttctctcatcttttttttttttagtattacagtgtatgccattgagttgaactttcttttccttcactttccatttcttaagggcttacggcaaccagctcctttttctgatgaaattgaagttgactttagtaagccctatgtcagggtaactatggaagaagccagcagaggaactccttgtaagtaaataccttcttaatttgttgtttgactattgtttttagcattccattgtctttatcaaatacacacctgctctctatatactgccctctgtttacttgcaaaggccagcagcgaaggggttcttctcacctgtcttgatgttctatttagaagggtaactccactccataaactttcattttttttcttattattatgcacctgtttcctgggctgctgttgtagctgtgagatacagtaaaacagaaacaatatgatattatattagcttgagctgagttatgatcttatctatttctataaagtccaaatcatgtgtcagggtgtcacattcttcatagccttcagaattccccaccacctctctacgttctgtcagctggctatgatgctgccgattgatagaggacaaaaatatcccaagttgggagatgctcgtcacttaattttatttttactgatattataattttccaggttttaaaaaatactttattttcaaagcccttgctctttatttgcatgcttaatttacataattaattagcagtttttgacacataaattactaatatatattcgagatgcttttcttatgtggggcaattggttttagagatcattataaaaagaaacttccaagagcatttgttatgaatacaaagtcctataggcaaatattctttcttctctgtaaattccccaattctccctttttttccaatcctttttcacttcttctgattactaagtgttctctctaccctgtaaatataggactgaactaagactcagacagacaccagggaataagagggatttatagccacaaatctgtgcatttgcagcatatacagtatatttgtggttacttcttaattgtgttggtatgtttgctctctgtagtaactgaagaacagtgaaatacaaatagaagtgggccaggagtggtggctcacacctgtaatcccagcactttggacaccaaggcgggcagatcatcacttgatgtcaggagttcgagaccagcctggttaacatggtgaaaccccttctctactaaaaatacaaaagttagctgggcgtggtggtgggcacctgtagtcccagctactcgggaggctaaggcacgagaattatgtgaacctgggaggcagagattgcagtgagctgagatcatgccactgtactccagcctgggtgacagagcgagaccctgtctcaaaacaaacaaacaaaaaacaaatagaagtgatgtacagtgtcatactgggaaatttttttttcttttgaggcagagtctcactctgttgcccaggctggcatgcagtggcacaatcttggctcagtgcaacctcctcctcccgggttcaagcaattcttctgccccagcctcccgagtagctgggattacaggtgtgcaccaccacgcctggctaatttttgtatttttagtagagacggggtttcaccatgttggccaggctggcctcgaactcctgacctcgtgatccacccacctcagcctcccaaagtgctgggattgcaggcgtgagccaccgcgccggccaatgccgggaattttaacacctatcctttggccttatcttgggtatatgtattgtgggtttggggtcctcaacaaaaaagaggctaattccagagaatcctttccttttgaaaaaatgtgtagatatagttcatattgatcacaaccttctgattcatgataagatttttgagtttggcttcccttatttgggtaataggtaggctcctggaggcagggtaaaatgacaaagaaaaccagagactatggattgtgtaatggtagccaggtctaacttcaaaacgccagaagatagttcagggttcacattcagatgtgatagtagaggctattgaaagcaagaactttttacatactctctaatgacacacatttacaatcagctattcatttagatttgatctgatgggttgcattatccagtttgttgctaatttgtctatatatcatttgtggtacataaaatttgaaaatatgtgtactgtttccaagttgatcttttgttttgttttgtttttgagacagagtctcgcttgtcaaccaggctggagtgcggtggtgtgatctcagctcactgcaacatttcccttctgggttcaagcagttctcaaatctcagcctcccaagtagctgggattacaggagtgagccaccgtgccgggcctgtttccaagttttaaagcttataattaacaagtcctgactggtataattgtttttaattttagaattataggattttacaaataagtcattttcaagattatctactttatagtttcttcattaagtacataaagcaattaaggtccatagtaaccaagaagcgaaggcttcccctacagtaaaacggatgattagtggaatagaattgcagctcaaacctcacccgggaatggtgctactcattgtaagcattagaatagaaggccttcagcaaaataattgtatttttggtggaacaaacagccacaaattagcctataaatttgccagcttaatttgaactctggtttttctcttagatctcattttgtctgactgttttatgttaaatcaccaagtaggtaactgcattcatgccagtgcaggacaaggaataaagcaataaagaatgcacctgctctagtgaagtttcaacacctccctcctgctccccaggtttttacgagggaggttgtataatctaggagaagattctctacttagagaaaaacaaatatgatttgagagacaagaaggtcagctctaggaatcttttgggagatgaaaaaaatcagcaatatgtttaactcagagaaaggaaggaaaagggagagtgtgaagggcaatggaaatgttaggaacagaatgtttcggtggtaggtatttgggagagtaaatctatcaaaagagatcattaactgaaacccaggtttcttctgcctaaaggaggacatatggttacttagtcaccagtggtgcagcgtataattcataacccacataaaccatataatttatcatccaaatcaggacggttttgagcatgaaagggagttgctgttaataatatacagaggttgagtgtggtggctcatgcctataatcccagcactttgggaggccaaggcagaaggattgcttgaggctaggaattcaaggccagcctgggcaatacagtgagatcccatctctacaaaaattttaataattagccaggtgtggtggtgtgcatctatagtcccagccactcaggaggctgaggtgagaggattgtttgagcccaggaggtctagaccacggcaagtcatgattgcaccactgcacttcagcctgggtgacagagaccctatcttaaaaaataaataaatacataaataaaaattaaaaaaatatatatataggccaggtacagtgactcacacctgtaatcccagcactttggaaagctgaggtgggtggatcataaggtcaggagatcgagaccatcctggctaacatggtgaaaccccgtctctactaaaaatataaaaaattagccaggcgtggtggcacacacctgtaatcccagctattcaggaggctgagacaggagaatcacttgagcctgggaggcagaggttgcagtgagcctaggtcacgtcactgcactctagcctgggcgacagagtgagactccgtctcaaaaaaaaaaaatctatctatctatctatataacatatatacatatgtaatatatgcataatatataaatgatattaaatatgtattatatagtacattatataatagaaacaggaaaaattatattaaaagtatataatttatataaatatgattatatatactataacatacattaaatcaggggtgtgtttatcctggccaatagccacttggtaaaagaatggctaacgctagctttcttcccagactagttcaacagtgaccccttctggccgtttggttaatatatcagcctgggtttgccaaagacttgggatggaatggtggccagttgagatgttggtaggctggggaagcactggagagagcaagaggcgcatctgggattggtctgagaaaaggttcagtgatctacttggcctaacataggatgattagctgtgctgcaagcagccacttgatcaacagcattctgtgctattgccaccatccaggcaatgtgtttcttgagcaaaatttccctgctgtatgctgtctagtagcaaagaaacaacaaagtagtcttcatttgtatattctatcccttgtgtttcaggatcgaatagtgtgagatcatagcccctctggacttgtttagggaaaatggaactatgttagttacttcatggacgtgacttctgggatacttcaattttttttttttttgagacagagtcttgctctgtctcgcaggctggagtgcagtggcgcgatctcagctcactgcaacctctgcctcctgggttcaagagattctcctgcctcagcctcccgagtagctgggattacaggcgcccaccaccatacccagctaatttttgtatttttagtagacacagggtttcaccatgttggccaggctggcctcaactgctgacctcaggtgatccacctgccttggcctcccaaagtgctgggattacaggcgtgagccactgtgcccggcccaaaaatctttttaatgtattattttttaataggcatagagccaatgcagtgatttctgggacatagaagggggattatatgctcaaattttgttttattttgctttgtcttattaaaaattatctttttaaaaatatttttttcttctttttttttagttgacacatgctggcagtaaaaaataattttaatagagatagggtttcactgtgttgcccaggctggtctcagactcctgggctcaagcagtcctcctaccttggtctcccaaggtgctggaattacaggtgtgagctactgtacccagcctgctttctctcatagatgagaaaactgaggcataaggaagttaaggttacagaggaagaaagctggttggaaagcttggtcaaagcttgagctatgacctttctgactcttaaatccattaattaattcttagtttttcattggattggtatatttaatttaaaatttttatttcctgtattataaaatcaatacaaccagcctgggctgggcatggtggctcacgcccgtaatcccagaacttcgggaggccaaggcgggcagatcacttgaggtcaggaaattgagaccagcctggccaacatgggatacgaatataaaaatacaaaaaattatcccggcttggtggctttcgcctgtaatcccagtgacttgggaggctgaggcaggatagtcacttgaacccaggaggcagaggttgcagtgagcctagatcatgtcaccacactccagcctgggcaacagagcaagactccatctcaaataaataaataaataaaaatacaactagcttgggcaacatgtgaaaccccatctgtacaaaaaatacaaaaatcagctgagcgtagtggtgtgcgctgtagccagtggggcgtggcggtgtgcactgtagccagtggggcgtggcggggtgcgctgtagtctgcggggcgtggcggggtgcgctgtagtcagcggggcgtggtggtgtgcgctgtagtcccagcttctcgggaggctgaggcgggaggatcatttgagcctgggaggtggaggtttcagtgatctgagaccatgccactgcactccagccagggtgacagagccagaccctgtctcaaaaaatcaaatcaagtgaaatcaatacattcccacagtttaatatccataaaatacaaaaagggcataaagtaaaatgtctccctctcaagacctgtctcacagccacctggtatccctataacaggccaccaatattacccatttctgtgaatatctaagtaaattgtttatatatcctcccaccttttagtgggtgtattatgctatattcaatcttccgttgaaatgtaggtcgtttcctgactgttgctattataaacagtactgcaatgaataacatctatatttactgtgagataattcccagaattagaaaagctgggccacagctataagcatttgtcgtttgtcttttgatagatacgacctaattgcccttcttgaaagttgctgatactcctttcagcagtgtatgatttcttggtttaaaatctacttatttatgagtaaagctttttgaaaacaaaaattcataaacctcctgagaactactttccttctccttcattcattgccctgaagacaggaaggagatgtatctgatcctcaacctcagcatggtgtatctgatcctcagcctcagcatagtgtatctggtcctcagcctcagcatagtgtatctgatcctcagcctcagcatagtgtatctggtcctcaacctcagcatggtgtatctggtcctcagcctcagcatgatatatctggtcctcagcctcagcatggtgtatctggtcctcagcctcagcatagtgtatctggtcctcaacctcagcatggtgtatctggtcctcagcctcagcatagtgtatctgatcctcagcctcagcatagtgtatctgatcctcaacctcagcatggtgtatctgatcctcaacctcaacatagtgtatctgatcctcagcctcagcatagtgtatctggtcctcagcatagtgtatctgatcctcagcctcagcatagtgtatctggtcctcaacctcagcatagtgtatctgatcctcagcctcagcatagtgtatctggtcctcagcatagtgtatctggtcctcagcctcagcatagtgtatctgatcctcagcctcagcatagtgtatctgatcctcagcatagtgtatctgatcctcagcctcagcatagtgtatctggtcctcagcctcagcatagtgtatctgatcctcagcctcagcatagtgtatctgatcctcagcatagtgtatctgatcctcagcctcagcatagtgtatctggtcctcgcctcggcatggtgtatctggtcctcagcctcggcatggtgtacctggtcctcagcctcggcatggtgtacctggtcctctgcctcggcatggtgtacctggtcctcagcctcggcatggtgtacctggtcctcagcctcggcatggtgtacctggtcctcagcctcggcatggtgtacctggtcctcagcctcggcatggtgtatctggtcctcagcctcggcatggtgtatctggtcctcagcctcggcatggtgtatctggtcctcagcctcggcatggtgtacctgatcctcagcatagtgtatgtggtactcaacctcagcatggtgtatctggtcctcagcctcagtatagtgtatctggtcctcagcctcagcatagtgtatctggtcctcagcctcagcatagtgtatctggtcctcagcctcagcatagtgtatctggtcctcagcctcagcatagtgtatctggtcctcagcctcggcatggtgtatctgatcctcaacctcagcatagtgtatctgatgacactttgacctatctttcccaaatgatgtaaatgctcctgtcagtttctgctgcagtaaaatagctcttcctttattcacagaaagggaataagttacatggactccttagatttattatttaaagcatgatggaccattatgctgattctgtttttaatgtttatttcactttggaattagtcttgttccccgggaaatcatttcctggcttctaagttgacagttctctgttatttgttgtgcctgaaaagtttggtacaaccaggctaacagaggcagttagtgcagatgatgatgtcaaaaatctctttataggctgagcatggtggctcacacctggaatcccagcattttgggaggccaaggtgggattgcttgagtccaggagttcgagaccagcctgggcaacatggtctctacaaaaaaaaaaaaaaaaaattagctgggcatggtggtgtccatctgtggtcccatctacttgggaggctgagatgggaggatcacttgagcccaggaggtcaaggctgccgtgagctgtgaccacatcagtgcactccaggctggatgacagagtgagaccctgtctcaaaaaaaaaatgaaaaggtctttatagtcatttttcataacccaacctacccctaaaatcagggtgaatacccagagaacacctaaagaaaggagtatgcagttgggccgggcgcggttgctcacacctgtaatcccagcactttgggaggcttaggcgggtggatcacgaggtcaggagatcgagaccatcctgtctaacactgtgaaaccccatctctactaaaaaataatacaaaaaattagctgggcttggtggtgggcgcctgtagttccagctactcaggaggcggaggcaggagagtcgcttgaatccgggagttgcaggttgtagtgagccgagatcgtgccactgcactccagtctgggtgatggagcgagattccgtctcaagaaaaaaataaaaaaaaagaaaggagtatacagtcatggaactgtcacacagagccagttccatttgccaagtacaagatatcgaatcaatgtatttttgtggcttggcatggtggttcacacctgtaatcccagcactttgggaggctgaggctggcgggtcatttgagaccaggaattcgagaccagcctggccaacaaggaaaaaccccatctctactaaaaacacaaaaattaggcaggcgtgatgacatgcacctgtaatcccagctgcttgggaggctgaggcaggagaatcacttgaacccaggaggcggaagttgcagtgagccgagatcacgccactgcactccagcctgggtgacagagtgagactcggcctcaaaaataaaaataaaaatgacaaaaaaaaaggtatttttgtgatcaattctttcatttggatttaggtgagcgacctgtgagagtttatgccgatggaatatttgacttatttcactctggtcacgcccgagctctgatgcaagcgaagaaccttttccctaatacgtacctcattgtgggaggtaagaaaacatttggtgacttcaggtgctgtgcagaaaaagatgatagtacagtctgtctttctcagctgagtacactggctcttgtttccatttttaaatgaaggatgtagtacagcctctctaacacacatgaagtatwtgggtaccagcaaactaaacctggagagaggagcttcaagctcctcgactgtgccatctggcatttattcactgcttgtagctgagtttctgtggtcacaggagcagccgtgacttccgttgtccactttaaaacatttgctttagatttcagtttatcattttgaattaactggagtacaaaagtctgccaaggaaatgttaggtggtccagtccagtgtgaataaaacaggaaaacatgtttaaggacttaattgatgcagacacgcacagcaggtttatttcagagtcaaagatcttggtcacctgttgtactgtcccttctccaaagtatgaacatactgtttagtgagtgttgctcctgaaggtatacgctgcattaggaaaagcgttatcacccaggttcaaccacctttagaagacttttttccagttggggaagatggttgcagtcctaagcagtgggagaagatgggagaggtcggtggctgaggaggtgctaagcaaagaggactccaacacacaatttatgatgtggtgaaccagtttgcagtgatgagctcacacacaacttcaaaggcttcacggtgatgaacgagaatgagcgctatgacgcagtccagcactgccgctacgtggatgaggtggtgaggaatgcgccctggacgctgacacccgagttcctggccgaacaccgggtaagaaactggacacatattcccattccttgtttcagaatcccctcaactctcaargctgctggcacgtaggctggttttccactagccgtgttttacttctacctcttatgtaagtttcgtaggagatgacagtgatattactagtgataacagtcacccctgacgtttatatggggctggatggtttgcaagcacttttacatccattctattccattttctgcccacagcaatcctgtggtgtgtttgtcatttccgctttacatatgagtaacaagggctagagaaaccaaataacctgctccaagttacaccattggcagggctgggaactgaactcgccacaagttacaccactggcagggctgggaactgaactcgccacaagttacaccactggcagggctgggaactgaactcgccacaagttacaccactggcagggctgggaactgaactcgccacaaattacaccactggcagggctgggaactgaactcgccacaagttacaccactggcagggctgggaactgaactcaccagttacgagaccttccccccacaccataggcacatctacccttagaacatgccagtctcctgagaatatccatagccccaggtgaactctgaagacggtcacattaccaggaaataagacggattaacatagacttttcttggcttaagtttcatttcagggctttgatcttatgctagaaattgggtggaatcagaaatcaaggatatttctcactgtttctcagtaagttattatcaaccccttacctccttttaattctcccacattaaagtaacagatttcagccaggtgcagtggctcacgcctgtaatccaagcactttgggaggccaaggtgggaggatcgcttgagcccaggagctcaagaccagcctgggcaacataccgagaccctgtctctactttaaaaaaaaaaaagccacaggtttcctgcaaaaggtgggtacaaaagatgagaaggattgattaggccaggttagaggcccccaagcctgaggaaatagcaagcatgttgtcagttctctacaggggcgcgtggaatgttgtaggtaaattgttcagtgaggcagaaagaatgaaggcagccaaagtgcttctaaagcaatacgtgggtaggcctgaagaggggatatttattaaaactattgaggattaggacagaccttttataattctctggcttttctacatcaacacctagcagccagtggcaccaaaggtggtaagcaagtttattctcagcaccacagcccacaggcccagacagaagtatgaagttagaggaatttctaactccccttttctctttgttaacaatatatactcaaccttgagttttgcttgtcccattctttttttttttttttttgagacagagttttgctctgttgcccaggctggagtgcaatggcgtgatctcggatcaccgcaacctccgcctcccgggttcaagtgattcgcctgcctcagcctcccgagtagctgggattacaggtgcgcgccaccatgcccggctaatttcttgtatttttagtagaggcagtgtttcgccgttttggccaggctggtcttgaactcctgacctcaggtgatccacccggcctcctattctttactttgctgcctatggatccctgacaagttgttcatgagtaattgagatgctggctgagagtctctgacatagtcccaatgaacatgcttcacactacagtggtctctcggggatggtatagtgatcttagtaattatcagcaaaaggctggtggcccatacaggaaggagtaagtgaagtttagcacgcctccgaacaacattattgatccccagtatcattcatctcttcttgcccttgcaaaggatattcatagcagtaaaatggccaggcgctgtggctcacgcctgtaatcccagcactttgggaggccaagtcaggtggatcacttgaggtcaggagttcgtgaccagcctggccaacacggtgaaaccctgtctactaaaaatgcaaagattaaccaggcggggtgacatgcgcctgtagtcccagctactcgggaggctgaggcaggagaatcgcttgaatccaggaggcagaggtttcagtgagccgagactgtgccactacactccagcctgggcgacagagcgagactcggtctcaaaaaaaaaaaaaaaagtagtgaaatgatagatcctgaggataaaacttcttttatttatttatgtatttttattgatcattcttgggtgtttctcgcagagggggatttggcagggtcataggacaatagtggacggaaggtcagcagataaacaagtgaacaaaggtctctggttttcctaggcagagggccctgcggccttctgcagtgtttgtgtccctgggtacttgagattagggagtggtgatgactcttaacgagcatgctgccttcaagcatctgtttaacaaagcacatcttgcaccgcccttaatccatttaaccctgagtggacacagcacatgtttcagagagcacagggttgggggtaaggtcacagatcaacaggatcccaaggcagaagaatttttcttagtacagaacaaaattgagtctcccatgtctacttctttctacacagacacagcaacaatctgatttttctatcttttccccacatttcccccttttctattcgacaaaaccgccatcgtcatcatggcccgttctcaatgagctgttgggtacacctcccagacggggtggtggccgggcagaggggctcctcacctcccagtaggggcggccgggcagaggcgcccctcacctcccggacggggtggctgccgggcggagacgctcctcacttcccagaccgggtcgcggccgggcagaggagctcctcacatcccaaacggggcggcggggcagtggcgctccccacatctcagacgatgggcggccgggcagagacgctcctcacttcctagacgggatggcggcggggaggaggcgctcctcacttcccagactgggcagccgggcagaggggctcctcacatcccagacgatgggcggccaggcagagacgctcctcacatcccagacggggtcgtggccgggcagaggcgctcctcacctccaagactgggtggcggtcgggcagagacactcctcagttcccagacggggtcgtggcctggcagaggcgctcctcacatcccagatggggcggcggggcagaggcgctccccacatctcagacgatgggcggccgggaagaggcgctcctcacttcccagactgggcggccgggcagaggggctcctcacatcccagacgatgggcggccaggcagagacgctcctcacttcccagacggggtggcggccgggcagaggctgcagtctcagcactttgggaggccaaggcaggcggctgggaggtggaggttgtagcgagccgagatcacgccactgcactccagcctgggcagcattgagcactgagtgaacgagactccgtctgcaatcccggcacctcgggaggccgaggctggcggatcactcgcggttaggagctggagaccagcccggccaacacagcaaaaccctgtctccaccaaaaaaatacgaaaaccagtcaggcgtggcggcgtgcgcctgcaatggcaggcactgggcaggctgaggcaggagaatcaggcagggaggttgcagtgagcagagatggcggcagtacagtccagcttccgctcggcatcagagggagaccatagaaagagagggagagggagaccgtggggagagggagaggggagaggggagaagggagaggggagagggagaaaacttctcttatggccttcggtttgtatttctcaggccaatagatgtatctattccagtcagagggctcgtggttgctatttttatattccctcttttctcacggactgagagaaactagttaagaaagaagtaacctctttctcatactttttttttttttgagacagagtcttgctttgtcacccaggctggagtgcagtggtgcgattttggctcactgtagcctctgcctcctgggttcaagcaattctcctgcctcagcctcccaagtagctgggactacaagcgcccgccaccatgcctggctaatttttttgtatttttagtagagacggggtttcaccatgttagccacgttagtcttgaactcctgacctcgtgatctgcccgccttggcctcccaaagtgctgggattacaggcatgagccaccgtgcctggcctttctcatacttttagaaacccttatttgaccaaatccttccagacccaggacagggagatttccttctttcctaggctccacccactaaccggttcaccagcaaaccctctggccctattgaccacagcaagatgactggtatacagagtgagggtaacagttctagcagacyaggagaaatagctacaaaagcagctggctaacttcatatgtatactccataaatcattaggttgggtggtttgtgaatagattgtagaatttatgagcaaagcaaagagagatatgaagtccactgaggcctggcctctgcctattgtcctttttctsggcctgagaacattgactgggtctttctgaatggcagttatcatgggttttaatgatgtttccttattttcagattgattttgtagcccatgatgatattccttattcatctgctggcagtgatgatgtttataagcacatcaaggaggcaggtgagtgagctgtgcttcctcactgtaggggatctcagggcagctgcagatgttcagccatgttgctgctttacagaggaaaatgtgtacattagaaattcaacatcctctttcaggccacattttggataaaaggtaaagatgagcatagcacccatcaattctttgtcgtcagttcatgacatccatcaattcttggtctaaacatctactttggatatctctcttaatttcaggaaaccctttctcatatttttcttaatattagggctatgtaactcttctttgccttacctctggcctttgattcggtctaccttctgtatatcagtatctttcagtttcatttagtaataacagattctgctttttgaggaaaggaaaggaatgttgcccccaatttccatttagtcttaatacctgagctaaccagaacctcacagtgtttgtctgtatgtgtttctgagttaggcatgtttgctccaacacagaggacagaaggtatctccacatcagacatcatcacccgaattgtgcgggattatgatgtgtatgcgaggcggaacctgcagaggggctacacagcaaaggagctcaatgtcagctttatcaacgtgagttccagccttaccccagagttccctgactctgtaggagacatatcacctcccactccatctcagctgaactggctttgcagttggctttgatgatcactcccaaaagttcagtgaatgaattaccactatgttaactgttcacaaaaagaatgaaacagacagtttctgcygttacggtctggtaccaacacattcgtataaagccatacagccaactaaataaatgagtaatttatatagtgcagtatttctgtcaataaatggaaaacggtgtctcttaaacttcctctctcttcttcggttggatgatgtcttgggaacctgcgaaaggctatgagccctcctcgtgtggatagtgacacccgacacaccacttcccacacagacctgagttttaaatttggattgacgaaagttaagtttatcttagcttaatattgccttttagaaactctatatatttttctgggcatggtagttcatgcctgtactttgggaggctgaggcgggaggactgcttgaggccaggagtttgagacagtctgggggcacatagcgagacccatctctaaacaaacagacacacacaaaaactctaaaagattcatgcaaatatatatatatggagaggttccttccttttgagacagggtctcgctctgtcaacgaagctggaatgcagttgcgtgatctcggcttcatgcaggctctggctcctgggtgcttagcctccttgatagctgtgatttacaggcatgtgcacagggctggctaatttttatttttttagatttttttttttttttttagcagagatggggttttgccatgtttgccaggctggtctcaaactcctggcctcaagcgatcggacccccttggcctcgcaaagtgctgggattacaggcatgagccaccgtatccagccaacactatacattttgtatgtaaattagacctcaataaaatcgatttaaaaagaagaaagctgctaactttaatgtcttctacataaccagtttaccatgctccctgacctactcccatctctgtaaattgtgctataagaatggataaaatgattacatctaaatatgatttatctaggcagataaaccctagctcttgttaatttacttactatagctttatttttcccataaaaatcaggtgtttaaaaattctaaacataatcccttttctctttatgatctggaaattttgagagtacttttctttttctttttttgagatagagtcacactcagtcatccaggccagagtacagtggcgcaatcttggcttactgcagccttgacctccgggctcaagtgctcctcccatctcagcctcctgagtagctgggactacaggcacaggccaccatacccagcttattttttatatttttatttttagtagagatgaggtcttgctatgttgtccaggctgctctcgagttcctggcctcaagcagtcctcccacttcggcttcccaaagtgctggtattacaggcatgagccactgtgcctggccaaggatacttctcatttgactaaatactcccttcccttccaccggagggtttataccattttccttatctttagcaaagttggtaagaccaacgagtatcatcattttgcaaatgagtaaatggaccttaaaatactaaaggaacaaaaagcaaaaaacacaattcatttaaaataatagaataagccagtgatagaggggaaaaatccagtacaataagcagattaattaagtaaaagatctagtattttctctttcaatctattgtaattagtttattcttggcagtattgtgcagtgatcttttagctgcctctgtatctccgtctggaatgaggttcgggccatgctgcgcatgtttatgttccaagtttatgttttatctttaaaactctgactttatttggctacgtgcctgttactgggtatagcctatatttttagtttattcccaaatgcccacaatattagaattaccacttcttgtgtgtgcatccacagcatatcttatctgttattatgctgagagtggggtagattaaagcaaagcaaaattctagactgaaaacagtgtyaattgagtgcttgagccatgttttttcgttctcttatggtagagaagtttaggatgagcattatttctcagaagagttatttctttatctaggagaagaaataccacttgcaggagagggttgacaaagtaaagaagaaagtgaaagatgtggaggaaaagtcaaaagaatttgttcagaaggtggaggaaaaaagcattgacctcattcagaagtgggaggagaagtcccgagaattcattggaagttttctggaaatgtttggtccggaaggagcactggtatgttctttcccactggacaatgtagggagttccatgttgtggaaagaatgacagaatcattgagcaggaaggggcatcgacactgagaagttatctagtctatccccttatctgggcagaactatctttcaactgtccccagcaaggtttttgaaayctttacagaaagacgttacacattctcctagataattttgccagctctctctcaaccttaaagtctggtgacaagataagcaagtcgccttgcccagcttttatctgtggtatgattttagatagaaggaaaggaaagaataaagaacaataaaaagaaagcagcctccactacaagtagctgcagcaggaaccccaggtaaggtgggaattctgtctttgaggagtagcagtcttttcaaccaaataaaagattgagcaagtgagtcctaggttagatatcaggaaggatctgtctgtgaaggtgtttggataaattagaataatcctagactagattattgaggaagaatggggaatttcccgggtgatgacagcaggggagaacccttaaataaatagtacagcatagactatcccagtcctagatgcttcagtgatgattaagtaggatccacggtgtttttctgactcttcctttcggtttctgcagaaacatatgctgaaagaggggaagggccggatgctgcaggccatcagcccgaagcagagccccagcagcagccctactcgcgagsgctccccctccccstctttccgatggcccttctccggcaagacttccccaccttgctccccagcaaatctctccaggcacaaggctgcagcctatgatatcagtgaggatgaagaagactaatgtttcctccctcctttcctgtcytccctttctgtcccattaccttcagragctctctgttgaattccaaattgtgaccccaacactaaacctaaggacagctacaaaggaaagacaactggggaaagaagacctaggactgggggaacccaaacagcctgtcctgcaagtgacatcactcacccacacgaaggagggggactgcaccttagaagcctgctctgcatccatttaccccccyccaagggctttgtttcactgtttatgttcacgtgatctcaacagggaaattgtcattttcattaattttttaaaaaattcgtctttcaaatgtagaactaattttttgcccctgaggagtgggcagaagaaggaggtagtgtaatacgcagaggccttttcttcccggtatactatagcatttgccttccgttctgaagctawgtggcttgccaagtccttcacgaaatgagccacgctgatgggtaatttgtggagaaatatcttaattttgatttccttaaggaaaagcgaaaagcagagttacagtcacaaatcccctgaacgtactgctgtcaccagtgtcattgtggctgcgggaaggagatctgaacctaacttttcttactccctgaggagtttcttgttggacccaatggggtccatgaagacactratggggatggaagcagacccatggcatcaactgcagtgtttctgctgtgttcatcttctcagaaaactctgtgacccagttctttgggagcttttgtcagtctctttcgtgccatctaccttcgaaggaaggaacacttttagagttacaatgatgaggagaggagcgggacaatactcaatcctataccaagtcrattgagattagtttcctactgggagtaagtgcctggccctgctactcctatttgaatgctattaatattacctagccttttacaaaggatactttgtaaatgtctgctgttggaacttgatgttaatccattttggtcatagccatattagagagatttgcacagaatgtaaaggcaaaagcataggaaacaccttcctttctaaagcaacagccttatcaccttgacctctgtccctcttcagaacattcttccctggaaccagtgctccacatctttcttttcctctgagagctgcagctggcagggacctccctctgctgctcctccagcaagccacagagcataccctcacgtgacaagagtgtggtaggttttctccccacttytcacacacgcctggtggttgtggttccatctgccttgttggcttgcccggggggattcaacacttgactttcaaatcaaagaatgctaatgcttagcacttgctgttgagcatgctctaacttttaaagccctggcctcctgtctccttagctgcttagctacgcggsctagcagatcatcacccatcagtaatcctgtggctagatccaggggaaaattgcttatgtccaggccccacccctgtcactcataaataccccttgkgggggtggaattttagtgttttcagctaagaaaaccacattttctctttccttgcctctgctaggactgtgagcatctcatagtccactccctaaacactttctggtaacacctagttttccrcctgagggtcagaggctagaatcattgcctgcacagcaggactaccttggttcttaaaacttggatcacccaggcaaggcgtggtggctcacgcctgtcatctcagcactttgggagactgaggctggtggatcacttgaggccacgagtttgagaccagcctgaccaacgtggtgaaaccccatctctactaaaaatacaaaaattagccaggcgtggtggtgggcacctgtaatcccagctacttgggaggctgaggcaggagaatcccttgaacccaggaggcggaggttgcagtgagcagagatggtgccgctgcagtccagcctgggtgacagagcgagactctgtctccaaaacaaaacaaaaaccacacacacatacagaaataaagagaaataatcaactagaaaaaaaacaaaacttggatcacccagaaagagcgtcacagaggcgagggagaatgaagcctcttgttatcctgatcgcctatgacaacgacatttctaactcttctttgaagcgcagttcttactcttaaatctggtcatacaagctttggcttggaatcctgtctgtctttgaaacagctgaagttagtgttttcctgtgttacccagtgttacatagtctcatctttgaacttttctgcgtcagccttctctctttgggaatgctgcctgtttctgtctaacttattctccctggtgtggtgtggcagtgaagtctgtgctgaagcccatctgcttggttcctccaagtgcacattatgcaagtgtatttggatagacagggagatgcccggaacgtggttttcctcctccctccctattggagccatacctcctaaatatattgtctgggtcccaaatgtttgagccctcttcctctgctctcagtgggctgctcttggcatgccctgtgcttggaacgggacctgcaggctgacaggcctctgagactgctagggccagcaaacgtacatgttattgggaaactccctttccccttttggtgagcttctaccacctcagtctaatcgttttgactgaaagctatttgtctgactgaaagctaaaatcttttatagtgtggcctgttagatactttggggtaaatgtggtctgaggtgctggactagcacgggtagatggagaaagctgttgggaagttgcataatgtggtcatctgtgcctaattaaatgaggttagaggtgtgcacaccaccacaytgcctgggatctaaatcttcagatattaacgtttgaggctatggagctgtttccctgaatcacacacgagaaagcagtcaacatgggtgggccaaatgtggccaagatgagagagccagaagtgttggccttagagcagagcctctgtgtgtgagacattagaaggccagagccggggaggtgccggcgcagccactgccttccggtgggccggacggaaagcttggtcttatgctagattcagaagcactgaagaatggaggttgacactttagaggactaggaagggatcatttgtgctcttgcagctattgctgatagctagagccaaagaccattatattgctgaggcttgggtaagaaagttagggatgtgaggaggttgaaaatcctgaagaagagaaaaaatatgagggaggctaaggaaacttagmcactttctgatcactgatgactccttaggctgcacctgagtgatggtggtgtttttggaggctgtacctgagtgatggtggtttttggggggctgcacctgagcgatagtgatttttttttggaggctgcacagctggtcagaccatctctagatgttctttccacagtggttcatagggcgtcattcccccttcctggattattttgactatgggtagcttattttcaagagctctttgcctttttaatcctgttccagatcacttatccaaaatctttccaaatcaattatattttgctgcttttctttaattccctaaaagccatagcttctagattttctatcagcacacattctcaccagaagttgaaccaatacaggtagaaaaagaaagcccccttaatgtttttaactgatgatatttttttaagcttaccaatataagtatttttaaaggttctatttttcaaagtcataacaatgattgttcttgttttctctcatagaatagactgccatcggataaagagtggtccctagcttctatttttccaagyaaataagtagaacatgttcttgggattataccattaaatgttaattttcttgaagaagaaagattgttgtctgccaagattttatgttagcgctcggattgaggcagaaaacggaagcaccaggtttaacactgggatgacttgggttgtgttcctggaggtttgaagtgggccttcccgccttttgagggggaaaactgactgttttgaacacatatcctggattagttgggttgttttgtattgaggatccctaaaagacaaaagagtcttggaaaggactgctggcttcgtcttgaacgttcgccccatcaccagtgtgagtccgtggggaagtcttcctcaagtggggttcagtctgtaattttcctgtctgttcttagtttgttctgagttattttggattttgttctttagccaaataaaggcagtgtggttttacctgatgttccatgtccagtggtgtttttattttttatttttattttttttgagacggagttttgctcttcttgcccaggctggagtgcagtggcgcaatctcggctcactgcagcctccgcctcccaggttcaagcgattctcctgcttcagcctgccaagtagctgggattacaggcatgcgccaccacgcctggctaattagtgtttttagtagagatggggtttctccatgttgagcaggctggtctcgaattcctgacctcaggtgagccacctgcctcggcctcccaaagtgctgggattacaggcgtgagcccccgcgcccggccgtgtcctgtgttttgacctgtgtggtgcattttatggatttgggacttttacttggactctcggtgcctttgcttccacgtgctgactctctccttagaaatcaagctccatgaccacagtgtcaggagattccttttctagcttgtcactgaagactcaaaagccattgtcccacaaagtgaggctgacccagaccaccagggccccgcgtggttggtgccgtagtagcacacctgtcagggaaaggtcaccttccatctgttctccagggcccctggcttcttcaagactctgggctggtgctatttcacctcaccaagttctccttttcttatgccagacacaatactatatactcttcttttcatctgctttaggaaagctcagtaagctttcttttttttccagaggcagggtctggctgtatcacccaggctggagtgtatggcacaaccattgctcactgcagcctcaacctcctgggctcaagtgatcctcccgcctcaggctcccaaagtgctgggatagcaggcatgagctgtcgcacctagccagcaatatacaaccttgaagggttaatagtgacatggacagaggcaaggtgcccagttacacattttcagacatcatcttgtttattacaaaacttaaaacaccttccaggcaagatccaaagcaattttattctaacattgttcaccttcatctgtagagtcaaatgtatctgccagcttgtgttgacaagggggaatgcttcccatttggtcaaggttgagggacagtaaaggaatcttgtattctaatgagtacagcatcctttcattgtccaagccatccaccttaggctttgaggttcaagtccaggtctggagaagagaaagtttcatacccaaccttgtggtctttccttcggtagtacattcgtgtcagcacagtcattagaaaagtctccagtatgaggaggtggcaattcatcactgcagtgtagggtgaaatacagcgtaggttatgctgagttacagaggtggtattttactagcagcccgggcacgggagttgagcaacactttctccagtttatccccaaatcaggacttagggatacgaaattgtcataaataacacagcgggttaatggtagagccagaaccggaagttggctgtctacttctgtgctctgaggctggcatacagtccatttcttatgtgtgttcaatcaacatgggcttctgttttttaaccattcccattcctctcccaggagctgaggactgaacccatggcttcctgggttggccctcagggctggcctcaagctgtggggtttcacttctcttctgtgtgatcagagaggtcatagtttccttaaagcctctgttgggatttcccgaagatcccttctgaacactctgagcagaagtcaggctggcctaatgtctgttctggggccccttctttcctgactctccccgtctcatccatcccacgatgggacaggaggcttaacgtgctcaccttgagacctggttttagaggaatagggaggcgaacaagcaatctgcccaccgttggccaagactgagaagatggagggctgtagggcagtcaggatgaggagaacctgcggaacataaaagagaggcaagggtggactgggcctgccctcacggcacagaacgcagccagcccactgccgggccttgcccttccgctgggcaggttccacccaccgtcagatctgtgcagtcacagagggttgaggctctcacttcattaaaaatctgtgggattttcatctttaggcaaatgacattcttattttctacccagtagtttattagagtttctgacaagatataagaactgattaaagggttcatttttaattccctttctcagccatggctaccaatgagcactcaatggataaagagatgggtgattagagaagagtcattccatctagctcaagtgcctgaggtccctgctcctagaataatggacaattaaccattaaaatgccctttggaagctctgccatcccagagactgcagggagagggcaatggggaatgtgtttaatgggtgcctggagatggacggtggtaatggtagtgcaactatgggaatgtacttaatgccacagaacctgacacttcaaaatcattaatggcaaattttatcaatatttcaccaaataaagaaggcaaaaggggagaagaagaagatcactgtccagaagccctggaagcaccatttatcttagtattgccctccctgagtacattgtgtggaaacctcagcttcttcaaggctggcgtggctcacccaggctcccccacattaaccatgggcaggctcggccatcacacggcttttatctttcggcctggtctcaagtacttctgggacccagaacctttctgccccttcagtccctgactcattccggggacttctctctctattcccatagcccctttcattctacctcctatgtgcctggaagttcacatttgggaggcatgtacgtagatcaaatgagaatgtacgtgaactcactctgttaaactgtagggcagtcattatgccttgggagtagaagaccagcaaggagacaggatggagagagaaggagaacaagactgggttagaagtcattgcatttggtggaaaagtcatctttgaggttagagaaggcagcacgtagaaggtgggccaacatgcctttgagagaattttcagaagcgttgtgaagatgaagggcagggtaaggagaagacagatgtgtggaggagtcaagacatacctgggtataaattctagccccgttccttatgtgcctttgagcaagaacatctctgggtctgtttcttcctttgtaaaatgggaaaaatgactcctggggttgtgaaaattgaagtgtaatgtgtgaaagtgcccggcacatggtgtaggtaggtcctgtagctaatgctaatgcttctgctggtgttgatgggttataggattttaggaagtcataggtagaaaaggaaaggaagaagcaaggagacaaatgtaaggtttgttaactaacacacgtgttacaggttaaattgtgtccccaaaaagctatgttgaagtcctgccccccggtactcgtgaccttatttaagaacagtttgttacaaatgtaattagttaagatgaggtcataatggaatagggtgggcccttaatccaatttgactggtgtcctaaaaatagatgagatggaggggcacagtggctcacgcctataatcccaatactttgggaggctgaggcgggtggatcacctgaggtcaggagtttgagaccagcctggccaacatagcgaaaccccgtctctactaaaaatgcaaaattagccgggcgtggtggtacatgcctgtaatcccagctacttgggaggctgaggcaagagaattgcttaacctgagatggcaccactgcactccagcctgggcaacagaccaagactctgtctcaaaaaaaaaaaaaaaaatagaagacacacagaaacacaaggggagaatataacgagataatggaggcagaaatgggagtgacgcaaatgctggtcaaggatggtccaggactgctggcaactaggaaactagggagaggctgggaccccctgcagggctcaaagggagcagggccctgctggctccttcgctgtggacttctagcctccagcacaatgagacaagacatgtctgttgttttaagccatctgatttgtggtattttgtcatggcagccctgggaaacaattccagcacagaaagacaaaagcgggaagcacaggaatcattttccaaatctcatgagagacgtgaggcttatgaaaaagattcccggcccactttagcctttattggcctcacttactaaccccaactatctgtagctcggttatgaaacatcttttctctcccagggtatagttacctggaacagagcaaatttggctcccatgttctgctcacccaggtgtagcctggcttgacgggaaatgatgcccagggtccagagagccagcagtgtggacacgccaaggaaagtgttgatccatagagctgtgctcccctcagaaatctggtggcaacagaaagtagtcagtgaggcaggcaagctctctctctctctctctctctttcaagagatggtgtcactctgtcacccagctgaaagtgcagaggtgcaatgatagctcactgcagcatcacactcctggctccagtgatcccctcgcctcaggcttctgagtagctgggactacaggtgcacaccaccattcccagctaacttttttttttttttaataatagagatgggccaggcgtggtggctcacgcctataatcccagcactttgggaggcagaggcgggcggatcacctgaggtcaggtgttcaagaccagcctgaccaacatggagaaaccccatctctatgaaaaatacaaaattagccgggggtggtggtgcatgcctgtaatcccagctactcaggaggctgaggtaggagaatcacttaaacccgggaggcggaggttgcagtgagccgagatgcgctactgcactccagcctgggcgacaaaagagaaactccgtctcaaaaaaaaaaaaaaaaagagatggtatctcactatgttgcccaagctggtcgcaaactcctggcttcaagtgatcctcccacctcagcctcccaaagtgctgggattacaggtgtgagccaccatgtccagcctaattttaaaaacatttttagaaatggcatctcgctatattgtccaggctggtcttgaactcccactcttgagcaatcctcccacctcggcctcgtgagccatgcatcatggcacctggtgcttcctttgagctctcctctcccacggcaggaacggtaatgaaaaagcccgggggcctggcctattgcggttctctccctggcagtccctgagcctctgttttcccacagccacccttttctggggccctctgtcaaggggtgttggctctggtgattccttttagaacacaaaggtactaaatgagtcttggactgtgctgtcccttactcccggcttacgtctgctgggtcatagatgccgtcggggacgagaaacaggcccaccagggtcagcgttatcttcaagaaggcgtattggaaagggcccaacatcagcagctgaagcttcttcctgagtggggaagagggttaggaacatgggcccacaaaccccctgccccaggaagacgccccggctcctcacagggctcctgggctgaggctcggctgctgtcataaacaccaaccaggttaagtggatggggacagaggaaaaaagcagaatgttgagagtgctgggaaccctcttggtctcccactcacctccagacaagaattccgtctttggagcgaggtctgggagtgtgacctcaacctcattcaccaaagtgggcagaaggggcaagcgaatggccccaagtccagttttctctgtgtggctaaggcttgcagggtgcagtgaagttcagtgatgacaattgaggagctctccttcctctgctcccctgtcccctgagggtggcgcccgtgggtcctggccgtgggatgcccacccttccgtcactggctttgg

SEQ ID NO: 94510 - DNA, 23030 bp, Homo sapiens
tctatgcagccacatatctagcaaataaatggtgttttactgctgaggaagagggaaagaaagaatactggagggcaaccagtcacctctgctgggaagccatgggaaggcagtatttaaagcacagggaaatggcccagagaggccaagagtgcttagaggtaatgataaaaagtgtcttttgagccgggcatggtggtgggtgcccctgtagtcccagctacttaggaggctgaggcaggagaatcgcttgaacccagaggcggaggttgcagtgagctgagatcgcgccactgcactccagcctgggtgacagagcgagactccatctcaacaacaacaacaacaacaaaagtgtcttttggtcttagcaccatggaaatcactggggacttaagtaagacttgtttcagtggaaggatgggggcaaaggtcagatcaggatgaatgaggaatgaatgggagacaaggaaatcaaagcgaagattcatatgggaattaagctcctgtaggagactttccaaggaaggttggtgagcgatgtgggaggggcagctggagggaagtggggccaaagaagagttttgcttggttttgtttaagatagagagatctgagcatgggggaaggacgtgcagaagaggcagagccctgctcaagaggaatacggggtaattctcagtgtaaggcaaccaaggtgcaggggctcctgcacaggacttgaggcctggaaaggggtcgttcctcatcagcggggctagcacatggcaggtgccggtgtggagggtctgagggcatgggagtaggaaatggagggcattcaccccaagtgagggcttctgttttctctgttaaacatgcgagttaccaaccagagcgagggtgaggcagagagaggagcaagccgcctgtggggctgggcgtgcattgaggcagtgacaaagaattcatggcaaaaccaacccacatcataagggtggccatagagaaagcagggttcaaaagcttttatttcccctttgattattcagccacattgtcaatggaaaaagtcacaaaatgtagaaatttagccaggagagctttatctcttagaaagggttgccacctgcaggatggacatcccacaggtggggaaacgtggcctttagcagaaaccaaaagcaggcacttcagaggaaaaagcggagaggctgaggtgtatgcccaaagacaggaactatacatacatattcagtaagttatgagacccttatgaatatttatgaggggatcctaacacatgcaactgaataatcctgtgtgttgcatacaacccatgttcactttggggtggaaacataacattaaatgcctaaaattaggctctataggtcaaaaggtagaagaacattagccaggtgcagtggtgtgtgcctgtggtcccagctacttgggaggccaaggtgggaggatggcttgagcccaggaggcagaggttgcagtgagtcagcatcatgccactgtactccagcctgggcaacagagccaggtctgccttaaaaaaaaaagaacacaaaggtactcagtgcgcagcctctataaactggccagaaccagcccatggtcagtggtgtcttatcaggagaaaattactgaagtcagtctcttgttcaatcaaacctgtagttatgctttgtggaatggagtctggagtctgggggcatcagttagcatctgacaattggtaagttagaacatttattattttagtgtaggggtatgtgacttttgcctggcatggccttagtcttatttataatttcataatttataagccacaaagactccattccatcagtcttatgatctctgttttacaaccctggatttgtccagctctccaccatctcttgtcctaggtacaagcagtttctccaaggaggtgtctacacccaaacaaccactggcctgtttcctgtcactacacattcatttgcatttctagtgtactgtagccccttcttttttttttttttttttttgagatggagtctcgctctgttgcccagggtggagtgcagtggcgcaatctcggctcactgcaagctccacctcctgggttcacgccattctcctgcctcagcctcccaagtagcggggaccacaggtgcccgccaccacgcttggctaactttttgtatatttagtagagacagggtttcaccgtgttagccaggatggtctcgatctcttgacctcgtgatccacccgccttggcctcccaaagtgctgggaattcaggtgtgagccaccacgcctggcctgtagtcccttcttatccatggttttgctttctgaaatttcagttactcaaggtcatccatggcccaaaaatattaactggaaaattgcagcaataagcaattcataagttttaaattgtgtgctgctctgtgtactgtgatgaaatcctgcactgtcctgctccatcctacctgggacaagaatcattcctctgttcagcttttccatgacgtctgccctccttgccccttagtcaccaatgagctggctccgtgattagatccactgtcgtggtaccgcagtgcttctgtgcaaggcaccatcatctgacttcataatggccccagagcaaaaggggagtggtgtcggcatttccgatatgccaaagagaagccttcctttatgggaacgctcctgacttaaggaaataaaacaaaaatcacataatgaggttgctaagagctacagaaagaacgaatcttctatccatgaaattgtgaagaaggaaaaagaaatttgtgccagttttgctgtcgcacctcaaactgcaaaagttatggctacagtgtgtgagaagcacttagttaggatggaaaaggcattagatttgtgggtggaagacgtgaacagaaacatattctgattgaacagcaaccgtgtagcaccaggttaacttcatctggattaaatttgatcactggcatgtatatataggaaaagacgtagcagatgtagggtttggtactatctgcagtttcaggcgtcctctaggggtcttggaaagtaccccccaaggatactctatacaaatgaaataattccatatgtactcatttttaatctctttttcactctgaataattatcttgatatatatccatgttgcatcaacaatttgtcccttttcattgctgggtagtattccctagtgtggctataacagagtgtttacacattcacctgttaatgaaaaattgagttgtttccagtttggggattttgtaaaaaggctgctgtgaacatttctgtataagccattgcataagcattttttttaaatttctcaggtaattactataaaacaaaaaaacaaatctggattatataaggagcgaatttattccaaaggattgttgtgggggtgaccattgcaatagggaaacgttgcagtgcggccactcgcaggcttcccatatgatctgcaagtgtctcagaggttaggcaaagggctgatcttgtatagggaggcgtaaacgtggctagaaagaactgttatgggaaagtgggctgagcaagagtgtcacgatcgaggaggtcttaccctgcggacagcctgttctcaggagggaacctcaggagggctgcgggttggcacaagctgtgggtgggccaaagctcaagggcttggaaaaggagagaatctgaaccaaggtttggttacaggcttttgttcttattgatctgtgggacaagcagcccagctaatcatttatgaggccaagaatgggaatttagagggtctgtgtctggcctggtcacagataaacaagggagcatctgggagtcttatccaggttatatagaaagtcactggttctttccagtagggggttttctggaacaaaagagtggtgggattccttaaccttcactatttctagaagcaaagggctaaggtaaaattcaatactgtcaatagtcaggattgaaatggctacatcatatggtaggtgtatgtttaattctcttcatacactgacaaatggttttcgatcgtggtggtactattttataatcccatcagcagtgtacaagaatcccaggtcctccacattcttgccagtacttggtataatcagtcttctttgtccattctagtaggtgtgagatggtgtcacattgcgcttgcaatttgcatatccttaatgattaatgatgttgagcatcttttcatgtcctaattttttctttctttttttttttgagacagagtcttgctttgtcgcccaggctggagtgcagtggcacgatctcggctcactgcaagctccacctcccgggttcccgccactcttctgcctcagcctccccagtagctaggactacaggcgcccaccaccacgctcggctaattttttgtatttttagtagagatggggtttaactgtgttagccaggatggtctcgatctcctgaccttgtgatccgcctgcctcggcctcccaaaatgctgggattgcaggcgtgagccactgcgcccagccttcatgtcccaattttctgtctgtatatcttatttgatgaaatgtcagttcaaatattttgtccatctaaaaaattgaattgtttgattttatctactgacttttaagcattctttctatattctggatacaagtctttttatcaaatatagcctttacagatattttcttccaggctgtaacttagcttttcagaaagtctttgggagctatggcttagtgaaacccttgtgccaggttctcctcagcgaatccccctgatcacagccacccccataggttccatttcaatatctgtggtgaccttctgcaagctaggctgaagtcccaagctccagacccatgtctccaactgcccaccgttcaatgccctttggatgtcccatgcaaatcggagctcaccatcctctccccagacccgctgctcctccaggagccctgtctccatgaacggccctgcacctaccgagctagagacccaggagttggccttgtacctccttccttctcacttccacctcctgtcattcagagctgtcagttcttcctcctgaacatctctggacactcaccttctccaccacgcaccgcaccaccattgttctcaaccgcaccacccacccagacacctttcctcagacgggtggccagagaaaaacttctcaaatagaagtcgggacatggcacgccactgagaaccttccagcggtctcctgtgcacgtaaacaaggtccagactccttcgtgggacaagtaaagctcttgatgatctggtccttgagtaatgtgggggccacttgtacagagcccctcacactgttcaaagtcggcagctgaagagctgagcagtagctgtctgtggagttcagctgccactccctacacgcctgccctctgcaggggatggagtcccgtttccccacttccccacctgcgcccagcagtgcaggtgaaggcctggctgcggagagtggctgggaaacgctgcgctttggggtcaggaatgccagctccactactcaccgcctgtgtcaccctgggaaaacagctctggccccaggttctccataagtaaaacgggggcagtcatccctcccctcctcaacgacatatgtcagaatcagaagccacaaatcattctctgccacccagcacgctgccttggtctcctagaccactttccccaacaatgggaaaggcgccaggcccagaacaaggccgagaccggatgaggccagcgaagcgcccagggacaaaccttcgggcagcgcccactctcgagttcaggcaagtgcagggtccctccgagagagagcgtctccagagaacgcggctggcgcctggctgaacccgtagcctgaagacccgccggagccgcccgccccacgatgggcccgcccctccgggattggcgccctgctagtggccattgcctgtgacgtcacaggatcgcgcccgcttttctctcgggtgatccggccgagtggccctgggttagcagctgctgcatttccccggctggctgcggtcactggtggcagtgctcaggcgcccgcygcccttgaccttcsgccccgcgagctctaaccctacagcgcaggaagatcggccgccgcggccaggtaggacgagcctggctgggtctaggccagaagggtgtccgtggcgccggtctcycgcggagcgcagaactagtaccggatccccagccgcttctgaccacacagacggggcggacctgtgtgagcactcactaactgtcggggctggagctgggcatatggggaaactgggggaccggcacgggttccaggcgagtggacggtgggatggaatccgacgtgcacacccatgtctcaggctttgtttgatggaggctactgtttccacctcatgtcgccgcccctttgcttatggactcttgcagagttggattgagctcgggctgtgtgayatagtggttgttgcagaagccccagggccactttctgactagtaccttgggcacctgacatcatccctttgagtctcagtgtcctcttctttaaagtgagggcgctctacctgaggrgattgctgtaaggttggaatgaacctgcatgtgtgwgtcatgtgggaagggaacagtcagtggggcctggggttctcttggagagctggtaaccagcctcgtccctgaggcaacagccagagggcgcctgtagtttccccacgcatgtctgttagcagttacggcctctggaggatctcctgtgggaggtccctacttctcactacaatctttagagactttggaggatttcctatggaaggtccccacttctcaccacaacattctgggttaaaatggccttggtagggggatgggggctgaagctggatttttttgcttgcattacaagcttctgaaccaaggacttcatgtcacctggacttggattcacatcccagctccttcctctcctagctctaggactgtgtaaccttgggcaaatctcttaacctctttaagccttaattgtttcatctgtaaaatgaggctaacagtacctaccttccacaattgtcgagaattaaatcagacattgtaggtagagcacttaatagttggcattcagcggcagcagttactgttatgttagcatgtggagtgtctgagtgtgtgcacattggctcgaacagccttttgacagtggcacagttggtgcttgtgtaagacagcagggcagagaagtcaaagccctcggttttctagtcaaactggtgggccacaacagtggtgacctaagtctaatgaatcttcaactgaacaaggcagattgaatctycaggtgaggaccaagagtctggggatcagctgcctccacatttttgggcatagaaggctgtacaataccgcctttgttgtaagagcaaggaaccattcagggaaggcaccatgtggtaaggaatagaggccagacgtggattaagaacaaaacaagagaatagtgtttgtctttaagtggagccttggactcaaaacaggatctgagccctgaggatttttttttttttaattgagatggagtcttcgtctgtcacccaggctggagtgcagtggckcgatctcagctcactgcaacctccttcccctgggttcaagcgattctcgtgtctcagcctccctagtagctgggattacaggtggctgccaccacactcggcgagttttttgtatttttagtggaaacggggtttcaccacgttggccaggctgrtcttgaactcctgacctcaagtgatccacccacctcggcctcccaaattgttagggatatcacgcatgagccactacaactggcccttgtgggaaggcacagccatgtctcctgaagttaacaagcactaagctttcccaagtagtgaaatgtcaagcccctgcttctgtcacttatttgttcattcagcagaaagtcactgagagccttctgtgcaccaggcacagtgctgggcagtgaaagagacagacatgtgccctggacccagggagatgacaagtgatggctgtcaggcccagaccctgttgtttgtctgcagcctcttccctcaggcaacttgttctctatcaggagaaacgaaataattattatctggagaggcaggtgggggcgctgctcctagaagactgggacagcctggtagaggttctagcttgatcatgtgagcagtggaaaccattttaagtaggaggttaacaggaccaaaatagcatttaaaaaattgtttatggccactgtgaagccagtttcaccagcgtcacttgcccatgctgggctgccacccagctaattcctggtcctgctcatttagcccagctcagctcacatcacttcctccagaaactagagaagggtagagcccctgaccatcttcacagcattagtcctgatagctgaatcttacgtcagttgttaacatctgtgacctgtgcagggagaatggcagggctgagtttcacctacattgtttccccaatacctacagcagagccaagcacagtgggaactttcagaaagcactggttgaaggaacgctggaatccctgggacttactgcgtagcatgtagtagttgctcctctagaaaagtttcaccttatgaagtatagcaggtaaaatacaagcctggaccacttcccgtgtggtatgcagggaacggttgatggggcaaagggcctcgggctatagccctaggaatttcagggaacctgatgatggctctgggatcctctgtctcctggatcctgcatttttctctgcaggctctgatgctggtgtctggtagaagaaggttactcacagttctgctgcaggctcagaagtggccctttcaaccctccagagacatgagactagtgcagttccgggcaccccacctggtggggcctcacttgggcctggagacagggaatggtggaggggttatcaacctcaatgcctttgaccccacactcccgaagacgatgacgcagttcctagagcagggagaggccaccctctcagtggcaagaaggtaagtaagtgggcagcatcgccctgaagcagctgccctggtccccctgcaccctccccgctctgggaaacagcaccagcaggtagctcttttgcaagggagcagagtaaccccacctttccttttctcccgttctcttaaaagatccttagaaatcttacataataacatcttcagttttcagaggagaaaactgagagctaggggaggtgattaacaatttsaaggccatacatgtggtgctggaaccaggactctatacttcatcacactgcctcctctgggaatgaagtcctggactgactgacgggtctgggcccgggggtcctaaaaggcatcttatgcagctgggggagtgatatagactcccagctcctacaaggagagaggactgcaaggaggttttctataagacacttggttcctgggtttggactagattaggtgagagtgtccctgaagcctggacycctatagaatctggtctaaggagctgatgaacaataaattaaaaatactttaagatgtcattttcatctattaaaatggaaaaaaatacaaatgtttcacagctcacagtattaacagtatgttcccatattgccatattctgcaaagactggaaatctccatgcccctcattagggacttgggtatatctctatagagcagtaatatgcagccacaagaaataaagaggacactctctatgtattgttacatattgttaagcagagatctccaaaatcagttgtttttttaaaagatgtaaatagtatgctatcatttgcatacaaaagggtgggagaagaatatccatagagtagctgcgaagagccaggggaacggggtaaccggaaggggaaagggaaacctttccatgtattccagtttgtatcttttacatggacatgagttacctaagggggagaggaaatcaacactggataaataaaagccctgctctgatagcaaaggacaatagtcagtgattttcacactgactctgatggttgatagagctaggaaatagatttcaaaaagcaaaacctgtagctgctgcaggatctgcccagcctgcccgggattgcccacctgttcccagccagaccctctcacctgctctggtctctacagagccctggctgcccagttgccagtcctaccacggtcggaggtaaccttcctggctccagtcacacgaccagataaggtggtgtgtgtgggcatgaattatgtggaccactgcaaagaacagaacgtgcccgtgcccaaggagcccatcatcttcagcaagtttgccagctccatcgtggggccctatgatgaggtggtcctcccaccacagagccaggtcagtgtctccccactgccctccctagtcactgggcccatcacaagggcattctgagctcagtattgagcctactggagccacctctcgctcaatagcgcattcagcagaaactctacaggattgtacacacagtagtaacactggccttggaaaaaaaaagttaatgtacgtgttttcctggttacaaaagcaatgcaccttcactgtagataataaaatagagataaacattaaaaaattatgtcacccataatcccactgcccatggctcggaatattaatgtttttctgtctaccttcccagtgtttctccgctcctgtatatgtttatactgtacatatacttaccttttacttaagactccatcaggagcattttttcatgccattaagtattcgccctgacaccacggagtttgttatgtagattagtttattcctgagtaccttactgctggatactgtttctagtttttggcttctataaataaatgttgcagtaaacatccttatgtggaaaaggctttgcatgtccattaatacattattatttcctttgaataaaccctttggaatttaaatatgtcagcgtataggcagtatttcaaaatttttgaaaaattctgccaattggccttttaaaaaattgtaaaagcaacttacacatccaccagtagtgtatataccctttctaacactggttactttttctctcagatttttattttagaaatgtcttgaaaattatagaaaagctgggaaaataatacagtgaacactcagataacttttccacctggtttcattgtaaacatttggccatatatcctttttctcccttgtcttctccctgccctccacatggcaaacacacattttttttttttttttttttttttgcagggtatggggtggaggggaccttttaaaacacattggaaatattaagacaatttagtcataaaaacgtaaataggcatcttctaagaataaggacaatggcttgcatgaccatcccaccattatcacaaccaaaaaaattaacttgaataatatttaatatgaaatccaattgccccaattcccaatcggaagtactgctgacttccccaaagataacttctaatttggttacttcgtttgttgctccatgatcaaccaaggccacacactgtattcagttatatctctttagtggtttcaatctaggacagggttccatagactttttcttaaagggctgtattagtctgttttcatgctgctgataaagacatatccgagactgagcaatttacaaaaaaaagaggtttaattggacttacagttccacgtggctagggaagcctcacaatcatggcagaaggcaaggaggagcaagtcacatcttaggtggatagcagcaggcagaaaagagcttgtgcagagaaactcccatttttaaaactatcagatctcatgagacccattcactatcatgagaacagcacgggaaagacctgcccccatgattcagtcatctcccaccgggtccgtcccatagcacgttagaattatgggagctacaagttgagatttgggtggggacacagagctaaaccatatcaagggccaattagtaaatattaggctttgcgtgtcatatgttctgttttgcaacaattcaactctgctgttatagtgtgaaaaccacgatacagaaatgaatgatgggtttccaatcaaagttgattatagcagatgttgagctggccatagtttgccaactcctgctctcaaacaataccccctgccctttccttgaagaatccagttgtctcatagcatgtttcacattctgggtttgtctggttgtttcttcatgattagtgtcagggtaagcatttttatcaagagatctacaaagcagatgttatacattttccatcgtatcccactgggaggctcatgtcagtggtcccagaatttgaccacttggtttagctgacattcactaggtccctccattgtgaagatgcatttctatttttgtaataagcaatccatgggtggtagtttgagatcacataactatcttattgccccatagcatctcatccagggatcctgtggtcatcctgactgaatctattattgcactgggggttagagaacaatgaccttttttttttttgagacagagtctcactctattgtgcagatggagtgcagtggcataatttcagcacacctctgcctcctgggttcaagtgattctcctgcctcagcctcctgagtagctgggattataggcrtgtaccaccacacctggctaatttttgtatgtttagtagagacggggtttcatcatgttggctaggctggtcttgaactcctcacctgaggtgatccacctgacttggcctcccacagtgctgggattacagacgtgacccaccactcccagacaagatcaatgacttctcaatcatgccttctgtttttattggctggcattcttctatgaagaaaagctgcctccctcctttttattcctgtcttcaatatcactgtgaattctgtttttactcaattgtttgtaattcatcatttacattctttaggtgacctcagtttggccagtgaggggccttcaagttggctccattcccgtcacttttagtatatcctagctttctggccaagatgttctaggcttatcatgtactgtctgtcttggaactggaattggccgtttccccaaggaacccagtgctccttagtggggagtggtattagagaccaacatctggatgtcgggtgtacttacaccaactctggttattattagaaagagccaccaattttaaaggccaaattatatctattttatagtgtattttatggattatgggagaggctgagcatttcttcatgttttgtggccatgtccgttacctttttgtgaattgcttactcaagtcctttgtgggagttaatagattaaaacacttagaacagtgcctgacacacagtagggttacatattgctaggggatattacttcgtatttatcctttgttaaaagtatccagagtgacttttaaactcagtgccctggacacgtgttgctcttctgcagtcagtggtgtggggacctgtgcctgcatcccatgatgctgtctgccactgcccaaaatgtatgggtctacaagtcacacctcccttgtcattcactgggctctggttcgtggtgatggcaaacatgggatggcagcgaagccatactgacaaaggttgaggcccttcagcatggtgtgcagcctctcagcatggacagtgggccctgaagccactgcagctcactgttcctctcccaccctacaggaggtagattgggaagtggagctggccgtggtcattggaaagaaaggcaagcacatcaaggtgaggkggaaagggtgggctcccagkccagagtgcagcagaggccccagctcctgcctctcctagttctgaccycactcaccaacacacggtgccagctgtccctgacactaggaagcagtcagcctccttgctccctgacactgcctttcccttcacccacctttggctggctctggctactaacatgggataacagcttwgagatcccttgccayaggtgttggtgtcacccrtgatctaacctcctgtatggccaaatcccctgcccccataggccacagatgctatggcccacgtggccggcttcactgtggctcatgacgtgagtgctcgtgactggcwaayragacgyaatgggaaacartggctgctgggaaaaaccttcgacaccttctgccctctgggccctgccttggtgaccaaggacagtgtagcaggtaggtccctggtccctgcccccttatacctaccattgcacagatgaacagcgcttcagggaggagcatgggttcaggtacatgtggcacctgccctccctggccgccctttsactgctgactccatacagggcaagtctcttatcctcagccacgagttctcccatgggcttccttcccaagccccctagagggaacacaactgcagaggatgtgaaactgcatgcgtgaagtaaattacaaagaacactgagctgatgggtggatcgggcttcctgcggctgccacctctgaaacaatctaagttgagcatcatggagcatagttatcccaaggccaaggcattttccacactacaggagatgaaagccagtgtgactcacccagccmctgtggaaatagaacagcactgaccacacacagtcaggatacagcgccaggatgggggcagtgccccagagggcagagcgcagcctcttacacagccacccacaactgtggtggaggtggggggtgtccacatgggccagccatgccaggataccaaagaccccagtgcctcagcaccccatgcagagtcctcagcaaagttaaattgtgtttcagctgctctacttaaggggggtagaacactaggaccaccaccaacagtaaaaagtgctggttagccaggatgttcttacagtaatccatcccctgccagcatccagtacacgaggcttctctgtcccggctagaaccattgcctcactgctttatagatgctgagtcttttttttgccatggtcttactgtgtcacccaggctggagtgcagtggcccaatcccagctcactgaagcctcaacctcctgagttcaagcagttctcccgcctcagcctcctgagtagctgggactacaggcacgcaccaccacgcctgactaatgtttttattattttttgtagagacaagcactcactaagttacccaggctgattttgaactcctgagcttaatcagttctcgcctgccttggcctcccaaagtgctatgattacagacatgagccaccacgcttggccctgctgagtcaatctacaggtgtcatcctatgctgtagacagatgcccttatttttttcaaggcaaaaaccctagccatttttctcttccccttcagagtctgaaacatcctctcaacccatccctgttactactgcttggtgctcttggtggggatgcggggaggcctgagaaggccaatgtctatacagaaagttctaacatagagcactgagtcaatgtgggcactttgaagccctttcacctgccaagtcacgaagcacccctacagttgtgtttgtaaaatattggggggtttgagggggaaaagggataactccaaggtaccatctttgcatttcagatccacacaacttaaagatctgctgccgagtgaatggggaagtggtccagagcggcaacaccaaccagatggtattcaagacagaggacctgatagcctgggtctcccagtgagtgacaggggctgtcctgccagccccgcttcacctgccacacatgtggaggctgacctgagccctccatctttggctgtggccacctcagccagcccctggtctcaccgggtccttctgctttgatccaggtttgttaccttttacccaggggatgtcatcctaactgggacccccccaggtgtcggtgtattcaggaaacctcctgtctttctcaaggtaggttagcgaaaagcaaagagcaagggccccaaaggcctggcaggcttgcctcagacttgagaagtacaggcttgtgtatgtgtgtctgacggaagggctgacactgtcatggcctgctctgttgcagaagggggatgaagtccagtgtgagattgaagaactaggtgtcatcatcaacaaggtggtgtgatggctcctgcacaggccctgcacataggatgagggcatctgctcccactcagcctagcccagggaaaggcccagtgacaggtgtggacaggtgccagccctgcaagccgcctcttctcggtagaagggagaaggacagagctctcttcaataaattcgtcaggtcaaagcagcagctttgcttctgctgtttgtcttcttttgggctttgtttcatgggacaagttggggcattttgtgggactggggaagaagagagcaaatacacacacatatgccaaaaagatgctgctgggctggggaaaagacaattcgtgtcgtccccttgtttatcacatcaaagaagggaaaaagcaagagatggcaagggacaatcaagcctcaatgattatatttatagctaagggtttgcagcctcctctccatcttctggctctaggacacagctgtgttctggggctcagaagtctcagcacaggctccttctcacagttctagctacaagtgaactgccggatgaactgttctagtttttcctgattgtccaggctggcaaaagtaggggacaggtggagcctggggcctgcagggctcggcgtctgctgcagaacctgggccatggaagatgggccgtgagtgcactcaccacagggactgtgtccacatggcccaggggccaggcctgtcccccagaaacctgccttgagacctctgaccccttaggcctcagtgtttgagtgcaaatgctgcctcaaagcagccccaataccccacctagaaggatgagccagtgatttgggagaccaagaggcaggaaaccatcccaccttctccaacccatcaccacgtctattgctggaagacaccaagtaaatcccagggtcttaatgaggcaccatcaggccagccctgtggggtgatgggaacatagctgggtttccctgagccactctattggggtgggagcagggggacagaagatggtgacactggctcctctcacccctaggtctctgaaggtccagatagcactgatggcaagctttgggtctgcacactctggaaagaagagagaagtgaaggctctaggtagggaggacagggagacactgggcacaggcttctctcctcttgtttaaagaagcccagggagggatagatctccgactggacagaagactactctgcagcccgccttcctagagttgggttgtcactgtccggcagggggcagcagccaccagcaaacaccactgcctgcaggagcctgggctgactggttgggactcaccaaagatcccttcttcctgggcggtggcctgcaggaactggaacagctgttggagaggagaagaaaaagaagacatcaaaaagaaaatctagtgctgggtggatatagagtatgaagatgtggagctgggaaaacagaggatgtggtgggatggggaaggaaaggttgtggaaggcctgcaccccgtctcagttcctccactgcttcgtcccagattctgtttttgttttcctgaatcagacttagtctccctccattctcccgtcccctgtgtgcccccatcctggtcctgcctcactggacagcctctccgcggccttcctcctccctgctccagaattctacttggtgccccccaaccccactcgactcattgtccacctggcctctgaggccaggcaccctcattcccctctcccacccaccccacccaaggaagcccagcacagaccatctcatctcactccaccatcacttctttgccaaatgcatttccaaacaccctcatgagctttgctgatctctttgccatctctccctgccccactccgatggctcctcctgcctggtgaagactgccctgggtatcccagaactgaacctgcagcagccagcacagctgaccttggggcgataagcagccagggaaaggctttcttaaaaaaaaacaaaaaacaaaaccaataactcagtaagcagattaaacaaaggtagagacggagccctccacccctctcacacactcatcctcacacccagctataccacaccccacaaatgttgcttatgtttccttggtcattctgtccatcctcctgtctgtccaaagccaaggacactgctctactctaaattttttgtcccgaagcccccaaatactgcaaccctgacccaatgcacgaagccaccccaaaatacagcagaggacaccaggactttcattttccctcagtatggcccatcctttgggtatgccaactccatgtccaccaagcactgcatgtaggacagggcacagtttggaggccttggtccagccactgccccagacccaccttggctctctcctcactaacacccgagaagcccagacttcccagtgtttagcaacagattaaactctaagccaacaacaacagaacagggtggagtgagtggaaagcaaatgaaatgttaaaaaaaaaaaaaaagcaatacttgcattctcattagtaggaacatgtgagatgaagcatgttatgttattaggcattctcttgattcggtaaacacaagctgaataaatttataaatatcagcattaagcgagatttaacggggagctgtttatcttctgcctgtcaggcaggcggcaacactctccatgtatcactcgccagccgtgcagtcctcactctcttgcccaggtaagctggggcagagcctgctgcagcccagctctggttgtggaagggctggcaccaaggagctgcgagcttacctcaactcatctcacctcaccatgccggctgcgaggcggcccgtgcagtccgtgcgcaggaggtcacactcccatgctgcatcccagcccctccagaagcagagcatgacctgggtgactttgaggatgctatttaacctctctaagctaaagctcctcgactgcagcatcaacagatcagtgccgacctgttaaggccgtcgagagcatcaaatgctactgttcagcaggtgcctgacacatagtaggtccacaagcaaatgattttcctgcttgcatcatttctagcacagagctggaggaaatggcgaggtgcaggtggccgctgggccctgctgttctacatgggagcaagacagctgctaggtgaaggggaatgaccaggcagccacagggaggacatgtggcctcaggaagcctgggtgtgtatcctggttctgctaggaacacgtgtggggctttgtgtgggtgactctctggctccccaagcctccctttcctactgttatatccttaaagtgcctctgaggccaaagcctttgtggcaattgtcaaatgagtccatatgcagtgagtaccgtgttgagggaggacaaggtcaccaagagctgagaatgtttctccgactgatgagacctagatattgggtacatggaggtccccggtccctttgtgattcctgcagcctgttgcctccttgcctggaccccgcctcagctcagaaagccaattccctagattccaaaggccttcccagaccaattagcatgtcctgcagctgtcagctccctgtgcctagcctggacctcagctcatgtctagcacccagtctcccaaccccacacatattcacaaataaaagaaaataacaaatgacatgaattcttcactcctggtctggcttgctgtgtgtaaactgctatgacaatacaagacgcagaggcgggtacccaataaaagctgttgaaaatgtgactgacaccgagtttcagctatccaggaaggcacggatccttacaaggtccaagcagagtcctcgagaatagttgagaattcttgggttccatatgaactaggagatacccacacaaaggcttggatttcccaatacataactacccctgaacactccttctttccctcgtctctctgctgagacctctagaccctaaggatccacccaggacaacctctccaaaggtaccctgatatgcttttcttccaggcagcatttccacagagctgtgggtgaaagtcacaggatgaaaatgtgccatgggactgtatctcccaccaacacactgcaggcaaggggcacacagagtgccccctctgcccatcccaggaatggccatctaagaatgatgcaatcttttctaaaaagaaagtaaataaaggcaggtgccatataagaagaccttgggggactatagggatgttccttaatgtctcagaacatctgcctccatcaatgaaatgaaggattcaaagcagctcatccctgagttgaccttaatgctgaatcctaaacatcacccttaggatgctatctggctaggcagggaatgaaggatctgggagctgagttgcaggaagctgcagcagcttcccatttacagatcctctagtgccagtttttcaggcttcctgactaagagaagcagccaggcaaattccaccattcagctacatttacaggaagctggctatttgggaggctctctaccagaggctttggggaaaaaaatgcagaattaatgtaaagatcacatatttacctatgagagaaaagatatccaaggatgcccttcggcctcatttgatctaaaactaggcctggagctacctaattgtcaagtcagttcaggcttctataacaaaaatactatagactgggtggcttaaacaacaaacgtctatttcacatgctgctgaagggaacaaccatggtcaggagcatgatgagggccctcttcctggcttggaggtggccatcttcttgctgtgtcatcacatggcagagagagagacagagaaagaatgagaatgagaggaagcaagcagtttcatattttatcttataagggcactaatcccatcatgagggctccatccycatgacccaatagcctcccaaaggccccatctccaaataccaccccactggtagttagggtttcaacatacatttgggagtatacaaatatgcagtccacaaaacaaatacccctaagttgtctgcatatgtatgcttgttctggtgctgctttgagtatctcagacgatagaatcgagtgtagatcaaacttctctaggcctcaatagggtgaatctaaagattgggtcacaataatggcaataagccacaattcactggattaatctcacctactccttcaggggcctatccacattcaaagtaccacaagtacctgtagaagtctctgagcagtatcacaaagactgacatagatacaggcaaaatagaaaatggatagatggtagtatggggttgggggtggttgtgtgtgtgtgtgtgtgtgtaaggaaagaggatgtcttgtacttgggatacatggggatatattgtttttgaggctgtttggtggcaatacttgccctgagctcaggaaacaggccagagagatatatctgttccctacttagaagagagcactgatgcatgaaggttgggaggaggccagagaatagtgtattgaaagaagagaatgtgaccaaggccccaacattaaaaatgaaccttgaattggagatggggaatgaagaaaaagtcagagaagagggcatacgtggagtaatctgaaagacaggaagagccacaggtgtgcacagtaaccgggatgtgaggttagtagagagcttcaggaaggagggaaaaggcattcatgacaaacactgcaggacactcacaaagatggggaatgagtaaaagccatcgagcttggcattgatgaccttcatgggaaccatacaaggagaaacctgtggaatgaaacctaactacacaaagccaaggaattagcagtaaggacattaaggcggtcttatgggttaaatcatacacaccaaaaatatgtcaaaattctcatcccagtacctagaaatagaatcttatttgaaaataaagtctttgcaggtgtaatcaagttaagatgaggtcattaggattggtccttaagccagtatgacttgtgtccttgtaagagagagaaagatgccaagtgaagacacagacatacagagagaagacagaagatggagatggaggctgaagtgatgcagccacaagtcaaggaactcctgggttaccaaaagctggaatagacaaagaagtatcctcccctagagccttcagagggagcaaggccctgctacatcttgattttgtaagccaggtctccaagattgcaagagaatgaattcctgttgtctgaagcaacccaatttgtgggacttagttatggcacccctagaaaactaatagaggcagtaagggcacttttataagaaatgtgttcatgaagagatggagttaaatgcttttaataaagagaatgtttgcttttcatggacatacttgagaatgtttacagactaagaggaaagaatctagagacagagagagagagaagttgaagattcaaaacaatggaaggatggttaataaaatatggaggaggaagaaaaagattaaaaggagaactcaagtggcataattggcctaaaaaggtgagggacactttgtcatcctgggtgaggtgtcttggcctagatcctatagaaagtagagcctgaggcaaggattgaagtgctgacattttatgtgggggaagggtgcaagttcaggacaatgaaagtgaggaataaatggaagcagatggaaggccctgtgatgaaacgcattgctatcctagtggcaacttcacaccaagctgcaaagatgctgtattagtcagagttctccagagaaacagaattaata

SEQ ID NO: 94511 - DNA, 101001 bp, Homo sapiens
  misc_feature (1)...(101001): n = A,T,C or G
ttccttatctgtgatataggtatactagtttcacctgcaaagggttactataaggatgaaataagttaatatttgtgaagtatattgaactgtgcctggcttatagcagtactatgcttgctgattaaaaattaagtacctgcactgggatacagtgctaggagccagagcacaaagaggagcaagaccaactccctgctttcatgacactcacaatacaaaagacagatgaattacttttattcctttaccaaccatttcagaactaagaacaaaaacatgttttaccattactgggtacccaattctcagtcaatattaacataatattgagaataacatttaataaaaagtaatgttttcattaaaacatattcagagtagggaaacttattaaaatatattcaagaaagcgttaacttttaggaccatgagctaacttttaggacaactgtggaaaagagactgaaaggctgcttgagacctcccacatttagatctaagatgttatgatgtctcgatcacaggaggggcaaacccactaaaccaatggttcatttggtgttccagtgcagttccaggcacttccctgtaaactgcagcttcacaaactacatcacatctcgaagaagatgttcatgataatgccctaagagaagccattagagggagtaggagtgctaggcttgaaaaagactatactggacagtatttttttttttttcccagcttggaaatgttctctgatttaggggaaacaacatgttttcctctaggggacagtgtgaagaccagatttcaacaaacccaaagtgccagctaagagggctctgggctgtcttccaaaaagagaagatgactgaaaagagcattggctttgaagtcagaagggctgagtaccaaccccatctccatggagccatgagtcttctaacattgccccccaaccacgtctgcaatctcttctcaggttgtatttcagctggatgttgcacatcctttgcacgtgtgtgcgtgtgtgagtgtgtagaagcactaggggatgggggaaggtggggtgggagtgggggtgtcttcctgcttgaaaagcttttctttctttttttttttttttttttgagatggagtctcactctgtcgccaggctggagtgcagtggcgtgatttcagctcactgcaacctccatctcctgggttcaaaggattcttctgcctcagcctcccgagtggctgggactacaggcgcgtgccaccacacccagctaatttttgtatttttagtaaagacagggtttcaccacgttggccaggatggccttgctctcttgacctcatgatccgcctacctcgacctcccaaagtgctgggtgtgagccaccgtgccaggcccaaagctttgcttttctttgagtactcagtcaacctttttttgtcagccttttgagtctgcttttccagactcaagcagaagctgatcacagtgattaacgagacattaccagtccattcagactataaagtataaccatgtataaatttcctcacctactacaattacatattcatctgttgttcacatggtgagtctttgaggacaggggtatgcatctatttacctttctccttgcagcacctggcttctaaatatatgtgggctgaatggacaagtgttttccaatagtgattatcacatggcatagacatacttggatcaaaggccctaagtgttgggaattacagtcacagcagccacttgctactgaggcagacatgcttctccatttcaacaaacacactgccaagataatcatttctctgatgtccaggggaatctatccataaaatggttgctcttttgcaactgaaaaggtgttgcatgtgacacagtattgagtgtggtaggcagaacttaaggtgcagattcagagaccgaagacttcacatttctatttttttttttttttttttttgagacggagtctggcgcttgtcccccaggctggagtgcaatggcgcgatctcggcacactgcaacctccatctcccgggttcaagcgattctcctgcctcagcctcccaagtagctgggactacaggcgccctccaccacacccggctaaattttgtatttttagtagagacagggtttcatcacgttggccaggctggtctcgaactcctgacctcgtgatccgcccgcctcggcctcccaaagtgctgggattacaggcgtgagccaccgcgcctggccacacatttctagttctagccctcactgtccccttcctcagggatcatcttttttttttttttttgagacagcgtctcactctatcacccacgctggagtgcagtggtgcgatctcggctcactgcaatctccgcctactgggttcaagcgattctcctgcctcagcctcctgagtagctgggactacaggcgtgtgccacctgcccggctaattttttttttgagacggagtctcgctctgtcgcccaggctggagtgcagtgatgcgatctcggctcactgcaagctccgcctcccgggttcacgccattctcttgcctcagcctcccaagtagctgggactacaggtgcccaccaccatgcctggctaattttttatatttttagtagagatggggtttcaccgtgttagccagcatggtctcaatctcctgaccttgtgatctgcccaccttgacctctcaaagtgctggaattacaggcgtgagtcaccgtgccgggcgtaatttttgtatttttttagtagagacggggtttcaccatattggccaggctggttccgaactcctgacctcgtgatccacccgcctcggcctcccaaagtgctgggattacaggcgtgagccaccgcgcccagacaggaatcattatctttgcgtggcagggcattcattcaatttggatttttgcagatgatgataatttatacggtgggtattcaccatgctatcaaaacagattaacttttgaacttctaagaaaacactagtcagtgcacccaccaaaccacaatttcctttcctttttttttttttttttttgagacagagtcttgctctgtcacacagtctggagtgcagtggcgtgatcttggctcgccacaacctgtgcctcctgggctcaagcgattctcatgcctcaacctccccagtagctgggactacaggcatgctctaccacgcccagctaatttttgtatttttagtagagacggggtttcttcatgttggctaggctgatctcgaaatcctgacctcagctgatctgccctcctaggcttcccaaagtgctggaattacaggcataagctactgcacccagccttctttcatctttttgtctttcatcattttatgtgctgggctttctttttacattttatttattttagtaagaaataacttccagtgtaaaagtatgtgtaagtatgccaccttctggataacaagagggggtaaagatacttatatgtagtttcttgtaactctgcagaacatctttgtaaggatacagaggaatgagggaacactggttacctcccaggagaagagctgggtgtctagcaggcagggtgagaaggggactttttacttacacccttttgtatctttgggggtggcaccatataaattatctcacttccttagatatgcaacacaagctaataattttatgtctaatattttgaaggtgttattcaagtgccttcccatgaatgttcctgccaaattaacatagctgagggaaaatagggcttaggtacttggtcagtaaatgacatctgtggactgtgagggaggaagttcaactcagttgtctaacatctcttgggttttatggtcattttctatttttaaaattcttttattttcttcctgattcaattaacaagtttttatttagtgcctactctttgcccagtactgtcctaggaatcctaggagatataaaagaagccgtcatgaaacaacttttacagttcttgccaagtgtggagatcactgtggaatggtgtggctagaaagtcatcctggaagcagagtcttacttgcagagaagcagaaggcttagacaagtggaaagagggcaggaggggctgctggccaggggcaaagcttgacaggggcagaaagcgatataggtggtcagagaggcccgtttggaaagtccctataggtcaggcagaagaacttaaccttgggagtccattaagagtgataagagaaggaagcctggtattagcaaggaaataagagagaactgagaaaccagatgccaggagaccacccttgttgcaataatccggatgtaaaatgatgagggtttggatttagaatgttccagggggaacagaaaggaaacaaagaattcatgagacatttcaaaggaggaaataccaggtcttgatgacaggctggagatgataatgggagaagtcacacatgattccagtttttctaccttgggaagccagcaaagtgacttctttttagatctcttttctttgctcacacacaaattgaccccctcatagagttcagttgaaatatcaattacaaacagaattgatctattttttttcccttagaaacacaggtaatcttatttgcctttagctaaacgacccaagatgcaccttgctgggctttgctcttggatagcactcatacctctatgacaatgctccccactttggccttgtactgcgtgtgtggtgtgcaggtgcgtttatcacccactaaaccaaaagtccgtgttgtgcagggaccacgtctcatgcagagttaagtattcaaaagtttttgttaattgtttaagaaaatgagatttacatgaaacaatactttaaaaagctttccagaaacaacagcattaaaacaaaatcactgaaattaaaatttacataaattaaaaggttctgtgttccacatgccaagaaaagatcttacactattgtaatagtggtagggtcacacagttttattcctcagcttaagtgctgcaatacagtaataatgcagtacaagaatactgtataataaaccttaaacgaaacacttcatatatactttacacaagttattggatattgcttagtatttatttcccccacccctgctgtgcaaagatattaatatccctcttttataggagaggaaacaggtaaagagaagttaagaaacttgcacaaggtcatccagctagtaaatgttggagctgggatttgacaactttgtcaagtctccatccttaacagttctgctctatattgcataagcagacagctcccttttggggactgacaggttatttgaggcatatgaaccatttttggtgggggggctttcccacccagtactggaagtgtctagttatatggggcataaccttaggagcaagcaggaaaagaagaaatgtattccaatagtgttcagaaatataccagagtaaacgaataaccatcaataacagcattttacagcctacctaataacacaggaataaaaccctttatctggaacctaaataataccccctccactcattttattaaaagccttgctttatttggaaactcttaaaataagtggtcatacgattaaaaaaagcagcggcgcgccccctccccggcggccgggcgcagctgtccgcgcctcccccgcgcggctgcccgcattccaactctctgaggtcacgggccgccgccgcctccccggatccgcccgcccggctcagggggagggacgcctgggcccggccgccccgctgctccggccgcgcgtcccgcgtcggtccgacggtctgtccgtcctcctgccaccccccgcccccacggggcttctttgtgcggcgctcctcgccggccggtcccacctccaggcctcgcccctcgccgtcgccaccgccggactctgcccaggggaatggtctgcgagccgggtttttggagacaggaagtgaggcgtgcgagccccatgagcgcgccgcggcccgggctggcgtgcgggtgcggctgcggcggccgcgcggcggggccccgggaggcgggtcgctgagcggggcgckcggccccgaggatgcgggagcgggagcgggagcaggtgagggcgcggtccccggccggcgggaggggcgggcggctggcccgagcggyggggtgtgtccactcgcccggaccccggagcgcgcccgcggccccggaatcccggagaatggggcgcggcggccagacccgtagcgggagcgtaacaaagagaaaagtcttgtttttcaggttcgctctcatatacttgagtaatttctaaaaggagtcttgaacttctattccgaacgccctggccgattgttgcgggttaattctggatcaggsttttaaatgtgttaggcatatttgtgcctctcagaatatataaacgtgaaattcgccagataactttggcgagaaggggcgcagggaaggactgtttggtaacgcctgggtttgtttttggagtagagtatttactctggaaacaagaattcttggatctgcaaattccgacttgtgatttctgcaaatcctgattagattggccgctcttggcatgctcgtcctattttcttttttgctragaaagccttatactaatagcgtatgctcacaaacacattcagaacattcgtgtgctccaagtgacaactgctgtatgcctaatagttgctgacagtttatttatttttttaagtttgggacacgacagtaattttactctgaatatagtccgtttcgtttctagggcattttattctggagcatctacgcacagatgttttctccgtgagaaacatgggtttaatgctatagctatagatattactctaaaaatgtcacatactctctccttttagtgcttattttattttaaagcaactttggcaaaattacatgtggtaaggaccttaataggaaaggggaaacgctgtaagattgagaggtaaagtgtatttgaggaacttttggaaagggttgtagagagggaaaattaaaatgaattcacaaatagttcagactgccttttgtaaacttgtactgaagcagaatctagtatgtatctgtttacttaccacaaaacggaaagattttgtagagaaaaaattatatcctagttttcctttaatagctatttataaattatgtttactttagtaaattataattccagacccaatcactttcatattattgcatattattttatacctgaaacagacctccccaaagaactcttaaatttctactcatcttggttttattatcttcagacattcataattgtattacaccatttggcaacaaatactgcatattactgaaaattaagatgtataaatcattgataaatttgtaaattattaaacaaaatcattgttttaacatagtgggttttatataaataagcaaaaagcaagccattcttatggatagatcttggggggatgcaccatgtacacacacactgcaactttttcaatttcatctaccaaaataagagataattttgacttttcctttatccctgatgcagtaatacatttcaagtctgagggacaattgaaagttttactgagtttgcttaatcagagcttaagttaataattaagttatacagtgtagtatctattgctttcaaggcatagttctatgtagtgaaaagactaccatatttgaatggcacctaatacaaatatttatctttcctctacacatatgcaatatcttgtctgttcatctacactacttaatccgcccggtttccagttaccataatttttatgtaaaattgaaacccaccatctgatctcatgaaagggtgtttagtatgcatatttataatccttaaatatttactcttggtttatcaattttctagttaaaagcttattatttaaagttgtcatttgctaatttttttccatcttgctttacttatttagtttatacccctgaaacagcaaagagcattgaaaactactggaagtggaaaccatatcttttaatacttattttctgtttccctccatagtatggtgcttttacctacagaaggcactcagcaaatgcggttaattaacacagtgctttaggtagttgcagcgttgtttttttcttctggccttcccctatcccttgtttttaatattttgattttcctggctatgggaaataaccagagctcaaaacaaacaaaaaaactagccagataaaaccgtggttgggtccttattagagatacagctctgtatgtaattatagcatggttgtaatctctttaaagacagcgacggtttagggattcgtcttagatttctcacgatgctcattacgctgtcttgttcccagagacgcantacacatttgtggaatggaatttcaaaatgttaagtttggcaaagccgagggtagtagcggaacccttttctccaggtctgccattccctaaccctaagtgccccatcacctctgggcctgagacgcagtcaggagagcaggacccaggagaggactgggactgtggaatttgggatcgattcccagctcagcccgtcctagcgtgaaactgcgaaagccgcttctcttcctgaagcctgggttctgtctgccagatgagagggtcgggaatagatcttgcctctccgcgcggtcccgggccggaactcagcgtagccagctatggctgggtctcgctaagcgattcatccccaacaggcaatctctgcgcagaaggaaggtagggaaccgtctcaggaccctggaaatgtccgggattttgtagactcgtttagggggaaaaaactaatccagctgatataaaaatccccagctagtgctcgccccagaaaccatcaacaggtctggttaaaaactgttagagcccggcttggtggcgcgcacctgtggtcccagctactcgggaggttgaggcgggaggatcgcttgagcccaggtgttcgaggctgcggtgagctacgatggcgccactgcactccagcctgggtggcatagcgagacttcgctctataaaacacgttgtaaggagcgtattttgaggtcctgtggctccaaagcgggcatcctatggggcccgcccarcctctccaccgccagtagggcacgcgctggtccctttaaatgttcccttcgggagccgagggaccggtccttttagagcgcgtccgtccagaaacgcggctgcagaaagagggttccggggcctccgagtctactggttggcctggcaacgccgcgtgctcttcccaaggggaggacgcgggagaagccggggcctgagtgctccaaggccccgtgggcttcttgggtttgttgcctccggccgctcattaactcaggatggcgtggaagacctcgcccgcctccccttctgggccgcggctccgcttaggtgaaggcctgtttgggcgtccccaccctggagaggggccggggtctggattttcagaactgccactcttctagtggtaaatggataacgagcatttgtagggtcttttatgatgtttatcagtaaatcaatttgatgacgtaaatacttccacaagcgcttgttaggcacctcaccgggtttgaatcacacacctgcctttcttagtggggattattcctcccatttgccttcagggttaattttctaaagggattgggactgaaacctagctcttttggggccatttggcacttttctcacttaaggactaaagaactctgacatttggagtattacaacctgaaagagttacctatgaaaaaacaacaccttatccaaaataggaagaggatcacaattactaactacaaaatttrggattatagtagtgctggctattatctcatttaatcytgaggatggcccagtttgctatccctatttgtaggatacagtgaagggtggagtctgaccctgagcctagcacaactctgagataaaattccaccctgccttccgggtcctgttagtgccttttttccagyggagagggacggcttgttctttggccacagcttgactggcttttctttatanaagcaaagcccagcgttacgtttrcttaactaacggcgttcctctttccccagcgctggcgtcaatgctcccttcctcgggccattggagactccgttgctttttaatggcggcagcggctgctgggtgagcagctggaggccggacagtgttcgtcccatmcggagaggatcgctttctcctggcgtcaccagcgctgggttggtgggggtagcttttccctctttgctcctccattcttgaagaaagaagaagatgccactgccatttgggttgaaactgaaacgcacccggcgctacacggtgtccagcaagagttgcctggttgcccggatccaactgcttaataacgagtttgtggagttcaccctgtccgtggagagcactggccaggaaagcctcgaggccgtggcccagaggctggagctgcgggaggtaagccacctaaagacactgcaggccaggcgcgggtggctcaagcctgtaatcccagcactttgagaggccgaggctggtggatcacctgaggtcaggagttcgagcctagcctggccaacatggtgaaaccctgtctctactaaaaatacaaggccgggcgcagtggctcacacctgtaatcccagcactttgggaggccgaggcgggcgaatcacaaggtcaggagttcgagaccagcctggccaatatggtgaaaccccatgtctactaaaaatacaaaaattagccggacgtggtggtgggcgcctgtagggtgtggtggcgggcacctgtcatcctacctactcgggaggctgagacaggagaatcgcttgaatgtgggaggcagaggctgcagtgagccgagatcgctccactgcactccagcctgggctacagagcgagacacctgctcaaaaaaaaaaaaaaattggctgggcgtggtggtgggtgcctgtaatcgcagctactggggaggctgaggcaggagaatcacttgtacccaggaggtggaggttgcagtgagctgagatcacagcactgcactccagcctgggcaacaaactctgtctcaaaaaaaattaaaaataaataaaaaaaacacgacaggcttctctggcccgcatgctggctgtgtgttctagcccacgggccactcactgtgtgtccctggctgggatgtctgagttgagcctgtagtcccctcctcatgaagcaggaatagattagattaagaagtctccccttggggtgccctataagaactaatggttcttattttgaatatgtttatattccccctctaaggtaatccagaatcaaatgtgaatacactttgggttgttcaaatttccattttctaatatacccccaaaggtcatcctgatctctagtacagtttactgacttcattctttcttttttgttcattttaatttttttagagwcaaggtaggtctagctatgttgcccaggttggtctcaaattcctaggctcaagcgatcctcccgcgataggcatgtgccaccatgtccggctcttgacttcgttctttcaacattcattgagtaaaattcattgactatattcttacaggccagatcgaggttctagaaacatactgcctgaactcagtttgagttctagtttcctcaccatctgcttctgttaccttgggcaagttatgtgatatctctgagccccagttctccatctgaaccatggggatgactgtgacacctaattctcagagtagcataaggttgtaagctctgctaactagtctattagagtaccgattgggaggtttgcccaggaaacccctaatctagttggtaggaagttatggagtactcatgtatccatataatgtcttaaatttaaaatgttatgcaaggcctgtgaagaaaggtctctaattaaacctaggaccctccctacctttggctacctggttcttgggtaagggaaagttagagaaactggttattccacctaaaaagtcaggaatagatgaactttgctcctggtgaccatccaatcacttatatgatcactcagtactgaagatgcgtaagtgccaagcacatacatacttggaagctcaccctagtgttgttgccagtaagaaaacaggcatgatgcatgctgtgataagggaagtagagggtgtgctataggccagagggaggtgcagcaaagggaaggctgctcagggaatttgattctgagctgtgacctgaggatggggcaagggagtcctatcaagggctggaggagttccaacaaagagaactgcacaggaccaaagacgcagaggaagctggtctgcctgaagcctgaagtgcgtggaggaaaggccgactgtaagggccacacaatgaggattttttgttaaaggatttagatttatcctgagggtagtggggaagttaatgaagggtgtaaacaggtgtggtacgattgtttctgtgaagagtgagccctttggagaatgatttgaggggagtggttcaggtacagatggtagccacctggagttggatagggttggagagaggtggttggaatctggatcaggacctaccgagtaatagagaagggwtagcatgggtcctggttgatattcaggttttcagtagatggtggggctataacagagaggaaatgtgaaaggaagtgcagatctattaggggcaaggaggagcgtgtggtgagttcagttttagaaatactgagtttgaggtgccagttggaggttttgaatagacagatggatctgctgatctggagttcaggcatgagatccaggttagagggaagatattgggaagtatcagcctaagtgagttcattaaagccagaagatggtatgaggctctccaggggagaaaaagaggacatcgcagacccctcatggtagattagaggaggggaaagtgttggaaggaaactgagatgaaactgccgaagaagaagaaagaaaaccagaacagcaggcctcagtaaccagtccctgcttacttgcatttattcttttttagggatgaggtctcactccatcacccaggctggagtacagtggcaccgtcatagctcaatgcatcctcaaacacctaggctcaagtgatccttttgccttagcctgccaagagctgggactacaggtacactccaccacacccagctaattttttttttaacttgtgtttttgagatggagtcttgctrtgtcgcccaggctggtctgggagttgtttcctctagttatcttcctgcctcaactttgtgagtaggtgggattacaggcgtgtgccaccttgcctggcttagtggcttatattctatttatttatttatttatttactttggttgcttcgactttttttttttttttcctattatggtttcttcttcctgtaattttcttcctcgtgcaccaggtctgtctataacgcctagagagtcagcttcttgaggaactgtggtttatttatttttataccaggtgtggaatgtgttcagtaaatacagggagaactgaacccacaggcattgccttccttctgttaataagtccagagaaattgccatcccttgttagaagttatcagtctcagggaacaagtaactttatatagctgtgggtatattttgagcctgatttttaacagaagaggaaacaggcatggtccctagaaaatgttttgcctgtggagagtctgtcccacaatttccaacataaatgtaacagtcatgggtagaaagtttgtatagcaaactttttctttgaaagccccagaagctctgctctgtagcatataaacagatggctcaggcatcaggcctaatcttaacaaatgactgttcagaaataatctgagtggggtcacacctgtttctagtttgtacatatagtctctgtgtgattcataccaagaaatatcagtatgttggtttcttgcactgttctcccaccaagcaaatctggaattatcgcatatagatttgggtggaaaactttgctactgtccaaatataaatggagggaaaagtccctcttgcttaattgaataccatttcacttctataatgacaattttttttttttttttttttgagatggagtttcactcttttgcccaggctggagtacaatggcgcgatctcggttcactgcaacctctgcctcccgggtccaagcgattctcctgccttagcctccccagtagctgggattacaggtgcctaccaccatgcccggctaatttttgtatttttgtatttttttttttttttaagtagagatggggttttatcatgttggccaggctggtcttgaactcctgacctcaggtgatctgtccaccttggcctcccaaagtgctgggattacaggagtgagccaacgtgcccgggcctataatgacagttacaagggccgcacaatagtataacactatacccaggggtttcagctatatcagtagtgtttcttacactgggtatatgggtattttttttgtttgtatttttagctgtcatatttttacaagtgtctaagatattttgtattaaattaaaagcaacgtggttaatatacatgtatccaatgtagttaacttaggttgctaactttcttttaaattcaccatatttgaactacagaaagtaacttctttttttttttttttttttttatttgagacagagtctcgctctatcgcccaggctggagtgcagtggcgtgatctcggctcactgcaacctccgtctcccaggttcatgccattctcctgtctcagtctcccaggttcatgccattcttctgtctcagcctcccaagtaactgggactataggcgcatgccaccacgcccggctaattttgtatttttagtagagatggggtttcaccgtgttagccaggatggtctcgatctcctgacctcatgatccgtctgcctcggtctcccaaagtgctgggattacaggcgtgagccaaagtaacttttaaaaatgggaaaatgaattattcccttaggaaaatattgctgttcgttatagcagtagtttctcaaagctgttgaaattccctgcctatcattcttctgagtttcaaaacattttttcaagagaggctgtgagtccttgtggaatttaaggggagctagaaaattttctccaattttaaaagcatatgctgtagaggcttgaaggaggtggtgacacaagtggccacctgggcatgggcactgcctggggcatcaccttgacggaatcagcacaatccagagtgcaagagtcaggctcaaaaatctcatgtcatgggaagacctgatttaatctagctcgctaaaaatgatgtgtaaaaccaggacccaagtttagtaatttataagcagtaaggaactgccaagggtcccaggtatgtgtgccctctgcctaggccaagattttcctatagttagggcacatgggaaccagaacaaaccagaagtttcttggtgaacatggaatcagaagaatgttaccttgaaaaagtagatattttcataagtcggccaggcgcagtggctcacgcgtgtaatcccagcactttgggaggccgaggtgggcagatcacctgaggtcaggagttcaagaccagcctggcctggccaacatggtgaaaccccatctctactaaaaatacaaaaaaattacccatgcgtgatggtgtatgcctgtagtcccaactacttgggaggctgagacaggagaatcacttgaatccgagagacagaggttgcaatgagccgagactgcgccactgtactccagcctgggcgacagagtgagactctgtctcaaaaaaaaagaaaagaaaagaaaaagtacatatttttataagcagagaattgctgcctccaggaccagacaaattcctttgagtcagggcaccttttcctctgcgcggtgcttcagtggtgcttcagtgcctgtctgcctcttgagatggctgcttagtaaagtggttaagacagtctgcagtattcagaaacacctaggttgcatccaagtgctgtcatttaagtaattattaaatcacttaatttcccaagttcattgatttttcatttgtaagttggggataataatagtacctacttgatagtggttatgaggattcggtgttaaatgtaaaacatttagcaaaggacctggtatttgggaaactctcaataagtgttcttctttattaccatttttgttgatgttatgttattgttattagtgactcctatcccctgttgtagtaactgaccaaattctcttcataggaattcttttcttttctttttttttggtgagatggagtcttgctctgttgcccaggctggagtgcaaatggcgcgatctcggctcacagcaacttccgcctcccgggttcaagcgattctctcacctcagcctcccaagtagctgggattacaggcacctgccaccactcctggctaatttttgtatttttagtagagactgggtttcactatgttggccaagctggtcttgaactcctgacctcaggtgatccacccaccttggcctcccaaagtgctgggattgcaggcaggagccaccgcacctggcctaaaaagttttttaatcctcaggatatggggaagttgtgaaaccatggaagtctcttcaaggttatttttttcatgtttttgctgtggtatattgtgttagttttataacttagaggacagttttctttcagctgtttctgaggggggtgtgtgcatgctggggcgtctttattgttgttcccatatatggccttcatacataactattgttttgaagttgagttaaatactgagccactgctaaaaattacctccagggtattttgttgaagatgaaagtctagcaaaatatatatagtggcctctcatttcttaattataggctttggtttatcatagatctttacgaaatgttttttaaattgtgtgtttagtgcgttacacacaatgtcaagtttttgttccatagactgtaagctccatcaaagtaggactcttgttgactggagcattgccagggtctgggatggcaccttgcacctatgttgttgctgaataaatgtttacttagtttaaaaattaagagtttagttttgaatttagattgataaacatggacagcagtacaattaagtcagcctttgtttgctctgattttatttcctggagagaggtaaacatttccaaagttttgtatacagatagaaaagcaccattttctttagactcttctttttcactttggggcttcttctgaaacacttagaaagtgatctagttgtagtggctccctgatgtaagattgctgtgtcaagggagtgtcagcttcctcactggactttgaacagatacttctcatagcaccttatggcagatggggatattttttcgctaggggatttgttagaatagagaggaatcaagcatataacgcaaaccataaccctcaagcacaactttagaaagtgttcttggccatcaaagtgttttattttaaattagtgtcttaggtattccaaatatccactgaccttatcttgactgttatctgagtagacatcaagaatttcatgcttatttccttgtgtactagctgttttcatttggactctaaaaatagctgatatatatgtaaagtaaaagtctagtacccagaaacttttttaccttttgggccaagtagttattcatttaggtatgtacgttataaaacaagtaagaccgaggtagagacaagaatctgtgaatattttcagttagagctattggaccgtctgaagcaaatataatgttaggttggttggcctctcacctagatagagaaagctttcccaagtctaacaccaattataaatgatcagggatttttcttgatgtttaggttttgttacttttcttctttggtctaggtaattaagaattagccatataaataagtatggaaattacacatacaaacatggaggatatgcattttaaagtctattctacaatcacaagttattgcagaatttggaaacctgtttatttgaagaatagagtattattcaacctagacttagtgcctaataaacttaaaggctaataacctaagatgttttcctttcagtattggatttttcccttgagataccagatgtccttattttcttaccatcagtctgtcacagtagtgtagtctcaggaccatgtggaattaagcatgaatttactcattcgagatttgtaaggtgaattacaaaatggtggacatgagggaactgatggtgttttgggggctctaagtgctgtcactgtctttggtgtatagaatcagattccattccttctaatatctctagaagctttgactttctgctgtctccatttgggtaaatgagcgttattgtgctggaagctttatttacctcatttaatcttcacaatgagttaggcgttgtattatcttttccattttcaaattaggaaactaaacttaagaaaagtttgagtgattacgtagctaataagcaaaagacccaggatttgagattttatatcagacttctgctcgaactttgacctttaaatttgtggcggtcatggacccctttgagatctgatgcaaacacagaattttgtatacaatttcaggtggttcatagccactctctcccccaagtccatccatgggcctaggctgtgggcctggaggcttcctggttaaggcagtctttccctttttctccccttgtcacagagcaggatctttcttccctggtcttctacttcccagagtgaaagatgctggaaggatggaatatttgtgaacaattcaagaccttcataattaaaaaataataatttgcctctgaatatagagcctcccctcgctgacccttctactacagatgccctttttttctttggccttcatctttaggtctcaggaagggccattcattgctcagtgggacaacttactattaaggaaaaagcccctctcaggggggacagaggggaggtcatgagtgggaattcccccactgtcctgctgatggtagatccatgtctgtcttccctgctaggcagcaggtatgtgatgcatcttcaggaattgaatggatgattcattcttcctttatacattaatcaagttcccaggccaattgttgagccctctgtatcattcttcttgtcagatacacactttatgtgaatatggcattttcttttctattaacaaggattcatcattcttttaacagtatgccaatttagcraatattttcctattcagttctctgagcaatttgttcataaacaaatgtcacttagatttcctttatcttttaatgaattgacagaacatacagaggcaatttaagtttttgcctaagatgctaacattactagaagaaactgtgtatgtcacaaatccttcatgaggattggtagcatgtagtagaaataacttcctatcaagggtttgtaccactttctatagtagattacccaaatatgatcattaaaaggtgtatagtgttgagatttatatatggggcagagtagttttgttattttaaataagttttgacttattttgcctactcaggctaagaaaatatacgggtaatctcatgctgagtggcaagctcatgtgaatctaaaaacaacttattggccgggcaaggtggctcatgcctgtaatcatagcactttgacaggccgaggcagtaagatttcttcagtccaggagttcaccaccagcctggggaacatagtgagaccctatctatacaaaaaattaaaaaattagctgggcatggtgtcatatacctgtagttccagctactctagaggctgaggtgggaggatcacttgaacccaggaaggcaaggctgcagtgagccatgatcatgccactgcactctaacctgggtggcagagcaagacactgtctccagaaaaaataaaaataaaaacaacttgttatgttacagttacttagatggctcagacttcgttgacttgtcaaatgaacctcaatgtcaagtgaattttcagcacattgaactttataccatttgattcaactacatttggcaaagtggggttttggaagaaaagaggtaaagttttggtgctcaatggacttgggttcaaatccctgcagactacctgtgtgaactgaggaaaccaacttccctgggatttgtttcttttgtatgtgatatggctgcatgtaatagtaagaatgatagctctgcattgggtactgaccatattccatgccctgtgctagttgctttacatatgtgtaaccctgtgtataatcaactttgtttcctcccaccatctcgttgatggagtggaccaaagaccaatagcatccataggacactcattaactggcagctcttttttagtattctttagccgtttccactttctgtttcatcatgtaaatttgttagttggaataatacactgagggataataatggattggagaaaaatcactggagaggtattattgttaagtcaggcaactgagttcagagctgcactgctgagaattaagatattcaccataacatcctttctcttcctgcaagtttggtatgaaatatctagaaaataaccttctcagtcccttgtattttgcacttagaaataatatgtagacacttgcatacttgattcgcctgtgtttttatgattgacacctattttgaagtcaaatttatgcttagtgacttaaggaaataacacttaaaccatacagtatgataacagaaaaatgaagcatgtttaatagtgaatatgtctaaaattgtattattattatttgtataatgtatgctacccttcaatagaatgcagatttctctgtatgatgctatacaactaatgcctggctagggcagctagttggtgacagccccctgctagaattcaggtcttccagctcttgttttagcacttttctctcaatatactgcttttccatggagccattgccattttcctaaaagaaaagcaatccaagtgttgatattgtctatttactttaaaaggaaataaagggaaagaaggccaggcgtggtggctcatgtctgtaatcccggcagttcgggaggccaaggtgggcggatcacctgaggtcgggaattggagaccagcctgaccaacatggagaaaccccatctctactaaaaatacaatattgctggccatggtggtgcatgcctgtaatcccagctagtcaggaggctgaggcaggagaatcgcttgaacctgagaggtggagcttacattgagtcaagatcatgccattgcactccagcctgggcaacaagagcaaaactatgtctcaaaaaaaaaaaaaaaattaaccgggcgtggtggcagtcgcctgtaatctcagctactcgggaagctgaggcaggagaattgcttgaacccaggaggtggaggttgcagtgagctgagattgtgccattgcactccagcctgggcaacagagtgagactccatctcaaaaaaaaaaaaggaaagaaaaggaaaagttcccaaagatagaatcctattagtgaaggaagtatttaagtgtaggatctcctctactaaataaatgtaatacgaaattttatactgtttaaagggactagaaaaccatgataagaagatctcgtattacttgagcacttgtttgcatgagacacttttgtaagtgctttaaatgtttttgcttattttgatcttcacaaaaatcctgtatatgaggcactgttatgctcatctccattttactgatgggaaaactgagacacaaaggtattaagtgacttgctcatggttacatggcggaaaccacagctagagtagttctgactccttgaacagcatctttcttcctggtttataacctttgacaaatgacaggtggcctgctctggagctcatgcccttgatgacagcctggctcagagtggcctcctaaatgtgacagtagtttttgtaagtactctggagatatttgttatcatttaatttttgtatttttacaattatcttgcttaagataggtttttgcactcacgtcaggcaaagaaaggtaagcatgagaaggaacatgagtgtcattaggcccgcaagacactgttggggaatccccagggtgtttagggcagagctgtttgatgagaagcctttggtgagcttgttccctggcagagttggaagtatcagactgatgaaatacatcccaggagtgttctctgctgagatattttccaaagcaatatctgcttgcactactgttagatgaatttggtgggcttctagattcagattcttcatccaagcaaggagaaaggtagaggcagtgagtccgttgaagtgctggctgcctttcgtgatgagcccaggctgtgactgaagaataagaagttctagtttatctttggttatgtgggtcgtaaactaaacaacctttatatggtagcacatagagcatattagcttttgactgtattgaaactttgtgcagtaacatctcaattatccctgtcattcttgttggttatatatatacagtcatgtgctgcatatcacatttttggtcaatgacagactgcttataagatggtggtcccataaaattataatactgtatttttactgtacctttcctatgtttacataagtgtagatacacaaataccattgtgtttcagttgcctacaatattcactacagtaatgtgctgtacaggtttgtagcctagcagcagtaggctatatcacatgccctaaatgtgtaggaggctataccatttaggtttgtgtaagtacactccatamtgttcacacaatgaaatagcctaatgatgcattcccacatcgttaagggacacgtgactactaaaatttcccctttaatcctagtttactctttaaaaacatgttgatattgtcttaatcttataattcaagatctttctccatagcacttatcagtatctggcataatatatattttgcttgtctatttttccctattggaattaagttacgtgagggcaggaattttgttctcatgttcaatgctgtattcctagttcccagaacagtgattgacatgtagtaggtattcaatcaatattcattgaatgaatagatgaatctttctaaacattagtccagttaaaaatagagtatatttatttgtgtttcagaggcatcatattcatagcatctcattgtccaggatagtaaatagaaaagagataagcagttcatccatgtggacagtaatctcagtttgtgcctcctactgtctttcagtccctgaaattgtcttatcatttgactcttccttaaagataaatgctacagcaacaacaaaaatctagccacacgagaagttcagttacttggacttcagtataatttcagaataatttagaaggtcaagatgtactcttgattattttcttgagtcttcatttagttgtaatagagtataatgatattgcatattaccactttggctgtaaaatatatattatttgatcaagtatagaagaaaactgattaaaattaaacagaaaaggaaaaaatgctgcctgctttgaggcaatgtgaccgccactatctgtcacaaggaagaagtacgatacttcattatttatggcagactctgtaaaggtaagctccaggcttgaattaggttaatacttgttaactacccttgttagatgatctcttcccgggatagactttatctagtgctatcttctgtcatctctttcctgatgaaaagtcttctgacttctgcctagtctaagaaaggcatcaggatgaaattatatttgcaattttagatgggattaacttttatcaacccaatgcatcagtggctttaaaaacccttcagctaatttctgtgtccctctgctctactttaaaaatagtacaaccaaaaagactcttaaaataattagacgagaaatgacttagggattaggaaagggtttacattctgacaggatttggacctgcttttaatagctgacgtctccttaggggactatgatttgggtgctgcacattttttccccatctcaaatttgtaaactctcttttgctttgaacaaaaaacttggttatcaaatcactttgttctcagtcaacatcagttcatgtaaagtaagtcaaccatattgtgctgaaaagaagccaagtttgttttaacttttatttttactgtagtttacaaagcaggcacagttatctgtacaattttagaagagtagctatgaaaaaattttaaacaactatgaagaaatcattgaataactttttgaaaactatcctgatatgtttgttcataacaaaataggaaaggaagggagaatgtaaacacacctgacaatgaaagtttcacaaaattctctacagtgactattgagaattgatctaggggatgctagaagattcagtgatttaacaacttctgctggaatgagtttcccacaggtcaagtcaatttgctttgatcaccagtgagagtggatgcagctgtggagaaagagaagccacgtggaggtaaagtttcttatcaggaaaagcactggaaagttatataacaaagtgtggcaggagacatgaactgaacgccaataactaaaggctgtctgctggaaaacttctgttacaattaaacgaactccattaacaggacgtgcatagtccagaagatttggactcaaggaagagaggatgtgtgcttctgggaagatatcctagaccaaggcagtagttaaaatttcaggcacatgggcctgtctgtagcaaagtttttgcctttcttttagtaaaagtcctggtatgttcagactttaaaggaagaaattagtttgactgttatttgaatagtgatattttcaaggaagaagcatgcttgattcaagttttattctattttctgtcatacctgaagagatcctatctgctaaatataggtaccatgacaaaggtaagagtgcttttcagtattatcagtacgattagaacttacaaagttcttcaccacaattttgaggaaggaagagtacatgttaaattccctattaagaaacagactcagtgaggaagtgagacattccagagctggcaagtggtaaagtcaggactcaaaggccgagccttttgcctgcaaatctagtgctctttgtaccacaccatgctagtggcagctattggaatctcaggcattgtcacccgggggaaatacagccatgtgtcacttaaggacagggaaatgttctaagaaattcgttaggcaatttcattgttgtgtgaacatcacagggagtacttaaacctacgtggtatagcctactgcacacctgctatgtgctgtggcctagtcctggtaggctataataaacctgtccaacatgttactatactgaatactgtaggtaattatatatatataacaatggtgagtatttgtgtacttaaacatatctaagcatagaaaaggtgcagtaaaaatgtgaggtaaaagattaaaaaggtacacctgtatagggtacttaccgtgaatggcgcttgcagaactaaaagttgctgtgggtgagtcagtgaatacgaaggcctaggaagttgcactatagtagtaggacactattgtagcctctagaaacactgtacagctaggctacattaaatatatcacaattttttaattttttaagacagagtctcactctgttgcccaggttggagtgcagtgacgcaatcatggctcactgcagcctcgacttccaggctcaagcattctcccaagtagcctcagcctcccaagtagctggaattataggcgtgcaccaccacacctggctaatttttgtagttttagtagaaatggggtttcaacatgttggccaggcttgtcttgaactcctgacctcaggtgatcctcccacctcggcctcctaaagtgctgggattacaggcatgagccaccacacctggccttcgataataaattaacctcagcttactataaygtttttgctttacaaacttttaaatttttaaaacttttgactcttgtaataacataggttaaaacacagacacattgtacagctatacaaaaatatctatatccttaccctataagcttttttctattttaaagtatttttttgttttttactttttaaacttttttttttttcttttgagacagtcttactttgttgcccaggctggggtacagttgcgtgatcttggcttactgcaacctctgcgtcctgggttcaagccatttttgtgcttcagcctcccaagtagctgggattacaggtgtgcaccaccaagcgccccccgcccccccttttttttaatttttagcagaggtgggtttttgccgcgttggccaggctgatcttgaactctcctcgccacaagtgatccactcaccttggcctcccaaaatgctgagattacacgtgtgagccaccgtgcccggccactttttaaacttctgtgttgaaaactaagacacacatattagcctagccttaaacagggtcaggatcatcaataacactttctttcacctccacatcttgtcctcctggacagttttcaggggcggtaacatgcatggctctgtcatcccctatgataacaatgccttcttctggaaacctcctgaggctgatttccagttcactgttttttttatttgaaagagggtctcattctgtcacccaggctgtagtgcagtggctcaatcacagctcactgcagcctcgaacttctgggctcaagcaatcctcctgcctcagcctcctagttgggtctacaccaccacacctggctgatttttgtattttttgttgtgatggggtctcactatgttgcccaggctgttcttgaactccttggctcaagtgatcctctggcctcagtctcccaaagcactrggattacagatgggagctactgcacctggcctacagttaacttttttataaataggagtacactctaaataaaaagtataataaatgcataaatcagtaacatagtcatttattatcgtccagtgttatgtactgtacatagttgtatgtgctgtgcttttgtgcaattggtagcacgataggtttgtttataccagcatcactacagacatgtgagtaatgcattgcactgcaacttagcaactacaacatcactatgtgataggaatttttcagctgttacagtcttaggggaccaccatcgcatttgtggtctgtcgttgactaaaacattgttatgcggcacgtgactgtaattagcttctatgctactagttaaacctttcaaaaaacaaataacagcaggtaccaaaacagaaatggaaacagctttcatgtttggctttggaaaatatgcttgtacttgtaagtgaagtaatgaaaccccaattaaattggctagagtactgtaaagctttatataaaataagttatttttggaaaataagttatttcttggaaataagttatttctttgggaaatgaagcgcttcataactaactttgcctgataaacaaggttgactcctttgtccaaactatttggagtgctaagttttggaaacartttataaatttctatctgtcgtaaataaaggatactacctctgcttttaggaacagtgattgttgttgaatacatgactaattaatgtttggagttatttgtttctttagtaagtaactccagactcccatatatttgtaattctttgtaaattctatttaaggggtttttgtttgttatgtacgtgttctcctttgctaaaaagaatrttgcccatcacttccctctactgccaacttgctattattaaataagcccttttcctttaatttgtcatcttttaatctgctttggattggattaccaaatcgctaaactcattaaaagtatgtataaaataagaaaaaaaatccataaaagagataggagaaatttcttctttgtcaagggcatatactttataacattgactttaatatgtatttttgattgctcaaacacatttttccctattctctgttcttcaattatgttcacgtgaggttgccagttaactgtcaaacggcacaaaatcttgacgtaagtatagatattagaaaatagaaattgtaatgaactcataggctcgtctatttctggctcattttttttcttagacttaatgaactgaatttgttgtatttaaacattttaaaatagagctgaaaatatctgtacttgttatgtcctttcctggttttggtattagggtaatgctggcttcatagaatgatttagggaggattccctctttctctatcttttggaatagtttcagtaggattggtaccaattcttctttgaatgtgtgatagaattcagctgtgaatccatctggtcctggacttgttttttgttggcagtttttttttttttaattaccgtttcagcctcaatacttgttattggtctgtccagagtttctgtttcttcctggtttaatctaggagagttgtctatttccaggattttatccatctcccttaggttttctagtttatgcacgcaaaggcgttcatagtagacttgaatgatcttttgtatttctgtggtattggttgtaatatctcccagttcatttctaattgagcttatttagatattctcttttcttggttaatctcgctaatggtcaatcaattttgtttaccttttcaaagaaccagctttttgtttttgttttgttttgtttcaatttcatttggttctgctctgatctttgttatttctttttttctgctgggtttgggtttggttggttcttgtttctctagttccttgagttgtgagcatagattgtctgtgtgctctttcagactttttgatataggcatttaatgctatgagttaatatatatttaatgtatatttaatgctcttagagctgcttttgctgtatcacagaggttttttgtttgtttgtttttttgagatggagtctcactctgttgtccaggctggagtgcagtggcgcaatctcggcttaccacaacccctgcctccctggttcaagcaattctcctgcctcaacctcccgagtagctgggactacaggcatgcaccaccatgcctggctaatttttgtaattttagtagagatggggtttcactatgttggccaggctggtcttgaactcctgatctcgtgatctgccagcctcagcctcccaaaatgttgggattacaggcgtgagccactgtgcccagccatatcccagaggttttataggttgtgtcactattatcattcagttcaaagaatttttaaatttgtctttattttgttgttgattcaaaattattcaggagcatattatttaatttccatttatttatatagttttgagggttacttttggagttaatttccagttttattccattgtggtctgagagagtacttgatgtaattttgatttttttaaaatttgttgagccttgttttgtggcctatcatatggtctatcttggagaatgttccatgttttgatgaaaataatgtatattctgcagttgttgggtagaatgttctgtaaatatctgttaaatccatttgttctagggtatagtttaagtccattgtttctttgttgactttctgtcttgatgacctgtctagtgctgtcagtggagtattgaagtcccccactattactgtgttgccatctatctcatttttttggtctagtagtaattgttttgtaaatttgggaactccagtgttaggtgcatatatatctaggatggtaatattttcctgttggactagaccatttattattccataatgtccctctttgtcttttttaagtgtcgttgctttaaagcctgattcgcccaatataagaataactactcctgcttgcttttggtttccatttacatggaatatctttttccactcctttaccttaagtttatgtgagttcttatgtgttagatgaacctcttgaacacagcagatacttggttggtggatttttatccattctgccattctgtatcttttaagggaagcatttaggaccatttacattcaaggttagtactgaaatgtgaggtactgctctattcatcgtgctagttgttgcctgaataatttgggtttttttcccccattgtgttactgttttataggccctgtgagatttatgctttaaggagtttctattttggtatattttgaggttttgtttcaagattaagagctcctttcagcattttttgtagtgctggcttggtagtggcaaattgtttcagcatttgtttgtctgaaaaagactttatctctccttcatttatgaagcttggttttgctggatacagaattcttggctgataattgttttgtttaaggaggctaatataggaccccaatgccttctggcttgtagagtttctgctgagaaatctgctgttaatctgataggttttcctttataggttaccttgtgcttttgcctcacagctcctaagattcttctttttctttttttttttttcttgagatggtgtctgactctgtcgcccagactgaagtgcatggtgtgattttggctcactgctacctccacctcctgggttcaagcaattctctggcctcagccttccaagtagctgggattacaggttcctgccaccatgcccggctgatttttatatttttggtagagatggggcttcaccatgttggccagactggtctcaaactccttgcctcaagtggtctgcccaccttggcctcctaaagtgctgggattacaggagtgagccactgcacctgacctttaagattctttcctctgtcttgactttagataatctgatgactgtgtgcctaggtgatgatctttttgtgatgtatctcctgggtgttctttgagcttcttgtgtttggatgtctaaatctctagcaagaccagggaagtttttcttgattattccctcaaataagtttccccaagttttagatttctcttcttcctcaggaataccaattattcttatgtttggtcatttaacataatctaaaatttcttggaggctttgttccaaaaaaggctacagaccagtatccctgatgaacatagatgcaaaaattctcaacaaaatactagctatttgaatctaacaccatatcaaaaagataatacaccatgatcaagtaggtttcataccagggatgtagggttggtttaatatcaagtcaataaatgtgatagaccacaaaaacagcattaaaaacaatatgatcatctcaatagatgcagaaaaggcatttaacaaaatccagcattcctttatgattaaaaccctcagtaaaattggcayagaagggacataccttaaggtaataaaagccatctatgacaaacccagagctaacattatactgaatggggaagagttgaaagcattccccctgaaaactggaacaagacaaggatgttaactttcaccacttctcttcaacgtagtactgcaagtcctatccagagcaatcagacaagagaaagaaagggcatccaaatcggtaaagaggaagtcaaaccgtctctattcactgatgatatgaacgtatacctagaaaacccctaagactcatccaaaaagctcytagatcgataaatgaattcagtaaatgttttagtctgttttcatgctgctgatagtcatagctgagactgggcaacttacaaaaggaagatttaatggacttacagttccacatggttgggaaggcctcacaatcatggtggaggatgaaaggcacgtctcacatggtggcagacaagagaagagagtttgtgtagggaaactcccatttttaaaaccatcagatctcatgagacttattcactatcaccagaaagagctgcccccatgattcagttacctcccaccaggtccctcccacaacgtgggaattcaagatgagatttgggtgaggacacagccaaaccatatcagtaaagttttaggatacaaaattcaggtacacaaatcagtagcactgctatacacaaacagtgatgaagttgagaatgaaatcaagaactcaacttcttttataacagctggaaaaagaattaaaatacttaggaatatacccagccaaggaggtgaaagaactctgcaaggaaaactacaaaacactgctgaaagaaatcatagataacagaaacaaatagaaacacatcccatgctcagggatgggtagaatcagtattgtgaaaatgaccatattgccaaaagcaatatataaattcaatgcaattcccatcaaaataccatcatctttcttcacagaactagaaaaaacaatcctaaaacttacatggaaccaaaaaagagcccccatagccaaagcaagactaagtagaaagaacaaatctggaggcatcacattacccgacttccaactggactacaagcctatagttaccaaaacagcatggtactggtataaaaacataggtcaatggaacagaatagagaacccagaaataaagccaaatacccacagccaactgatctttagcaaaggaaacaaaaacataaagtggggaaaggacaccgtattcagcaaatggtgctgggataattgacaagccacatgtataataatgaaactggatcctcatctctcaccttatacaaaaatcaactcaagtgggatcaaagacttatacctaagacctgaaactattaaaattctaaatgataacatcagaaaaatccttctagacattggcctaggcaaagagtctgtgaccaaaaacccaaaaacaaatgcagcaaaaacaaaaatagatgagatttaattaaactaaaaggcttctgcacagcaaaagaagtaatcagtagagtaaacagacaacccacagagtgggagaaaatacttgcaaactgtgcatctgacaaaggactaatatccagaatccacaaggaactcagacaaagcagtgagaaaagaacaaataatcacatcaaaacatgggctaaagacatgagttagacaattctcaaaagaagatatacaaatggcccagaaacgtatggaaaactgttcaacatcactaattatgaggaaaatgcaaatcaaaccacaatgctataccaccttactcctgcaataatggccataataaaaaaatcaaagaataatagatgttggtgtaaatgtggtgagaagggaacacttttacactgctagtgggaatgtaaactagtacaaccactatggaaaacaatgtggagcttccttaaagaactaaaagtagaactaccatttgatccagcaatcccactactgggtatctactaggaggaaaagaagccactgtatgaaaaagacatttgcacacacatgtttatagtagcacaattcacaattgcaaaaatatggaaccagcttaaatgtccatcaaccaactagtggataagggaaaatgtgacacacacaaacacgcacacaccatggaatactactcaggaatgaaataatggcatttgcagcaacctagatggagttggagaccattattctaagtgaataactcaggaatggaaaatcaaacatcgttatgttctcatttgtaagtgggagctaagctatggggatgcaaaggcatgagaatgatgtaatggactttggggtttccaggggaaggatgggaatggggtgaatgataaaagactacagattgggtacagtgtacactactcacatgataggtgcaccaaaatcttagaaatcaccactaaagaatgtattcatgtaaccaaacaccacctgttccccaaaaattattgtaataaaaataaaattatttactttattatgaatatttctgatctttaaaaacatttttttactgagatgaaattcacataatgtacaactaaccttttttttttttttttttttttttttttgagatcatctcgctctattgcccaggctgaagggcagtggtgtgatcctggctcactgcaacctctgcctcccaggttcaagcgattctcctgcctcagcctccggagtagctgagattacaggtgcacaccaccatgcctagctaagttttttgtatttttagtagaaatggggtttcaccatgttggtcaggctggtcttgaactcctgacctcatgatctgcctgcctcagcctcccaaagtgctgggattatagatgtgagccaccgtgcctggccacaactaaccactttaaagtaaacaactcattggcatttagtacgattacaatactgtctatttctaaaacattttcatcacccccaaaggaaattctgtatcccataggcagtcattctctattcttccctgcccctagcaaccaccaatttactgtctgtctctgtggatttatatattctagtcttgaactcctggcctcaagcaattctcccaccttggccttccagtgccttgggattacaggtatgagccaccacaccttgggatttattcagatgtttcatataaacagaattatacaatatttgaccttttgtcttctggctgcttttgcttagcataatatttttgaatgtcatccacattgtggcatgaaccagtacatcattgtgttttatggctgaatgttcattgtatgtatacaccacaaacttgtttatccattcatctattgatggacatttggcttgtttccaccttttggttattgcagatagtcctgctgtgcatatgcatatacatgtgtttcttgagcacctgtttttcagttcttttgggtatgtacctagaagtggaattgctggatcatatggtgattctatatttagtgttttgaggatccaccaaacttttccacagcagctgaaccattttctgcttctactagcaatgtataagggttccagtttctcctcaccaatgtttacttcctattttttaaattatagccatcctagttggtgtgaagtggtatctcattatggttctgagttgcatttccctaatgactaacaatgttaagcatcttttcatgtgcttgttagccattcatatcttttttcaaaaagtgtgtaagtcctttgcccattttaatattgggttgtttctttctgtatgtaagagtcattttatacgtttcaagtagtagacctttatcagatatataatttgcaaatattttctccttttcttctgttctgtaggttttttttttactttcttcatttattattattattttttgagacagggtcttgctctgttgcccaggttgaagtgcagtggcacaatcatggctcactgcagccttgatctgttggggttaaagtgatccttccacctcagccacttgaatagctgggactacaggtgtgtgccactgtactcagctaattttattttttgtagaggcaaagtttcactatgttgtccacgattgtctcaaacttctgagctcaagcagtcctcctgcctcagcctcccaaaatgttaggtttacagctataagtgaccatgcctagcctgatatggttttttttgcatgtaagttctaaattttgtgcgtgtgtatgtgtgtttttaagagggtcttgctctgtcgcccaggctggaatgcagtggtacaattatagcttactgaagccttggtctcctgggcccaagtgagcctcccactttagcctcttgagtagctgggactacaggtgtgtgccaccacacccagctaactttaaaattttttgtaaagacagggtcttgctttgttgcccaggctggtcttgaactcttggcctcaagtttctcccactttggcctcctaaagtgctaggatyacaggcatcagccactgtgcctggcaagttttgtaattttgaaataagtttatctatttttttctttgttgctcatgtttttggtgttatactcaagcatttattcccaaattcaagatcacagagatttaccctaatgttttcttctaaactattttacgggtcgcttcttatatttacttaatttttatatatggtatggagtagggatccaacttcattctttcgtatgtggatcttcagttgccccagcaccatttgctgaagagagtattcttttccccactaactggtcttggcacccttatttaaaatcagttgactgtagatgcataggttcatttctagactctctattctatttgtctatatgtctctccttatgccagtaccacacagtttggattactatactcttgtaataagttttgaaacaaggaagtgtgagtcctccaattttgttattctttttcagtattgttttggctatttggagccccttgcaggcccatgtgaatttgaggattggctttttatctctatgaaaaagcatattgggattgtgataggtattgcatttgaatttgaagattactttgggtagtactgcaccttaacaatattaagtatttcagtctatgaacatgggatatctttctatttatttagattttccttaatttcttttagcactgtttagttgtgttcagtatatgccttttcaccttcttggtcaaatttattcctacatattttgttcttttggatattactgtaaatggaattgttttctttttttgacatrtacattgctggtatatagcagctgatttttgcatgttgatcttgtaccctgcaaacttcactgaatgtattacctcgagtagggcaggggtgtgtgtgtgtgtgtgtgtgtgtgtgtgtgtgtgtgtgtcacggttggggggtggatttggaggattttctttgtctaggattatgtcatctgtacatagatagttttactacttctttccactttaaatgtcttttatttttcttgcctaattgctctggttagaaccttcagtacaatgtcaaatggcagtggtgaacatgggcatccttgtcttgttactgatcttagggggaaagctttcagtctttctccatggagtatgatattagctgtgggtttttcctaaatgctcattgtcatgttaagaagctcttctctattcttctattcctagttttctaggtgttttttatcattaaggatgttggattttgtcaaatgcttttcctgcatcaattgagatgatcatgtgtgttttttttcttttgtcttagtaatatggtataatgattttggggggtatgttttaccacccttgcagtcctgggatgaatcctacttagtcatggtgtataatccttttagtgtgctgttagactcagttttttaatatttgcttaggatttttgcatctatatttacaagggatgtcggtctatagttttcttgtggttatcttttgtctggctttggtattggggtaatgctggcctatagattgagttagaaagtattctctccttttccttgattttcgtgctcactccccaccttgtttgttttttgaatggattttaaattattttggaaagttaattattcagattcttaaggttattattcaagacgagccaaaaaaaaaaaatggtcttacccaggaaaaatctttgcctgatgagaatttaatcacaatactttgttgctcaagctccacctacctattttagaaacagatgatattgtagtcataaaatctcatggaatcagatgttgtgacttgattatgtatgtgtagaaattctaagagagcattcaatccaggattataatgttacaataatttagttacccatatgtatataaacatttctagcagcaattttagaaatataatacctccttggaggtatttaacaagatataaatttgatttttggctagctttcactacttcttaagatagaacttgaacattggggcaggtcccaaagcaaatactttaactacaatagttacgcacgagaaagtcatgtaaacaatctatccttgacaagctacaaagtcaatattcagatgtcccaaatcttagactcctttatttaaaagagctaaccaacaaagaatttactaagcccacctttcttttttttttttttttttttttttgagacagtcttgctctgtcgcccaggctggagtgcagtggtacagtggcatgctctcagctcacttccacctcctgggttcaagcaattctcttgtctcagcctcctgagtagctgggattacaggcacccaccatcatacccggctaattttttgtatttttagtagagatggagtttcaccatgttggccaggccagtctcgaactcctgacctcaagtgatccactggcctcagcctcccaaagtgctgggattacaggcacaatccaccacgcccggcctaagcccaccattcttttcagctgtttgtacctttagataaagttctcgctactctcttctatggtctataatttgtgaaaaactaattatgatgcaatttcaacaaatgtatttgttcagttctatttgattttctaattcatgttgcatgagtaatagatgcactgataaagttagcatattttaacagttttcctttcagaatgtgctttttaacagaatgctagcagattgttcagctgttatttttttaaattatattacagtccattcacaaaaggtacaaccacaaattatacaataaaccagaaattttataattctgtttttgtatttggaacagtctacagtccaactgtatttaaaggggaagttaatgtattcaaagggtatttttaagaccttttcattttggttaaaaatgatgacatacagccaggcgtggtggctcacgcctgtaatctcagcactttgggaggccgaggagggcagatcatgaagtcaggagttcaagaccagcctggccaacatggtgaaaccccgtttctactaaaaaatgcaaaaaaaaaaaaaaaaaagttgggcgtggtggcgggtgcctgtaatcctagctacttgggaggctgaggcaggagaagcgcttgaaactggaaggcagaggttgcagtgagctgagatcacaccattgcactctagcctgggcaacaagagtgaaactccgtctcaaaaaaaaaaatgacctgctgttaacttaccaaaacagttttagatcctaaaggattcctaatctggcattatagaccgaatgtggtacattcagtccaaaacttgtgttctaagatggaacagaaaacaaacatagtaacagaaatgtattttgttgtaatcaaatacatgtaggtaattttaaaagtcttttgaggggaggagtcagtaattgattttgttggtggagagaatgggtgaaactaaatgatatttttaaaaatatagtggttttcaggctggcacagtggcacactcctgtaatcccagcactttgggaagctgagacgggaagatcacttgaagccagtttaagatcagcctgggcaacatagtgagaccctctcttgaccaaaaaaaaaatatatatatagcctggtgtggtggcatgcacctgttgtctagctacttaggaggttggggcagaaggatcacttgagcctgggagtttgaagttgcagtgagccgtgatcatgtcagtacactcccgcctgagtgatagagtgcaactctctctcaaaaaataaaatataatggttttctaataggaaaatgtacttaggtagttttcccgtatccaatcctcatgacaggattgtgagggagatattactttattttacacttgagaaaaccaaattagattgattgactttaccatttcactcctagtaaataactgttggaaatcaaactcagaactttggacttaagcatcaagctctttctattaaaccagatttttgttttctataagttgcagtttaaaaaaagaaaagaacagtacttgttttctataaatgtatgatacatattctrtgcttacagataataagcaattcattttaaaatgtcataacctcagaatataattaacaatgggacttggcctttcagatatattacaatgtgcttggattttcaaaaattttatttgcatgcagcttgtcaaggattttttttttttttaaggcagagtctcactttgttacccaggctggagtgcagtggtgcagtcttagctgactgcagcctctgtctacctcctgggttcaagtgatcagcctgccaagtagatgagactacaggcacacgctaccacatctggctaattttttgtattttttacacagacagtgtttcgccatgttgcccagattggtctcaaactcctgggctcaagaaatcttcccacttcagcttcctaaaatgctggcattccaggtgtgtgccaccacacccagccaaagataaggttttatataactttctcttgcataactttggaggagcagtgtagtgtagtgcaaagttatcaaactttaaaggacccaagaaatacctaggagattaatagctttttagggcccaagaaaccctctaggtacttctggtagaggtagtccagggacaatacctgggggaaacactggctttgaggttttacacagataaaaatacctacttcataaattagtgatggtgatttaatctatggtatctctacagttcttggaatacaacctggcacataggaaatgttcaaaatattccattcttgtgtgatgacttgggtggcaactaagaagcaagagaatattccttctttacattcaacaaaatttattgaattccagcagtattctagggatttgtggatataggggaaaatgggcacattcttcactcttgttgaatttatttgatgaactcattttaaaggtatagttcttaccttgttaaaaaataataaaatgactattgagcacatgtttgcataatcttttcccttgcaaattaaagttttattttttacttgaatgaggattgcaggtcaaagaaatgttctattatttctcagttttcttgttgctttaaatctatactatccaatacagtagccactagatacttgcagctatttaagtcaattaaaattgtataatattaaaaatacagctccttggtggcactaccacatttcaagtactcagtagccacatgtggctagtggctgctttattggacagtgcagatgtagataatttccatcatcacactaagttctgttgggacagtgttattctggagtgtgcaactacaaagcagtgattttccaattgtcttaatctgtagattgattttgaggcaagtattagcagtggcttgaggctgtcatttcagctcataagtgcattaatatcctttcaggttgaccaggcccagggctagtattgatttatcttaacagtttcatttcacagcaagtgagatctaaatgctaagacatctgggcattttctttaaacttctgagtaatacactaacgttattttactgcattagtcatagcttttctcatgcactctgtgtgtgtgtgtgtgtgtatgtgtgtgtgtgtagggagagagagaattcaccttcacagcattataattgttttaaatgtgcatgtaatgaaattttggggacaaaggaataaagaagagttggaattgcatctgaatactagaaatggtacttacatgaaataatttcttttatagaaaccaaaactaagagtagtgaaaagttggtttaacactgcttactcagcattctactgggtagaaccccagttatgattatttaaaaatattaattatgaggctgggtgcggtggctcatgcctataatcctagcactttgggaggccgaggtgggcggatcaactgaggtcaggagttcgagaccagcctgaccaacatggtaaaaccctgtccctactaaaaatacaaaaaattagctgggtgtggtggtgcatgctataatcttggctactctggaggctgaggcaggagaatgacttgaacctgggaagcggaggttgcagtgagctgagattgcgccactgcactgtagcctgggcaacagagtgagaatctatctcaaaaaaaaaaaaaaaaaaaaaaaaaaaaaaaaaatatatatatatatatatatatatatatacacacacacacatacacacacacgtgtatgtatatatacacttatacacatatatgtgtatatatacgtatatatacacatatatgtgtgtgtgtgtgcgtatgtgtgtgtgtatatatatatatatatattttttttttttttttttttttttttttttgaggtagattctcactctgttgcccaggctcactctgttgcccagaagaacaacagcaaaaactgaaggaaaaaaaggaggtaagacctatctgtaactagctactcatattcaggaaacagaggcaaaaactcaattgctcttgcatatcatttactgaactctgaaccaaaaaaatacattcacgacctagacactggaatgtagtgggggctactcaattttatatgcagattttaacaacaacaaaaatacagaagaatttatccttggtttttcaattactaaaacactaaatttatcatatatatatacaggtgtatatatacacatacacgtatatatagtatatatacacatatacacatatatataccatatatatagtgtatatacactatatatacacatacacacataaatacacatgtacacatatatatataccattatatatagtgtatatacactagtatatacacacgtgtatatatagtatatatacacatacacacatatatacacatacgcacacatatgtatatatacatatgtgtgtgtatgtgtatatatacatatatatgataaatttagtgttttagtaattgaaaaaccaaggataaattcttctgtatttttgttgttgttaaaatctgcatataaaattgagtagccgccactacattccagtgtctaggtcgtgaatgtatttttttggttcagagttcagtaaatgatatgcaagagcaattgagtttttgcctctgtttcctgaatatgagtagctagttacagataggtcttacctcctttttttccttcagtttttgctgttgttcttctctgagaagaaaggcaataagagactgctgtcatttggtcacaggtcagggattaktgygactgaagtcattgaaatccttttgtatgttattgcctccttcaatgaccttctgtctttccaggtcacttacttcagcctctggtactacaacaagcaaaatcagcgccggtgggtagatttggaaaaacctttgaagaagcagctggataaatatgcattggaacctaccgtctattttggagtggtgttttatgtgccttcagtttctcagctgcagcaggagattaccaggtgagaaattacatgccgtttgtttttaggaaatagtctagtgagatgtaaaaagtgaaactaargttgaagtcagaagataagtttgaaactttgccctctcgccccacatttttagccacggtgttacaaagagattctcwtatgtggcatgtcagagtgttttactgcatgttgggtaacttatgggttcactaggcacaaaggaataattaaagggaaaaatgatggatttaccctctctgtgaactcttcttgtagtgatgttacctttaatgtttttgttgttttgtttctgatcttttgtaacaaggaaaggagagaagagattttagaaaattagttacaaaatctgtcttcattcctcaaggaaatgtgctgaaaggctcctagaattctctgcctctagctatattctgtagaccggttggggagggagtacagaggagagggagggaagtgtttaagatcaggaaattttggccaataagtgcacttaatagggacaaaagcagaaagggaagatgatattaaggagcagaatagaggaactaagtgttcttattctttttccccctgaagacaatgaaaaaaggaataaaatttgagttcttgagcctgcctttcaaagttctgtgaatcccatcactacctgacctttttaaccctatttaatgttacttttgaacgttaaatatgttcaaaaatgaagtagctgtgctacttcaagggcccgaaacatgctgcacgccctttcatctttgtgtcctagatctttctctcacatgtatttactggaatcctgtttgcctcctgagttgtggttcagaaggtacctcctccatgaagcatctatgaccccaggatagaatgagttttggcttaccacctagaatttgattctacttgtgttaagatggtaattgtcataccctgttattaggattgtccgtgtatctttttcctaggttttagcccatgttttctttagctttacttaatgatatcttacacagtgccttgcagatagtaagaacctggtactgtcccatgtttgtggagtgctgtttgagtctgccagttratgattaggagagaatggaaagtcaaagcagtaggatccagtggtaggataaacacaaactgactgtaaaagtctgagatagaaatattgaagagaaaagtggaagccagaaggaaaaagcctgaactgatcactttaactcatttaaacatttactgaagatatgctctaagaattgtgttgaatagagtgggaggtgaatatgctttaatcccaccctggaggagctgctcacagtctggtggaattggcagttcatataaatagttacagtatcctatgataataaatgctttaattaaagctgtggattcctaggggtggggcaaggggaacttgaacaggaaaggtagagagactgacttttaaattgactttagaaatgttctagagggaatagtttttgcaaagcagggggaataatcaaaatgattacatgtcttcaggaagtttcaggtattacctaaggaggttttaaaaatagacattagcaataaagtcatggtacaatgaggaagagattttcaaatttaatggaatcattaaatttacatttcacaaagatcacccatcatagaaggtagatcagagatggcaagactataggcaggacaccagtttaggaatacctgtgccataatctaggcataggtttacaatatagaactgaacagaaaggcattagctggattgagagagaatgggcctattagagtcaatcaataggattgctcatcgattaggtataggagcacctgatagagaagttgtatcggtaaggrttaagtatagctatatataacaaaaaccctaaatatcattgacttctgtgagagttcagaagtcagccttgcagagcttgtctgacagctccacagagtcttcaaggatgctcgcactttctcttagtgctccagcatcctcagcgcatccttcccatgcactaggttacctcttggtccaagatatccagagttctgtctattacatccatagtcagaaagcagatgagtggtttcctaggaatggggtaggaattggagagaaagattatgaggggtgcaaggaaacttttgcagttggtcagtatgttcctcattttatagtgatggtttcatggatatatatatgtgtctaaattgtacacttgaaatttgaacagcttattcgtatgccaattatacctcaaaaattgtgttctaaaaaaacccactcaaagatattggaagaaaacaaagggggagggccaggcgtggtggctcacacctgtaatcccagcactttgggaggctgagggggccagatcacctaaggtcgggagttcgagatcagcctgatcaacatggagaaacgccgtctctactaaaaatacaaaatatgtcaggtgtggtggcacatgcctgtaatcccaactactcgggaggctgaggcaggacaattgcttgaactcgggaggcggaggttgcagcgagccgagatggcaccgctgcactccagcctgggcaacaagagtgaaactctgtctcaaaaaaaaaaaagaaaaaagaaaacaaagggggagaacaacaatctgaataatacatcttcagaaagtgcagacttaacagaaaaatatgaccataaagcagcagaaaactgccacctgatactacaaaatgaacttaaaaaattaagaaaataacatgatatgaaagaaccatttaaatctgaattagaaaagcttgggaataattcgtctgtgtaacaggtgaatatgaaaatagctgcaaaaacaattagaaattttgaaatgatagaaactataaaagtatagaagacaagataaaaaatagatgtaataggattccctaaaggaaaaagccaaaacattcttctaacagtatgatctaaggcaaaacattggcaaagaacaaattccaaaaactatataacaaattgtatattctagctataacacattctgaaaacttccttgaaaggaaaatgacttgaagctctctattgaaaaggcatactgtgtacctggtatggtcagtccagagcaatcagcgccaacacattctgcaaagtcaccagaaattgggcatccagactaaaactgttataaaattaagaaaataagattggtatcagacttctggaaaaacacttcatgccaacagacaaaaaagtaacatttaacatcctcaaggaaaggaaatatgaggcaatgattatatatctagcaaaaacgacctgcaaatatatcttagcatgggctgccgtaacaaaatattatagactgggtagctgatgtattttctcagtttggagatctgagcatggttgaggtctcatgagggttcccttcctggcttgcagaacttctggctgggtcctcacatggcagagcgagcaaacactttggtgcctggagtttttacttgcaaaagaggacattttgtttcaattgtcgataatcatgcctcagataaacctcactggctatgatactaccactgcacaaagcttggaaattttgaccatcataaagaatacaactgggctgggcacagtggctcacgcctataatcccagcactttgggaggccaaggtgggtggatcacttgaggtcaggagtttgaaaccagcctagccaacatggtgaaaccccgtctctactaaaaatacaaaaatgagccgagtgtggtggcgcacgcctgtaatcccagctgctcaggagactgaggcaggagaatcccttgaacctgggaggcggaggttgcagtgagctgaggtcacgctactgcactccagcctgggcgacggtgagagcccatctcaaacaaaacaaaacaaaaaaaagaatacaactgcatggattaaaacataccaaatatatcttaaaattcatgaattcataatactttaaaaaaaacctcattgctcacctttgaaacttactagagtacaattcattactctgaatggcagtaagtttatcctatcttttctttatagactatataaagaggtaacaatcatcagtattggctaaaacctttgggtaaagggaacaggctggcatcatctgaactcagtgggcaatgtcagcgtcactgtaagtgggacaaccaaataccatttcttctgatgtgatgcatcaggaagtaccaggcaccactgatgaaaatgactaaaatgaacttgtatcaaagcaagcttccagtctgcactgttcagtaaggtagttgttagctacatgtggctaaagttaattaaaattaatacaattaaaaattttcttgcactagctacagttcaggtactgaatagccacatgtggctaatggctactatattgggcagtgcagatatagataatttctatcactgcggaatgttctgttagacagtgctgctctaaatctaatgattagttttcaggaaagatgtgagaacatgtaaacttgccaaatgaccccatgagactacaatcagaaaagtccagaaggcaggaaattctacatgacaaatggctccatttctgttaataacatgaaaataaaaggtaataaaaactttcttttttatagcaagagatatttagaaacatccattaaatgtaatctgtagaccttgtttggattctaatttaagaaaattgtaaaaatgcatttttgaggcaatcatgaaaattgcatatgaatcaggtattgggtattatgaagatgttcattttgttgggtgtgataaaaatgtagttacatttttaaaaaataaagcttaccttttagggatatgtactgaagtacttacaggtggcacgatgtctgggatttgctgtaaaacactggcggtggagggggcaaaggacaggatggatgcagaaaacgtggtaggcataaggttgatgggtgaggcaccatgataaggagatggggtgactatacttaatgtctctacatatgtttcagaatttccaaaataaaacttaaaaaataaaaatgccgatgcctacacattgccttctattactagtctaagaaaaacagatgaagaaaaaaggctgcctcttcatacattatttggaatttctgttgtgcaaaatggggtcacctaatttattatataattattgtcatatattgtatgaaatattttatattggaaagttgatcagtaacttcataaagatttagataaaatatttaatcagcatattttgactttcgggcaagtttatggaatacttgcttttgaatcaaaacgtgcaatttcttttattccttggctgacagttttgaattcaggtctgcatgttacattttattactgctttgtttttttcctgttatttcattcttcttgttgcttggttgccaggctggagtgcagtggcgctatcttggctcactgcaacatccgactcctgggttcaagcaattctgcctcagcctccaaagtagctgggattacaggtgcccacgaccatgcccggctaatttttgtattttttagtggagatggggtttccccatgttggctaggatggtctcgaccttctgacctcgtgatccacctgcctcagcctcccaaagtgctgggattacaggcatgagccaccgcagcaggcctgcaaaaatattgaaataacatatttataagccatcttcagccccaccaatatatagaaattttagcaaaaaggtttttttaatcactttagtagaaagtgataatgtcattgaagtgtaatttcttggccatctgctcctacagtaaatacttctttaagaaaaacgtatttatggctgggtgtggtagctcatgcttgtaatcccagcactttggatggccgaagtgggaggatcgcttgagctcaggagtttgagaccagcccaggcaacatagagagaccctgtttctacaaaaaattaaaaaaaatttagccagctgtggtggtgtacacctgtggtcccaactactcaggaggctgaggctcaaggatcacttgagtccaggaggttgaggctgtagtgagccctgattacgccattgcactccagcctgggctatagagcaagaccctgtctcaaaaaaaaaaaaaaatctatctgtctgtgtatccatccatccatccattcatccatccttagttgcttccattaaagtatttgagggataatacaataacatataataacaaccacttatgttttttactgtatgttagacactgtcccaagtactttattaatttaattctcataacaaatcctgtgatgtaggtgctattatctctattttgtakatgaggaaaccaagacacagaagggttgaacaccttgcccaaggtcacactgctagtatatactggaactgggactcaagcaggctggctcctgggtccttgctctcgaccattgtgttttgtggactgtcatgtaacatactaaatgaataaaaatactagaaatatctataactgtagatttgtcgtggttaagaacaagacctttgggtcattgagacctggggattcaaactccagctcagtctggctctgtgcatttgagcatgttgcttaatctctgagctccagctcttcatcacttaaaggtaactattattaaatagtggagaaagcaattaagagggatagtaatgagtgcgattatgcctggattttagctgtgagcttaatggcagccaaagcaaaagaagaaatacgagttccatcattcattatgtaacacaaagaagcatacctgtttgcaagcatgatacattttcctggtatagcatttaaacagaaactttgaggtgtgattttttatataagacattgaaccagaaatgaataagttagagcaaatatggaagagtcaattctcatracagtataatgtaaggcaaaaatatttttgtggaaggctacattaattgggtccaartatgttgctttttcatgttttttgttttttgttttgagacagastctctctgtgatgcccaggctggagtgcaatggcaycatctyagctcactgcaacctctgcttcctgggttcaagcgattctcctgcctcagcctcccaagtagctgggactacaggcatgtgccaccacgcctggctaatttttgtatttttagtagagatggggtttcaccatgttggccagtccggtctccaactcctgacctcaagtgatccgcccgccttggcttcccaaaatgctgggattacaggcatgagccgctgcacccagccctttctagtgtttttgatttaaggaaaagtcctagaatatttagaatggaatatgtgaatagcatgttcaatagacagacttccctaaacacgctctccctcagataagcttctgaaaggagctgccatatagaaaatctcaagtttttctctttggtggatcccagaactgccagcatcccattagctatagagggaaatccatgggtttggctgttagcaggtggaaggagaaaagctggatccaaattcttcttamttgaatggatggtgttttggtcaggttctttggtaataaagaacagaggtttacatgtctgtggctgaaataagatgataaagactcatatgaaatgattaaaggggtgggctgtcagaggaattcaaacatgaactgtaactgggttgcacttcacaggcaccaratacggaggacagtttggattccagatggctccatagactgcactggcagagtgtctgtgatttccatttagtacggtatccccagcatctagaataatgcttaacatataatagaccccagtaattacctgttgagaaaataaataaaaggaagtagtaaatcttcactctagagctttatcaaaatggagaagtgagtggcttcaagtacgtgattgataagagctgctgttagccggctatgctcttggtccttcacatatattattatttgagtatgttcagtcctgtgaaggggtgatggtaccctcattttactggtgatagaatttaaattcaccagattatgacttgcccaagttcgtgcagaatactratttggagagttcaggtctacttgactctaaaccttgttctggtaactgatgccctatatattgaaagtacaaacagggtggtaaacagaagtaaacccacattaccagatattaagaaagcatcttaacagctgttttgagggatttcatcagaaacattttaatatcagcctggtctgaaatatcagaaaccatttttctctggctttactttccagtgctagggaacttctaccaaacaaggtaagcaaactcttatattactaagttactagtcagagtttttaaagtaaagattagccactggctttccatttctccaactaaaaagaaattgtggggactgttttacagggcatgaagcagatgactaattgtcttataggatcgttttaattttgaaataactataatctgggataagtaaytcatcacatatactttaatatgtgtaagtgtcatgtggttgaggactttctcatccttgtttgaaacygtctaggggctctgtgtggtggttcatgtccgtagtcccaacattttgaatccaagcactaggattgcctgagcccaggagttmgagaacagcctgggcaacatggtgaaactcccatctctgtaaaaaatagaaaaatttgtcaggcatagtggtatgcacctgtagtcccagctactcaggaggctgaggtgggaggatcacctaagcttaggaaggttgacgctacagtgagcagtaatcatgccactgcactcgagcctgggcaacaaagggagaccctatctaaaaaaaaaaaaaaaaacacacacaaccatgtgggattaaggttttatttcactggtttatgcttctctaccaaattatggttaaatgcattgtrtctcaatgagataatattgacattgaccttatacaactgacattttttataggtatcagtattatctgcaactgaagaaagatatcttggaaggaagtattccttgtaccttagaacaagcaattcagctagcaggcttagctgttcaaggtaaataagatcaattcataatgaaatggttctatcagattaaaatgtgttacaacaaaatagcaagggatttttaagttatctatctatatacatctttagtagtgtttatatattagtgaaatattctgttatctaaggggcttccttttgggaaaaaatgaacttggaatacctcaatgaaatatgagacttctggaagttaatcatgttataggtcaacagagcaaacagtacaataaatagaagtatgtatatatgtgtgtatacacacacatatgtacartcatatgccgaatgacatttygttcaacaaaagacctcatataggacagtggtcccataaaattataacactatttttagcgtaccttttctgtgtttagatacacaaataccattgtgttacagttgcctacagtattcagtacagtaacatgctgtataggcttctatgagcaataggttatacaatatagcctaggtgtgtagtaggctatacaatatagcctaggtgtggagtaggctgcaccacctaggtttgtgtaagtatactctgatgtttgcacagtgacaaaatctratgatgcctttctcaacacattcccatccttgacacatgactatatacatatacatttattaatactatgctatgtattyatctagttcaaagactttgtctgctaataggtcatattttaagaagaaagatatgccagtcagtgagtttgatgaggttatattcrcttacagtttaagtacacttcatatgtttggtttctttttatttatttcaataggtttttggggaacaggtggtgtttgcttacatgaataagttcttcttatttatttagttacttttttttttgagatggagtctcgcyctatggaccaggctggagtgcagtggcacgatctcggctcactgcaacctcctccgcctcctgggttcaagcgattctcctgcctcagcctcccgagtacctgggattacagatacctgccaccacacagacccaactaatttttgtatttttagtaaagatggggtttcaccatgttggccaggctggtctcaaactcctgacctcaggtgatccacctgcctcagccttccaaagtgccgggattatagatgtgagccaccgtggctggctatggttacatgaataagttctttagtggtgatttctgagatttggctgtacccatcacctgagcagtgtaccctgtaccccatgtatagacttttatccctcaccccactcccacttgtttggtttcttaaatggttgtcctgaattatgcagtaataacatcaatcataatagataaagatggctgggtgcggtgtctcacgcctctaatcccagcactttgggaggccaatgtgggaggattgcttgagtccaggagttcgagaccagcctgggcaacatagcaagacctcatctttaaaatgtacatatataaataaagattctgcatttcaccagcatttttgaattgtttatttttttcatttttacatgtctgatatacatgtatttacatgtatgtgtgtattttcctttttttggagacagtcttactctgttgcccaggcttgagtgcagtgatgtgatcgtggcgcactgcagccacaacctactgtgctcaagtgatcctcccacctgagcctcccaagtagctgtgactacaggtgtgcgctaccatgcctggctgatttttaaaattttttatagagatagggtcttgctatgttgctaggctggtctcagactctttggctcaagctatcctccctccttggcttactgaagtgctgggattataggtgtgagccactgtgcctggctgggaagatttctgatggggcattatttcaaacaataactggcatttagccttgggagtgaaatttaatcagaataattattaataaaactccttcagcyataagaaggcatggagacatgtatcatttttaaacaaatgcctgatgcacatggagccacattccttttcaaggtactttagattttcttaagtatcacttttggctttaagaattactttttcataagcattttgctgaattgtcaattttttaaaaaatattaaaaatttcaacacaaatatatcttgctgtaatatattcaagtggtctaagtctattccccagaggtcatcagtactgttgacaatttggtttctccttgacattttcctgtacataagcaagcatatatgattacagggtaggttttgtttgcattttaactgtaaaatgagatcatattacatagagcttgcaacttgtttttttatttaattcataggcatttttccaagccaagactcatatctgcctaattaacacttttaaaaagatactttaaaaatatactttatatagctataacaaatttgacttctgaaatattagcataccatctagatatactgcgtattgaattttgttgtgcatattttgcaatgmaatttaaatataattaacgtgaatgtttgtcattctatatagcggattttggtgactttgatcagtatgaatcccaggactttcttcagaaatttgccttgtttcctgtggtaagacttcttttgacactgggccttttaaaagaaacagtttattcctatacccttaataatccctgaaatgaaatccgtatgatagacttactgtcaggaataggattataaaaaaaaattccctcttataaacatctcaagtgtgactgctttccctgttgtagtcatcttggtccttgtgaacccacagaaactgaagggtctgtagtcactgcactgtgcctggagacatttgttttctatttgtgagtttaaaaagaaggattcattttcagcttctcaggaagcatgcacaggttttgcttttaactgaaggtttgaaaccttacaaaattatattgaggaatgtcgcttctcatcagcaatttaaaaagtagatgacaaagacactgccttctacttttataaagtcattactgatggaagggacatggaaactgcattgcaacaactaaggaaggtgtggtatgctgttctgagtgtctacacagtgccagagaacgcacaagatgtttttatcttgctgggctcaggactggctaactactgtcaccaacttgacataactcagctgaaactttccctggaattgagaaggtggggcaagttttttttttttggctcttgtgagaagccagttaattccttagaaagatgattacctatgtaaacaaagctcccatatagtaacaatagtcataattttgcctgatagtgacragagtcattaacagtcaatggccatgattccttctaagaaattggggtgaattgtcacatacttaccactgtgtgttttcttcagggatggttacaagatgaaaaagtattggaagaagcaacccaaaaagtggccttactacatcagaaatacaggtaactctaagaaataagacatggaaatagcatagaaccaatgtctgcttgaatttgaaatattcaattaaatatttaatttacatgattaatatttatttgcccaactaaatttggaacattactgccactactattacaagtagccaacatttatatagcactcactgtgtgtcatgtgctgttctaagtaagcacttacccatattacttatttattgtccatgttttaccagtgaggacactgaggaagttgaaagcagccagtcattgaagggtgcccattttttactgcatgtagtaaaggtttgtttgataacctcaaacaaacctgtataggttaacgtaaaattaggatgatttgttttcttttatgatacagcttagcaagtacagggttacttccctctctatacctatggaagctgtgtctgtcacctggggagctatgctaagagctatggtgcttattactctgaactatgcttctgcatacctttgtatacttgtacatattgacgttctttcatgatgaatctctgtgttgcctgtaagaaaaaatactcttctggataatgctaagtcttattctaaaccaactaccacacagttccacatatagatgctccttgacttgtgatggggttaagtcctgataaacccatagtaagttgaaaatactctttaagtcgagatgtatttaatacaccagtcctgctgaacatcatagcttaccctaacctaccctacgtgttctcagaacacttatgttagcatacggttgggcaaaatcatctaacacaaagcctgtaatatattttataatgttgaatatctcatataatttgttgaatactgtactgaaagtgaaaaacagaatagttgcgtgggtcctcgaagtacagttcctactgaatttgtatcacctttgtaccactgtaaagttgaaagtcattcagttgaaccatcatcgtaagttgaggactgtctgtactctatcattaaattcttataactactcattaagataaacattattatctccatcttaccagatggggaaaccaagctcaaaaagattttgttatctctggctgggagcagtggctcacacctgtaatcccagcacttgggaggctgaggtgggcagatcacgaggtcaggagatcgagaccatcctggcaaacatgttgaaaccctgtctccactaaaatacaaaaaattagccaggtgtggtrgcatgcaccggtagtctcagctactcagaaggctgaggcaggggattcgcttgaacctgggaggtggaggttgcagtgagctgagatcgtgccactgcactccagcctggtgacagagcaaaaaaaaaaaaaagaaaaagatytagttacctctacgtgtggtagaggtggaaattgaaagcagatcagtttcattagaacctattgcttatccccttccaaataaaataaacttttgcctctagtctctctccactcaaatccacacagtgactcacaaaagattaatctccctagaatatcagtttcctcttacctctctccttctccttccacgtgctcatgggtattttcatgctttctactagcccaagttcattaccctgggattaaaggcctcctacaagttggttaaatcctgccttcccagctttaccttctgctggacagcagaaccacatgaaccatttcttttctagcttaattggtccctcaggcacacattgtcctgccttttgtcacttccatttattcatttgtgcatttccttaaaagatagcttagtgttcttattctgcattaagcagaggaagagtgctggatgctatgacacaaagataaatagaataatttcttgtcttctaagagtgcattcccagccctgcaatatgagggctggcaggacaacccactatagtaattataatacatataagaagataatgagtgcagttagaggggtatgggcggaatgtgttgggactgcatggagctgcggcattggagaatcccagaaggtgatccagaggaaatgatgcatagacagagtcttgaaggatattagggattggccaggtccacargtgagtcacaggcacaccaagaagagggattctcatgtgcaaaagcccagaggggctagggaacatattctatctgaagagatgcagagtttgggatggctgcagtgtgggtgccttgaggacagcggggagcatcggaagatgaggctggagatgcaagtctgcatgcacttgggcactcctcctttacccacactgccttcctacccatcctagtagtgttgcactcacctgagcaaaaaggggttttcatgtagcctcctcgtacccttattccctgcgttcgacatttagcacataattctcagtaatgcctcatattttgttgtttttatttttgtttttttttgtttttttgttgcccagactggcatgcagtggagcgatcatagctcactgcatccttgaactcctgggctcaagcagtcttcccacctcagccttccaagctgctgggactatagatgtgcaccaccatgcctggctaatttaaaacatttttttttttgtagtgacagggtctcactatgttgcccaggctggtctcaaactgctggcctcaggtggtcctttgtccttggcttcccaaggtgctgcggttacaggcatgagtcaccatgcccagccctgatatttgggataataagcaattacttggtggtttaagaaaagttcaagatttcaccctaagatttttyagggagttgttttatcccccaccttcccactcatctgccttaagtatggagagcaggatctcatgtgataccctcagcattcagcacatactggttttcagtaaatagcaagattgatatagccaattatagatgcttagaaacgtgaaatgtttataatgtcttatgctaaattgacatataggttttaagaaaagctttattttaaaccattttaagcttgctttgtgaacaatcttgcttcttttgggttgcagagggctcacagctcctgatgctgaaatgctgtacatgcaggaggtagagagaatggatggctatggagaagagagctaccctgctaaggtaagtgtggcttggcggctggggctctttaaagttaggcttacaaatttgagaaaatcatggggaaatccaaggatgtccttatgtgcaaaggctgaggacgtgcaaaactctggaaacttaaaagctgaggtcctggtgaccaaagttttgtggtaaaacacattcccattttgtggttcatactttgaaatggtcttgaaatagagttcctaaggagggccaaactttttcaatttttatacttacctataagatcatagatctcattcagacttttgtcttcctkaatagttactctgtaggtcttcggaactttctacatctgggaaaccagtccagggaactctagcagcagttcctctgcatctgcttcctgggtgtttcttcttctgctttctccttgtaggatagccaaggaagtgacatatccattggagcgtgtcttgaaggtatctttgtgaaacacaagaatggaaggcatcctgtggtatttaggtatttttcttacctctttttgtatgttttctatggctcctgttggtgatacattttttagtacttacagcagttaaattgttcacaagtctataccaaggtctcattaaaaaatggaaataattcccttcctaggaaaaaaataccatctgaatgcaacagtccttttcaataagccgctttcttcaaaactctatgtccagagtataatgcctataatgacggcctattataaaatgcttaaaaatgtgtgaccctttttgtgccatatggaggccattctttgctttgatatgaatgtttaatttgagctctggtttccaaggctatttattggttaatttatttattgtgaggcaaggtctcactctgttgcccaggctagagtgcagtggtacagtcaccactcactgcagccttgacctcccaggctgaagtgatcctcccatcccagcttcctgagtggctaggactacaggctaatgccaccatgcctggctaatttttgtattttttgtggagacagtttcaccatgttgcccaggctagtctcaaactcttgggctcaagctatctgcctgcctcccacagtgctgggattccaggtgtgagcccactgtgcccagcctgaagggctctttcctatgaaaaatatagagctttgttttgactctagttttgtaccaaaattcctaaaataccagtatctaagcaaatttcaattattttttataatgttggttttttttgctgatataaaaaaagatactattcatttgtggaaatcttggaatgtgaagcaagttggaaagaatatatagcgatgtgctaatagtaactgactctgaacaatgaaagtacaggtgattttaatttcctttatagtattctgtgttctaatttgtatcttaaagatagtaagttggaccatattgtacaatcccctacctttaattccttaaaatctgttatctggaaaacccaaagttcatgtccaaccaaaagcttatattgtttttataaggcaggaaaacatattctatcacttytgttttttggttcctttgtgtctaccatttgttgagtgcttatcatgagtcagataaactatgctgagcattttttgtgaattttttttagtgtaatcttcataacactgtcagcagtaggtattaccaccactttgcacgtgtgataattgaggcttagaaaagttgtgatttgtccatggtgacccagttattaactggcataactaggactagaacttggatcctccactttatgcgtgggctcttaatcgctgtattaaacagcttttattctctccaccgcctactcactgcccgccccacaacacacacactactcaagctttctaaaccactcctaccatttcttcttgagaactagtttggcctttgaagagctttttctctaaactgacatctcctccctcacttcctttgctttactgcctcttgagccatgaattctccatggtgattatgacctcagagagtacgcatcacttggggagcagaaccccattcctagaatgcactgccctgggctgggtggctcccctttggcagttgctctctcgtccccaagccacttatattaacccttcccaacatgctgagttgggggtcagggagaggagaggaaaatggatccgtggcttcacctgaagagcagggctctgatggtgcccaaagtgtcacatggaaacttgaggcwtctacctggcttcctttatcactggataggaattttcacagttgccttaatgtgatgctaataatctttagatttaacaaacaacggaatccgtactaagttgattttattttaatacatttaaaataaatctaatggagaaggataaaattttttcttccataattttttctttttataaaattctgtgattaataaaatcaaatattaacatataaaagctaatacgataaaattagaaagtataagattttgaatcctagtgatcacttccagaatagttcactctttgagttcctggcatttcaaatttatcttcaccctgaagcttttcagagcacacctcccccacttttgtgccttattttaatacctgcagcacttaaaagttcttgtttgcttctgtgttctttctcccacctttcccctccaactgtgcgaatttgagggaagcactgtaactcactaatcttagtgtccctaggacctactgcaatttctggcattgttataataggtgtcttttattttgttgaatgaataaatggggcattggcaatcagctaagagagggatcttccatcaagcaaatctgacacatgagaatgatacattttacatcttttaaattctcttttccctcatttattatacatgagtttactttttgaactagctgctgttacttcaattagaacattcatgctagctgattaaaaccactgtttttttttttcttttttctgttttggttttttttgagacagagtctcgttctgttgcccagactggcatgcagtggcrcaatcttggttcactgcaacttctgcctcccaggttcagacaattcttctgcctcagcctcccaagtagctgggattacaggtgcctgccacctcgcctggcctagtttttgtaattttttttttttttttagacagagtttcatttttgttgcccacgctggagtgcaatggtgctgtctcagctcactgcaacctccgcctcctgggttcaagcgattctcctgcctcagcctcccaagtagctgggattgcaggtgcccaccaccatgcccagctaattttttttgtattcttagtagagacagggtttcaccatgttggccaggagtctgaaactcgtgacctcaggtgatccacctgcctcggcctcccaaagtgctcggattgcaggcgtgagccaccatgcctgacctagtttttgttttttatttgtttctttgtttgtttgtttgaggcagtgtctcactctgtcgcccaggttggagtgcagtggtgcgatctcggctcactgcaagctctgcctcccgggttcacaccattctcccgcctcagcctcccgagtagctgggcctacaggtacctgctaccacgcctggcgagttttttctttttttttgtatttttagtagagacggggtttcaccatgttagccaggatggtctccatctcctgacctcgtgatccacccaccttggcctcccaaagtgctgagattacaggcgtgagccactgcgcctgggctagtttttgtatttttaatagagacagggtttcaccatgttggccaggctggtctcgtgttttttgttttttgtttttctcaaaaatgttaccaaatgctaacttacacgtcaggcttagggaaaacttgtgtattctatctccttgtttcccccatgggcactcacattgccagttctctatttgctgttctttaggtggcatgacattgccaacatgtcccacaacaagtccttttttgcattagagctggcaaataaagaggagaccatycaatttcaaactgtgagtaaacattaggggtctgcatggaatgtttttcctaaaagttaacaagttctacttctgcgtgcctgtatgtgtttggaggcagggcagcattaaaatgataatattttgtaattgtataaaacatgcagttttatcatatagcattttgcaaaatggcagttagcaaaaaatggctgctcagtaaatgctgagtgaatgagtctttggataactactgtctgatcatgataacctttaaattaaacttcagggattatgtgggggagaaagtaagcactgatatcttaaatttcattgataaatgaatagctctgaagaaatgttatttaacagttacttgcttttgctctcttgacaaaggcaatattgagttactgagtcatatttttgtttaaaaatgtctttgagtatatttggcaagaataaaagttggtatttttatagtttttagattcccaagtcattttgaaactgtttaatatgagaatcacactgttagaacagattgttttgtcttcataaattaaatcctacttgtggtattcataccatrggcacagtgttggaaaatgaaaggcttatagtgttctgaaagtgactttgtcatatgatgtcacccattatgtctttagacaaactctgcattaaacgtatcaagttgtatgtgtgctttcatattgctttatgcctattttgtttgctaggaagacatggaaacagcaaaatacatttggagactctgtgttgcgcgacacaagttttacagactaaaccagtgtaacctgtaagtatgtcctgctcatggaaattatcaaaaataatgaatttagaaattgtaatcttgagtatactgtatcatcaagaaagacattttatcagttgacatcttttyttgatcctrtagctgttttcctattttagctttggaccaacttgtaataactacattgtatrcctctaagatttatttcaactagttacaagaaccattgtaattcttgaaaggtaaaaagggaataatatcctttatttgtttaaatcaatcctctggtaagcattttkagtcattaaagattattcagcttttccagctatctgaagaatttttgcccctccttcctggtgtgcatttttcttagcccacatgggtttcttactgtttgccagatcaataaagcacacggtgatattgcacatataaaatattgtccttcatctatactcccctccagcctctgcaccatatctctgctttcctgaatagcaggtttcctcaagagagttgtgtatgcttgtatgtttccttccttccatcccattttccctaagcctccacgttactgatgctgcttgttgtggtcaggtgactttcgtccagtgatcatttcatgagttctctcacttgaccgctccgcagtactgatcctccgacagctccttccatccttctggaatcctgctcttcttcggctgccaggacaccaccccctgctcggcttcctctttctaggctgtttcttctcagtcacctttgctggtttggtcctgaggccttttctccaaatcctttcgtctagggggcttctcctgacctgtcctccccctgagcccccggttcaagtgattctcctgcctcagcctcccgagtagctgggattacaggcatgcgccaccacaccccactaattttgtatttttagtagagacagggtttctccatgttgttcaggctggtcttgaacttccaacctcaggtgatctgcctgccttggcctcccaaagtgctgggattacaggcgtgagccaccgtgcccggccctccttgagctcttgactcctgcatcctaccgcaagcatttagtgtgcttagtcctcaataccactctgaaagttgtggtgaatatatactactgcctgtatattctgaaggtagagctggcagaacttgctgatgaattggatgtggtatgaaacctgaccatttttaccactcgtgttaacagcttagtgctggctgccactacttctcatcagaatactgaggtagccttctgactttcctgtttctgtgccttygctgcctgtagcttattttccatatgtcagccagaatgatcttagtttaacctgaatcagatcctgacactgacactcttctttttttttttttttttttttttttttggagacagagtctcgctctgtcacccaggctggagtgcagtggcacgatcttggctcactgcaacctccgcctcccgggttcaagtgattctcctgcctcagcctcttgagtagctgggactacaggcacatgccaccacgcccagctaattttttgtatttttagtagagatggggtttcaccatgttggccaggatggtcttgatctcctgacctcgtgatccacctgcctcagcctcccaaagtgctgggattacaggtgtgagccaccgcaccctgcccagatcctttcactcttcttaaccctcctttggcattccacttctttttttaagtaatttttttagtttgtttttgagacagcyctgtcacccaggctgagtacagtggcatgatcatggctcacagcagcctctcaacctccctgggctcaggtgatcctcccacctcagcctcctgagtagctggtaccacaggtgtgtacctggttaattttttggtgttttttatagaggcaggatctccttatgttacccacaccggtctcaaacttctggactttaggaatcctcctgccccggcctctcaaagggctggacaggtgtgagccaccaggcctggccccattttacttctaataaaagtacgaggccatacacagtgtggtccttgcctggtttcaaccttatgtcttttatcctcctccctgcttgctctgttccagccacagtggtatcctggctaggctgcagatgtgcctcaccctaggggatgctgtccttgctcttttcccaggtctccacctgccttgctccctcattgcagcctgctgtctggtcagatatgaccctcttcagaggctgtccctgattgtcctatggtaccccccttccactatgatctgtctctttaccctctaactttgttttgttctttatagcacttagcaccatgtgaatttctatatttgtttgtttgtttgtttgcctgtatcccctgccagcaggttagctctagagcagtgcttgaggacagacactcttccctgccttcagtgctatattccccatgccaagcaagggcctggctcactgtcggccttaatgaatttgttcagctaatctatagatacaggtgttaagagctctgattcaagatgtcttggtgctgtaagatcccttaggaaaatggtacgtcacccagaactgccaagataggaaaggctacccagccaagtgacatctaagctgagacccgaaatgttgcactcaattcccacaacctttctttaagctgtcctcttgtccctggtccatgtctggaggcacctcctggagctccctcccacttggccccccacgccctatctcatctgtatgcagtcagtcttctggatagataagcaaaatatgtagcactgctcttgaagttacatgtcaggaacaaatctgagcatgtgcctctcacccgccccgtcctgggtacaggattaagggcagactcctgaggtccttctctggacttagctgccccagcccagttggccttggagtctgactccaggaaggcatctttccttatcatgtgaatgcccccagcccaggcctttgctaaaatgcccttccttcccttctctgacagactcttagtcattcttcaagattgagtttaaaatacagcccccatagacaccaccaaacattcagtttgcttagtccttgacaccactctgaaagttgttttttctacctcttttataacaatgacctgaataattcataacaataatttagtaaatgcttgctctgtgtcaagcattatactgagagcttttattttctttaatccttacagtaaccctgttgggcacaattattactatcccattattgatgaaggtatggagacttacagaagtgaaatgtcttgccctgccacacaactagtaagtggagcagcaagactcgagcctgtkctcttagccgctgtgctagcctgttagagtagttcctgcctgcttttttcatattgacagatatcaactgacagatcattttcatttgatctgtctctcttgtttgatgaagctccatgagggcagggtctcctcttcctcatcttcgtgtcccctgtctggcaaggtgcccggtgcataagggcttagtgaacaatgggagccggagtgtggcagtkatgggagtcacaggggagaagagcacttttgctcctttgtctcttccttttattacagattgtaaatgaggcatggggtggaggcaaagtctaacaagggcattttgtcccttagcaccaggaaggaaggagaaaggctgtkgaagtkccttctgtcttgcagggtgtgagagaaactctgggcaggagcagcagtgtaaagataacatgcggggatgcccacccggacggggagctggccagtggtttgcatgtatggcccagtccctgtctcttctctgccttcccctgcaccatgtttgcatccgagtccccaycgctggtctggtgatgggattttcgtaagcactgacagggaggaggaacctgctttctttgtaaatatgggaagcggtttctgctaggggcctgggtgtatttgcatatgaaagtgttccccctggtggtgatattcagtagtgctacttgcctttggggttccctggggctggcctggttatccagccatatgtggcatgatttctatgcagaagtaagttctaagattcaagcagtagataatgcagtctgttggaccacagcattttcattttaaagactttaataagttaagagtgttcataatattgagccattattacctcagtttgtttcttctctggaaaatagtggagagtctacattttgaataaaccataaaacataatccctttccatgaggcatccatattggttggtggttagtgcctgttttttgtttgtttgtttgttttgttttgtgtttttttttttgcaaattaacaacttgtaataagtaaaagagggaagagggaaaagcaacaaatgattgattatggtgaatgagtcttagaaattcagctctagtttttggaatattgctatttattggcaagtgtgaacaaaactacattaatgtcatcagttgcatatgctatacctaaataaggaacacctgaatctttttaaaatggaatagttatgtttaaagggctgttttccaaagtttgctttcaatctctatatatccaatagattgtggcagtcgatttccatgagctattcctatgtaattacttatgattcattctgtagggaactaatatatttcattgtgagcgtttgtttcccacataaagtaaatgaagcttttaatattagcttttaaaattttgcttgataataaaatgaaaagaactttaattgttatggccatgttttaaaggctctcaatatagactgtttagtcatgttccaatattatgattctgaagtattggtagacttgttgtcatgggccagatgggtaaactaaagcgtgataggcatttaacaaaactgcccctggcctggaactggacggtggcttctggacatctgctttgggctggggtgactggtggcccaggagatagactcgacttgcacagaaaggggaactgtaatcccagggtgtcccctttacccccagtcctgatctattgtagtttattgctgcttgggatggccttatgtgactcatctaatcttgacccagataactatattttagtatttatacaatggcataatccaacagccttctccctccaccccctaacaaagtgcattagataacagaatgatcgttatccaaaccttaaaaatgttagatggataacaatctgtcttttaaaattataaagtgaggatattgagacttttatacttaatattcctttatggttgaattgggaattaaatgacataataatgtcaacctgttagatcagaaatctgcttcaaacccactgtctctcactctaagccccagaactggtcatgctgtaagcaccctccctgatttatataaggaaaatgccgrgagagttggggagtcatgagaggccccttggtgtaggtggctcccctgctcttttctgtgaggaaaagggaggatggtatccttcaacctgcaaagccaagtgatagagggttcaagagactttctccagaagggaaacttgtatttcagactgcagcaggccactcgctgagcgcagtgagatggctggtgagtgctccctgcagctcaggggtgttggtgaacatagcagccggtgtccaccttggttccggagacttttgtaatcaggagactgactagagtaggccctgcctggaaagggaaagagtttacccatcttcttggcctactgcagggcttgaagagactataggaagtctggaagaagatggagcagcccctatcccattccagtcccctgagccccagaagtgtagagaggacccagtagttcccatggatccatgtgaaggagcagggcaggaagaggtgggaggggagaggaggagcagccacaaggccaaacagtgggacctctgggtatggggacatggacccctggtggagccgaggagaggcagcggctttttctgagtaggttcttatatggataaaggtcagtgtcaccctggaaaaccacacatgtcggccggtcacggtggctcatgcctgtaatcccagcactttgagaggctgaagcaggtggattatctgaggccaggagttcaagactagcctggccaacaaggtgaaaccccgtctctactaaaaatgcaaaacttagcctggcgtggtggcgggcgcctataatcccagctgctcggaaggctgaggcaggagaatcccttgagcctgggaggtggaggttgcagtgagccaggatcgcaccactgcatttcagcctgggmgacagagcaagactccatctccaaaaaaaaaaaaagaaaaccacacatttcatggggctggagtgacactagggcctctccctccatcagtattccttcccagttacctgagatggtctctgctggctttgttcctctcccatcccacaatgccaggaagctacacctaaggcggggtttggtaggggggtgaacagtggaagcaggcatcccagagccaagtcagtgacctgtaagcagcttggatgcagccctggtctacccaagtgtaggctgggaggagagcatttattcttccttacccttactatagtgagctcaaaaggtgtaagtcattgagacaaacatttgctaggtatttccaccatctaacacttttatttatttatttwtttaaagagacggggtcttgctctgtcttccaggctggagtgyggtggtgtgatcatagctcactgtaacctcagactcccgggcttaagggatccactggcctcagccctcagcttctgaagtagccaggattataagcgtgtgccaccatgcctggctaatttttttttttagttttttagagatggggtcttgctgtgttgcccaggctggtcttaaacccctggcctcaagtgatcctcacatctcagcctcctragtacctgggattacaggaaggaatctattccttgaactatctattagtgcatgagctttcaatggcatctttttgtttatcaaaatcttaactcccttacatcgtataagaaaggaaacttacaaagcaaaattcagacgaggcttagaaatacaagctcagctgtaaatgcttagtaataagcatcactttagtcctcacttgttagtcactcatttgctcagcaaaggcaccagggataccacatcttgcctccacggagcttacagattagttggggttggggagcaggttggacacatgattgttagacacatacactcaggaatctgacagacctgctggttcaaatgccggttctactacttgtttgccatgtgaccaggagcaacttactgaacttacgtatcactttccttatctgtaaaatcaggataataactggacctcccttatgggtttggtgttcacattccacgagataatcatgtacagtccttagcacagtttcaataaataatattgattttacttgggctggtagacttktttcttttttttaaagacaccaggtcctagtatcccagtttcccaggtagaatatggtgggaattcgcagatgggatcgtagtgcactacagccatgaactcctggattcaagggatcctcctgcctcagccttccaagtcgctggcactacacgggcatgtkccaccacgcctggctcagcctttttaatttttattttgtcttctttggcacacagattctagtgatttcttctcagttatttagcagcacccatcaacatagtaactgcccaaaaagtttggaaaccacagccaacagttacatggttttctcttgtatgccaagctgaggatagctggtctcagagtaaactgcatttataagaacaatgccaagaagaaagagaaggttagactattagaactgatggcgtggctgcctgggtcaagcactttggcaggtacacgcttttgtagtttgttttcttagtagagccggctactacagtgggcagtgttcgcctccacactgggtgctgcggcaagagcgccaagataagctctcagtgtgggagggccgcccatgtgctgaagctctgcatccttgggttttgtgttttatttttgccccaggctgggcaactgtagacatgttgttggagtttgttgacagagaattctgttggcaatccttgtgaatttgtagtactttaaaagtttcttaagttcagtccatctagacagtgagtctctgctagactgaacacagggttcagaggacccagtttgcctaaacctagtcctgacaatgaagaataaccagagacaaagtaaatttcaaggctgcaaaaatgcagcgtcttcaaattctgggcactattttttttttttttttttttgagatggagtctcactctgtcgcccaggctggagtgcagtggcgtgatctcggctcactgcaacctccgcccccttggctcaagcgattctcctgcctcagcgtcctgagtagctgggattacaggcgcctgccaccgcgcctggctaatttgtgggcactaattttaaggaatatattaatgtgcagttaaggagtattttttattttttattttttattttttaaaacccagacacgccatgcagacttgtgtcaccaaaataaatactggaagaatggaatatcttttggaaaagagacatttatttttcmttaacagcctgaatactttccagtaacaaagaaatgaaattatttataaaagctagtaaaagcagttgtaatcacctgatgttaaaactagtatgtactagttttctttttatctcaagagtcttataaaaataagctaatattcagggtttttgaatataagatactagttttcagagtgctaagagtaatattaatttatgagacatgaggcttgatattatggtaaatttgcttaaatggattgaatattcactttgtcatgatggattttctagtaattagtccttagaacactgtaaccaaaggtcacaaaatatttttgtaatcagtgattatgtgttacataagtacatgaaccaggaataggtggtaaaaggtataagaaaaagtgctttgacaaaactacatgtcatcaacaaagccaagaatccagtgtgtttaggttcctagatcttgcagtaaaactgaccacacagaagaaaaaaaaatcttgcctttatttgaaaacaatagttacaaatgggcttttctgtgtctgtttcctttttttaccttattgtttttttaaagatagaacttgctgtgtgartagttgaaaatctcacattatcacattagtgtttgtcagcactccctaatacgtttaggtacttttttttttttttttttttgaggctagaatctcgctcttgttgcccaggctggagtgcaatggcgcaatctcggctcactgcaacctctgcctcctgggttcaagtgactcccctgcctcagactcccgagtagctgggattataggcacccaccaccatgcccagctagtttttgtattttcagtagagatgaggtttcaccatgttggccaggtggtctcgaactcctgacttcaggtgatccacccgccttggcctctgaaagtttgggattacaggtgtgagccactgcgcctggccttaggtgtttttttaaaaagtatattcaaaacaaatcagaaatttcttgcaaagaaaggtaaatgggtttaccatcggctcactgaaccaagtcttgtgctttgctttcccttggttccttagaggaaatgtagatttaaaaaatacgtaggtttgaaatttttttatatttgagttttttaaaagatggggtctcactatgttgtctaggctggtcttgaactcctgggcccaagatgctcccaagaggcgggtctacaggagcatgcttactgcacttggaaatgtagattcttgtcactaaaatcataaattcatttcttcattatgtttgtagtctgtggttaacagacttttaattaaaggcagttcttactgcttgaggcttctgggttgacagtggatggtcccccgggaggaaggttagtggagggacccagggctcccccagcgcataggagaaacacatttgcatttgcactgaatccagcttctcctgcgacaagtgtgtgggtgatgtagccttgtctctttccccactgcttatggctaatccagaggtttattggatgggcctgggaagtatgctctgatcccyttgtgggtccaggcgatgatgctgtgtggggagcctgaaaccacagggcaggttgacgggttggggcagcaggaaagggctgaggccccacgggccgacagagaacctcccttcttttctttgacttcatgacttagatagcttgtctttttttttgcctgagaagatttattattttacattcctatatcttgttttggtagaatttaagagagagtgtgtatgtgctcttctcagagtcatcctattttataggcaaactcagactgtcacagtgaacccaatcaggaggaggtcttcttcaaggatgtctctggtaagaaacaaggaaaatatgattgcttttttattttagtgatgtttttcctgaataaaatatgctttcaatgctgttaattttgagtttgaaccataaaagtgtattgatatttcatcatttttaaccaaagaaatggtaattttttcccataggtccaacctaatatttatattattatattatacatatttgaatattaggtctgaccttaatattaagaacttagactattggccaagagtaatcctaagttggtatatatttaaaatactagatgcctttaataagattgactataatacctataagcttcttatgttgaaatgtttctacaaggaaatgtgtatctattgcttcttgctcttagctttttagatgcagattttctggtggagcctaatgtccttggtatcagtcatagggcttgacattgccatttggggaaacagaaatgctagatatgttaagaactactgtgtcttcatgtttattttccatatataatatatttaattcctttagaagtttttttaacagaaagaatccagtggataataactttacctgtattacataagcaatgtgtttcaaccctgtgtcaaactctccatttcttagcctaaaccccagccctacgtgatgcctcccccaccgcagttgcactataatggacattatacagaaccatatgcttcttcccaaggtaaagtacactgtttctgccatgccttacatagttatgactatggataaatctgtgaatgcttggagatcatgaagcctggacagtttttggctgaagttgcaccccaaattgcatcatgataatagctatcctggattcataaaagaagccaatatattgttttttgtttgtttgtttgtttttttggagacagagtctcaatgtgtcacccaggctagagtgcagtggcgtgtctcagctcactgcaacatccacctcctagattcaagcaattcttgtgcctcagcttcccaagtagctgggactacaggcacgccaccacgcctggctaatttttgtattttttagtagacatggggtttcaccatgttggccagactggtctcaaactcctgacctcagatgatccasgtatatttgggttcttgaatgtatgtaaaaacatgcagtatcaaattttgatgctccactggtctcaaatttggccaatgggaaactatcaagctggttcctgtgtccttttaccaccaccctattagcctttaagtgcttctttgctatctgacaaagaattcccagggttacttttctttccctgccagaggctttcctattgtaaaagttaaacacatgactactgcagttttcacatgagaagtataaggaattgtatttataacaaacccccaagctgaagtttaagcagtcaattaacatttactctatactctctctgtrtggggctataccaaatgctaaggaggtttatgcagatgagtatttccacatcttaagaagtttatcttcagcctggaccacagggccagaccctgtctctaccaaaaaaaaaaaaaaaaaatagctgggcgtagtggtatgcacctccagtcccagctactcaggaggctgaggtaggaggattgcttaagcccaaggtgggggtggaggttgcagtgagccaagattttgtgctactgcactccagcctggatgacagagggagactatctcaaaaaaaaaaaaaacaccttagaatctaatagtttaagataagacaagtgcacaaataactttgtctttctcccctgaacccctttttcgtggagaatggggtcttgctatattgctcagggtggtctcaatctcctgggcccaagctatcctcctgcctctgcctttctaagtgctgggattataggcctgagccaccactcctggcacaaataacttgaatatgatagtttttctgagacagcatgtgcaattaccatgctcctcagtggaagagagactcatcacattggggagattgagaagaactttctgtatctgaaaagatgggtggatttcagcaggtagaaaggcaggaacttgactggggttgctgttcctagttttggggatagtgaacgccaggcacagaatgaagcagggtgtgtttggagagtagagtggtccaggtttcctctcgggtaaggaactggtagggagtgatgcatgaagggaccagaaggtgggatgtgactgtattgtttgtgtcggccctggtgtaaaagatgagggttttcatgcagtgaggtgggtagtagagagcagggctttgggtgtagagcctgagagcatccccctcaccatgttcttgtatttcctccctcttgcaccctgcccttgtctggtatttgcaatcccggcccctcccacttccaggacctggctgtcctctgcattgttagtctcactttgccactcattctcttccctctgtctataaacatcttaatattgttcattctcctccctttaagtaatggtttgagtgatctgctttcttttctcactgacttttttttttttttttttggagacggagtctcactctgttgcccaggctggagtgaagtggcgcgatctcggctcactgcaagccctgcctcctgggttcacgccattctcctgcctcagcctcctgagtagctgggactacaggcacccgccaccacgcccggctaattttttgtatttttagtagagacggggtttcaccgtgttagccaggatggtcttgatctcctgacctcgtaatccgcctgccttggccttccaaagtggggattacaggtgtgagccactgtgcccagccctttctcactgacttayaagagtactctctgtgtgctgcttctgcttgctggttacccgcccactcctctgtctttgccactctgttaaagcggccctctgggagcctcccagcacccccacatcccctcaccatcacattcaagcctttgtaccttctggaaactctcctggcatgctaggtttttccctcctccttcccatcagtattgtttggtgagctctgcaggtctgtcctgtggctttttccctccctctgtgagcttcccagggatctcatctacatttaacatttcttttcttttcttttcttttcttttgagatggagtttcgcttttgttgtccaggctagagtgcaatggcatgattttagctcactgccacctctgcctcctgggttcaagcctcagcctcccaagtagctgggattacaggcatgcgccaccacgcccagctaattttgtatttttagtagagatggggtctctccgtgttggtcaggctggtctcaaactcccgaccttgggtgatctgcccaccttggcctcccaaagtgctagtgttacaggtgtgagccactgcacacggctgtgtgcaggatcattcttttgcctggtgttcgagactccacacaatattccctgagcctgcccttccaaccttacttcccaagttattttactcctctgtagctatctgacactctagccaccccagcttgcccaggggtgcaccctggctttgccagtgccgctctgcaccctcaggtgcccttaccccatgcacccttccgttcacatgctgccatgcagaccggataggcagggctatgctgtgctgacaaaatactccattccaaactctcagggaagtaataataaaggtcacctgtccgttgcacactgtactagcaggagggctctgccctgtctgagtctgccgtaggggcttgagctggagaggctcttctctctggaatgttgttggtcagtgttgcagttggaagagagcctggaagctggcttttaaccctctgtgcactttcccttgaccattactagtcgcattgttgtgcctgatatcaaggggtgaggaggggtaaccctgcgtgctctgagaggtggagagacctcacttctgatggaagctggacacgcccaccccacccacttacccctcaagtccccttaactgccatatcttgtgaggtggttcttggttctctcttccttgtccccatcaacccaactcaggctggaaatgagcatttcttcctctggactcctgtaacccttcatctcttctcccttccttgaattatggtgatttcatgcatacctttccccttttcttgcctgtattccaaccatcttttcctccttctattcttagtattgccttttccacataacagtctcataaatggctagatggtttgtggggtgcagaagcagggagactaggtgtatatagagctagttcagacaagctggggtaggggcccgagctgtggcagcagtgaggaaagggggattgcagagatggagccatgaccaagctttgcataaatgaggaaagcacagtgacatggaagtgctgtgtgtcagcagaagaataccatggagatttgagtgctatttcctcacagctgcatgtgccaccagaataaagtgtacccactggattgtggtgtattacttaagtatcaccatgatcacataaatcaccatggagctttcgaagcacaaaaagaatgcctttcagaggaaattgttatttgaaggagttggctgctgagtgttagaaatcatctagggttagaaatcatcctcagtaacagagggcaggtgagctacaaattgactagaagaaacatggcccctgtcatccctgggcagggacacatgcatagctattttaagattaggttaaactgattctgttagctgcaggtctggatcttcctgaaacatgggggccagggcagggggcagctgcagctgtttaatgtggctcctcttggcttctggacactttatgggctgtgtggctgctggtgacactgttggaccagagaagttcagatcctgctataccattacccttttacagtcgaagctctcatattcatttgggaagaacaataaaaatttccagttaaggaaatgcttacagacagttggtgcttgaactagctcagcagcagcaaggccacatccctacccagggaagaaaggcagagtccccagcccagtgccttgaatggtatctctgcctcaacttccccagagttccaaaaagtctgctagtctgctgtgggtgtggttcgtttaagacagggtctcactttgtcacccaatgaatgccaccccttaagtaggcagagccatgcccatcctatagatgaggaagccgaagctcccagggtcactcagatagtgtggctaaagctaggtcattctagcggggatttttacaagctgtgttaaaaatgtcatcagaggtaagggccgatctcagtatttggttggagtaattagtccatttaaaaaaatctcattttgaactcattttttctagataacctctttgtgcccaaccagaacggatactactgtcactctcagacaagcttggatagagcccagattgacytcaacggtcggatccgtaatggcagtgtctacagtgcacacagcaccaactccttaaataatcctcagccctacttgcagccctcgccgatgtcgtccaaccctagcatcaccgggagtgacgtcatgaggcctgactacctcccgtcccatcggcacagcgccgtgatacccccgtcctaccgccccaccccagactatgagactgtgatgaagcagctcaacaggggcctggtgcatgcggaacggcagagccactcgctgcgaaacctcaacatcggcagctcgtacgcctacagcaggcccgcggcgctggtctacagccagcccgagatccgcgagcacgcacagctcccctcgccagcggccgcacactgcccgttcagcctgagctacagcttccacagcccgtctccctacccctaccctgccgagcggcggcccgtggtgggcgcggtcagcgtgccggagctgaccaatgcgcagctgcaggcgcaggactacccgtctcccaacatcatgcggacgcaggtgtaccggccacccccaccctacccgccccccaggcccgccaacagcacgccagacctgtcccgccacctttacatcagcagcagcaaccccgacctcatcacgcggcgcgtgcaccwctcggtgcaaacgttccaggaggacagcctgcccgtggcgcaytcgctgcaggaggtcagcgagcccctcaccgccgcgcgccacgcgcagctgcacaaacggaacagcatcgaggtggccgggctcagccacggcctggagggcctgcggctcaaggagcgsaccctatccgcgtcggcggcagaggtggcgccgcgagccgtctcggtgggctcccagcccagcgttttcaccgagaggacacagcgagaagggccggaggaggcggagggcttgaggtacggccataagaagtccctgtcggacgccaccatgctaatccacagcagcgaggaggaggaggacgaggacttcgaggaggagagcggggcccgggcgccycctgcacgtgcgcgcgagcctcggcccggcctggcccaggacccacctggctgccctcgcgtcctgctcgccgggccyctgcacatcctggagcccaaggcccacgtcccagacgcggagaagaggatgatggacagcagccccgtccgcacgaccgcagaggcccagcggccctggagagacsggctgctgatgccctccatgtcggagtccgacctcaccacgtcaggccgctaccgagcccggagggactctctgaagaaaaggccggtgtcggaccttctctctgggaagaagaacatcgtggaagggctcccgcctctaggggtaagccacgcggcgagcagtgccgggccaggggaccgcgcgttcgccctggcgcttctttcactcatcacgtcccgtgtttttcagctcctcttgttcttttaacgttcttcattcccccacgtcactctctttttgtctaattctgaacacatttaaatttatggaaatcatggggatccacttgaattttagtggttttactggagataattattatagatgaagtgaaaaggtaaattcacagggttttgtcgaaatggaaaagatgaatgaaatgttttagtaatgcactgttaagggaaagacagttaagatttcattactttagccacgattgctttagccacccattaaaaatactgtgggtgatgtggcaccccaggggtgcatttgtttagtttgctcaagagatatctgaaaaaagcatccaggaaagtgtacccaatcctaatataattctccaggttggagtgtgtgtggatacagcttacatatcttggccgtgattctccagagtgattctggagttgggaaggtggcactttgttaaggcaaatcctgagacgtccaggtttcttaaatttaaaagaaagatgaattcagctgagaatctaaggaaagtccccggtagaagatgcagttctttaatattcagcctaataaataaatatgaattaagcactttttacctactttgaagcaaaatataaaaaagcatagtagcatcatctctagctaccatccttggagcatttgccatgggccaagcatttcctctacttttgtggcctatttacagtaagcctattgttatgcctgttttacagatgaagaaacagacttagatattaactaacttttccaaggtcacatgactagtgagtgactgaactggaattttaaacccatacttagaagcccattctgttatcrtctacactgtagatgtatgttctgcattgaagtatactgtatatgttctattaagtcataattgcttgttgaagccttgctagtctttcactgaaacttttaaactcagtccttaacctgggactaagcatctgcggccttgtcatgaagtgtgtccaccgaagtgattttgttgcagtgctcaggcttccagctcttcctggcccacatctccactcctcatgccctgcacttgagccaggctaacttgattagggcctccatcctwtctcctgttggcttccagtgtcctggcaactagggttctcctccccccatcgctgctaaactgcaaactccgacaggacggctcatctcaagtgtggttctggcctagtgtatgacatcctttaagatgctgcaaacatcttgctaaacaggaaaaaacgcacactattatagtacttatgaaagagattaatgtacatagacaaaaactacttaacaaaaaaagtaccacagatttaaatttgctttttttttttttttttttttttttagaacagtcttgccctgttgcccaggytggagtgcagtggtgtgatctcagttcactgcaacctctgcctcctgggttcaagcgattcccctgccttgtgatctggctgcctcagcctcccaaagtgctgggattacaggtgtgagccaccacacctggcctaaatttgctttcttttaataagttttgggtttgaattttaagttgatttttaaatttttcacaagtatgcaacataactcacatccctgaacagtaaaggccaatgccttcagtggacacagatttaagagtgtagggagcagtgattcaggataaggtgtgggtagattttccaaagtaactctacctgaatccctgagccagctggacagggtccttttatagttaacacccttcccattgcattaagaacggtctgtttttatgtgtgactcacgtactttccccaaatgctatctgagtacagctcagtactcaggcctattttatccctgtatgttttgaatggggtctggtaggttcagttaaatctgaggactttgatcaatttggttctcttaaaagaacttttctctcccattgacttttaagaccacaatactagtaaaattatgtgattggattatgtttttggtcctttttgcttaaaggattctacttaaggaatgggtatggcagctgtggtcacgaggaaagagcaaaggtcctacaagttaagaacgttggggctgagtctagagcctgccatttgttagttctctgtgaccacggtcaggacccttcatgcgtcagaacctcagcttccacatcagataacctcagatcatgaggacggtcatcccttcgctgcctgcttcgtggcattatgtcccacatgcagttaggcatgaaaaaatgcctcctgaattacatgattcagtgtaactgattttaaccaaagatttgcttttatttgttttgacactgattaccttgtaaaagaggcagccatgtgacctcagacaagctatttaatctgtgactcagtttttacatttgtaaatgagaggaccccagagagttgttggggggataaaaatgaggttctggcacattgaaagagattagtcaatattaacattactgtgaggtggcatcatatatttaacttaatggctttcaagagtggaagaggccaattccctattgtaccctctgacctttcatagtaacatggggttgccattatcttaatcgttacaacaaatttcctaatgtgaattaaggttatggaggtttagtattaaaaacagtgaaataaactgtagacaagtaggaatgattttagaattctccacccatctccacctccagcaacctgattgttatcttaaaggcagactggtttgggtgctcatatatctacataaagattttctttttgttgtaccctttagtgcagtggttctcacataagaaatcactgtgcagggtatgcattaaaatcctgtgcttatattctaagggctaattaaggcatattcaaggctagttttgactacatacaacattcttccaatactggcttttgaactgacctcacagccaatcagctttatccagcgtgtcccagtgtgggatattttgagtcattttcaggcagagaagtgccagagctagttcatattgactagcaagagccgacttaaatgttcaggaaycttgtgagccaattgatgtgacattaacagtttgaaattggctgtgatgggagtatttacaccatggatatgggcaaacaccgatcaaaacttccttccaagagccwgttgttaaatattaccagcacatcactgttttctgcacgttagaatcattaaatttcagcctaagcaggaagtgtttagtctgtatgcctgtgtctggatatatctgtctctttctgtctaggtgaggcttacagaggaaaggtgacttgcctgaaagaagttggtcagttagaggccagatgtgaacccaggcctctgctgtttatagtctagactgcattatgtggggagctcatgatcaaatattaattataaaattaaaaattaatccacttagcttattgagttaggtaccaatcacagtctccaattacagcagcaatcttttaggatttttttcctctctcaccaagttgccttttccctctgttcttgcaccattatcatggggcttcatggcctgttacaggctgagagagctggaataacacggattttgtttacagggcagaaccattattttccagttggggctactcattatattgatatcatccaaggaagtgtagtatatccaacgaaacttagtgttctttttttttttggagacggagtctcactctgcctccaggctggagtgcagtggcacgatctcagctcactgtaatctccacctcccaggttcaagcctttctcctgcctcagcctcccgagtagctgggattacaggcatgtgccaccacgcccagctaatttttgtatttttagtagagacggggtttcaccatattggccaggatggtctcaatctcctgacctcggcctcccaaagtgctaggattacaggcgtgatcccccgcacctggtcaacttagtgttcttatgcttactattctcagagaggaaaatcatgctctaataataattttaggaaacacttgatttcaggagacaagattttgttgatgctttctcttctgtcctatcctcctggtgtcatgatggagattttagccctgttttattttccttgtttaaaaacgtagccgttctgagaggtagcgtgatctaacccgggtcatctaagtctgcactagaatgcagagtagcatatgaggagggggcttaacacacaaagggggctgctgcagaaaccatttaatttttcagaatgacttaaagaatttatatattttaaaaattataaaaagctgtccgggcatggtggcacacgcctgtaatctcaagcactttgggaggccaacactgcttaagttcagttgtttgagaccagcctgggcaacatagtgagaccccatctctacaaaacacacaaagattagttgggcatggtggcatgtgctggtagtcccaggtactcgggaggttcaggtgggattgcttgagactggaggttgaggctgcagtgagctatgatggtgcccctgcattccatccagcctgggtgacagagtgagaccctcaaaaaaaaaatttataaaagcttactatagtcaattgattgcatttaaagcttttgttttttttttttttttttttttttggacttcagctgatttgttacgtctgtcttgttttaaaaggaatgcagtctgcctggagcctcacctttcattacaacagaactttgtaaccaatagtgtttcaaaaccttctatctggaagactttatcagggctttggccttgaaaggaatgtcttcctactmatgtttgttaaacaagtgktgtgtgaaggagtgtaatctttctgggtttattggcaaaggagaacactccctctgtgtgttcctggtcttcagtgcattgaaacttcttttcacaggggttgtatttgtgtatatttcatatatacatataaatccttttacagggaatgaaaaagactcgagtagatgcaaaaaaaattggtcctcttaaactggctgccctaaatggactctccctatctcgagtgcctctgcctgatgaaggaaaggaagtggctaccagagcaacgaatgatgaaagggtatgtatgggacacacagggctttgtgccttctctggaacaaccggtaaatactacgcaaatgccttcatgagattttggtgaattttctaacacaatttaataataaatgagtgttaaggaattttgtaatatgggcctcaaaattggggcaaatgtatagctaatgtcttaatagataatttcaggttcgaatgctgattttttgtttgtttgtttctcagtgttcttttttaccttctcctggccttttggagcagtcttgattttgatggccttaaagtgagaagaaatctacaaaaatacaggagcatacaggggaaaagcagcagacattgacttttattatactgaaagtttatctcgagagtagtttctcaatttttcaaaacttcctttgtgcctgaggtgtattttctatgaggttttattacatcaaaatcagataggcatacatttgctttacaacgggatcctggaggtagtttcgaatatttcctactgctttagtcttttatatatcgtatgacataaaatggaaacatttgttcatagctgttggaactcattatccgtcccctagatttacttactgttccccaggagaattccatctattaggggtcacaaaattgaccacagatctagagaaaatgaattcaacaaatttctttaggccaattttcaactttaaacaaaagtttgcattatatttctcaccaaaatgattgtcttttgttcttttaactcttgttgttgtggctttttaaaattttaacttcattttcacctagaattttgtttctgttttggttttggtttggtttttttgagataggttctcatggttcactgcagcctcaacctcctgggctcaagcaatcctcctgcctcatcctcccaagtagatgggaccacaggcatgcacyaccacacctggctcgttttttaattttttgcagagacggggtctcactgtgtttctcaggctggtcctgaactcctaggctcaagtgatcctccctccttggcctcccaaagtgcagggattacaggcatgagacaccgtgcccaacctagaattttcaatattatacagtgctagatttgaagcagaaaacaagatttcaaatatacagtcaaaaggtagccacgacgtgtggctgtattcatgttattacacatattctgttttatagtgtaaaattctggaacaacgattagaacaaggaatggtattcacagaatatgaaagaattcttaagaaacggctagttgatggggagtgctcaacagcacgactccctgaaaatgcagaaagaaatcgattccaagatgttcttccttatgatgatgygagagtggagttggtcccaactaaagaaaacaacactggttacatcaaygcatcacatattaaggtgagaggaacgcctcaagtaatcaacagcacatgcagtttcagttaagttacaagaatggtaagaattgtattcatgtctgtttagaattcagatattttaaaatttatttttattgtattgttttagataaacaccctagttttaaacatttgtgacaaactgtactgcaagctgggaaatccacayaccagtgctagataaaaagygtctatcagacagagccaaagtcatgtctactctccatgtgcgaaaccactctgcccccaacactgttaccaggactcagggcgcacttatttgcccggcttttttttttttcttttgccttttttgagatagagtcttgctctgtcgcccagacaggtggagtgcagtggtatgatcatggctccctacagccttgaccttstgttgcctggctttagaactttgtccttctaaatctgaagacctctttttagctcataaattctgggagccactgaattgctagtttttcctcatcacatactgacatgcatttttatgtaacaaaagtgtctgggctttttgatggtgttcacaaaagctttcaacttaccaaggtgccatctgttctctttacatactctttataataatttttaagtatcatttttttctttgaagaagtgcttttttcctggaaccagtataatgccattaaactggggtaatgtttatggtgagagatagggggtccagttttacttttctgcttatggatatccagtcttcccagtcccatgtatttaagaggctgtccttccctagtgtatgttcttggcaccttatctggggtaatatcactcctatgaaaatggacaaaatgatgattcacaacacatgatggaataaagccagatgttccctcttcctcattgtaccctttgttcatgctggccacattcaattctttattttgggaaggagaaatctcatggtgagtgaatgagtaactgtggacaggtggtggtttttttctttagtttgcaagtattatttgagaagggaacaagctgacaccaaggctttctggagactggcagtctgcctgtgaatgccagtaccccttgatggcttttgggaatctatgcacatactattttgtttttaaatataatatcagcataatttacttaaaaaccgagcatttccttgaaataactcatccagtctctcatgactagatggataagaatgaatgatactgtagttctgtagtgatatttcaaaatcttcagcagccacttgcagaatagaggaaagaatttgatagacctgggtctgacgcctagatctaaaatgaggtgggacctcactttataagctgtgttgtgggacctcatctcacttacatggaaataaataaatgatgacacctaccctgccagcttctcactagtcccctcctcctccctagtgtttattcactgttataacctggtactcatccacagtggcagccactgggtgctcagtgagacgatgtggagcggtgactagggggctggcagccctgagtgagagtgcgtgtggcacaaggcttggcactgggttttacgtttagtgagtgtttggagacagttattgtcgtcactcaatattggtgaagccaagatttaacccaggtctcttaaccacaaatctagtaattactgttgtattagactgctctcaaggaagttaaatctgaagtggaaacttaatattattgtggagagtgaccttgactcagaagttcagaggtgagactatcttaagtaggaaggttttttttaaagaagaggcaccatgtctgcaataacagctacttattgagttatgtgccaggtaccatagatactgactcagtcctcacaatgaccctatgacggtaggcagtatctttattgtataaatgagaactgacattcagcaaggttaaacaggttgcatagatattatgtatattcacagtacctaagtttataaaaatgtcagtaatgcaaattgtattcacaagggaaaagatgaaaagtctttccttattctgctgaataatccagtttactacttttttactttttacttttttaaaaaaacttttttagtactaccatgaatgcatgcatacatacctatgtatattatacccacacatcaatttttttaaccttttctaatcccaggtctctgtcagtggaatcgaatgggattatattgccacacagggaccattacagaatacctgtcaagatttttggcagatggtatgggaacagggaattgcaattatagcaatggtgacagcagaagaggtaggtacttanttctcttaagtgattttctcagcctctgaagaacagttaatgttaatcatctggaatcctgacctgtggagaaaaaggcagggtagggttgtggttctgtttcagatgtgccgtctatgtgagaaaggcatccattgccggatctcgagtcatttaaccatgctcatctttaacaggagggtggaagggagaagagctttaggtactggccacgacttggttccaggcacaacactgtcacctatggaaggtttaagatcacgacccggttccgcacagactctggctgctatgccaccacaggcctgaagatgaagcacctccttacygggcaagagaggaccgtctggcacctccaatacacagactggcctgaacatggctgtccagaagacctcaagggatttttatgtgagtgactttaactttgttccgaggacagctgcctctggaggtgttaaacagagaggaacatttatgtttccgaaatatttcctttatgttatctcatataagcttcggacttgttttaacataaagaatacaagtgttttggggagggttaacgaggtttataaattatgatttggtagtgagtagaaygccacagctgactcagtatctccgtcatttcattttgtagatcagaaagtggacagaggtagtgacttgctcagggtcacactgtccctttgtggttgggtttggttcactggcacccagtgctctttatctgcagtcctcttaatcagtggagagaatatgaagattgagtcaacaatgtgatacgccttgatccttgagtacttttctatttcattgattttccacagcatatcttgaagagatccagtctgttcgacgccatacaaatagcacaagtgatccccaaarccccaaccctccgttgttggtccactgcagtgctggggtaggaaggactggcgtggtgattttgtcggagatcatgatygcctgcctggaacacaatgaggtgatggcgcttatgatcacctggcctttttgggtggaaatraggctggggaagagarggacatagtgacttaatagctctttttgcgcacatttccttggactgtggtggcctcaagatgttactaatgttccctgcaaaaggctgtgtcttcttggagagtctcagtaccaattagcatattaaagactaagaagtcatacgataaataaagctgtttaattttgttttacttgcccagggtttttcaaatttgagctcagaattctttttctgtttacatttcaaggatgattcatgctgcccagagcccttgagggaaatagctagatactgatagcacttagcacactatgtttttgtataattttggtatttagtgagacatggtaattatgtccaaccatacaaagtcagtgagctacacctggggaatgttgaagaaatagtctgcatggacattctatttatagctaaaactaatcagaaaatcagaagtaggcaatcatggcttatttctagaagacgctaaggtggaaaagagactgtccatctccyaaccaggtttctgccaggacactcgtgtcctcccatcctttctgtctcccnaggggaacacattatcttcattaccgtttctctcaacctaggtgctggacatcccgagagtgctggacatgctgaggcaacagagaatgatgctggtgcagactctctgccagtacacatttgtgtacagagtcctcatccagttcctgaaaagctccaggctcatctaagctcccacaatttcttacggggccagtcatgtgaagcgtttacagcttaaaaaaaaagcgcttgcctaactcatactttccygttgacacttgatccacgcagcgtggcactgggacgtaagtggcgcagtctgaatggcggcacgctgaaggaaacgtgcgaagcacaggctgaagaggggtttctaacctgggaaaggtgctcaaggaggacttggtttcaagggccttgccctgccccggtctgtccggtttgcagtacttgcacacattttggagattgtattttctagacaattctctattttactgaagctatgctgggcaattctggcaatcattaaagtgcatagatttctatcttaaactaatttttgataatggagtttttattttatgacaaatatttagggatttttctagtgagaaacaactttgtgtaaggatgatccacagatatgagttgctcctatataactttgtatttaaaaatcatgttattatcttttgttattttttaaaaaccttgggtacttaataatggtttagttgccaaactgaaaactatactgagaatctgtgttattttgaaacatcaaaaggatttttctatccagaacattttttatcctaaaaattctatatagttgtaccttctgtttttcaaatgagagctcaattcatttagatactgaaatgagtcagttaatgtaaagttgaggatgaaggcacattatttaaaatgtaagagaataagcattattttttcagtattattcatagatctaaatgaatttgattttattggttgaaaatgaagtgaaaaacaattgcctagggtggttttaagcacttttttgttaaaaacaaatctgagttttaatatatgtgttgctttgtagatgacacaataacaatgggcgctgagaagcgttttgggagagattaaggactaagagtatgtaagatgactaggacaagagtaggtggagtgtgatggtaaatgcaggatgccttcgtctttacaaaaatgcagtattatctatactcagactgaggtgctgggatggcgagcaggggaccccacagcactgtccccagggaattcaagtcctgtgacygccagtgacttactccgtttccttggggcttttcccacctcaacctgtattgtttctttttcataaataaattcagcattatagtatcattaaaagaagccttaaagaggcgtatttttccttttggttgaaggaagggaatagttaataatagttttcacctcttctcccaaaaagtacagtccaaatttgtgcacagagattgctgtggtattcaagaggtacttgcattttagctccttaattccctggccagtgttagctgtttagtgccccctcacccatcccatttaggcacatcccaatagacagagccaggctgagttacagggggagagtgtcatctctggccccgattaagatggccttgtcacagtgaccgctgagtaggcatggatgagtgggatatttagctgaggaaccctttcccttttccttctttttggggtctcttcttacagtgaacttccaaaatgtcaaatctagggctgtttcccaaattacactattctaggcatcattttgattcccatgtcactccttaactcacttccttgagcactacatgtatgttgtcagccacgagacaggacttcctaaatagtgtgtgcaccagcctaactctgccttacccagaaaccaaccacctaagaggaaaactcagaagatattaatgaaaactaattgaaagtacgcacacttctcatgtaggaacaaaattaaaattttacatttttattttacaaaattaaaaaattacattttgtaggaacaaaatgtaaattttgtaaatacaaaattctttttaaagtcctgtttaaagaacagtagaactaagtgaaaatattcagaacgagctccttagaagaaaggaataagaactttttactggaactattttccatctctagaaaaagtgcttcttcccctccccctccctctccatggtacgtttttgtgaaaatgcttttctgtcaggtttaaacaaacagtttgacatagctcgttgacaagaacatattgtaaaacaaatctaattaaagagtaatatgtggtctatttgtgttcctgttgtaataatttgataagtaaacttctgagggcaaaattactgtttaatattactcttaaaatgttgcatgtttggcgtcattcctaagagccatgtaattttaaacttttaattgcagttagtgaatatgaaaggatttctgaataaaaatctatccacattactgagctttgaaatagtatcattttcaagagcaaactagaacattaagggttcataggtttactgcctctgaaatgagtatattaatgtctgccaaacttacacaatgcttcatgtatcttagtgtcttttaataagaattatcaaaatgtgcacttccacaaaacgtagagttataaaccactgttttccactgatcaattttggtatctctggtatcagttttcctgattagtggggtcttttgatgaaatagtttagcttagttggtagttttgagcacagaaagtactcattttattttttatttttgagacggagtcttgctctattgcccaggctacagtgcagtggcatgatctcggctcactgcaacctctgcctcctgggttcgagtgattctcctgcctcagcctcctgagtagctgggattacaggcatgcaccactatgcccggctaatttttgtatttttagtggagacggggtttcaccatgttggccaggctggtctccaactcctgacctcaagtgatctgtctgcctcggcctcccaaagtgctgggattacaggcgtgagccactgtgtccagccagaaagtcctcattttagaatatcatttggaatgcttattgtagtcattaatttcttctggaacatctactgtgaagcattcagaaaatgctagaacttagactttaaaaccctttggtcgaattagaagctgggcctgtgcttccttagaaacgtccagaaagcaatgtctagccagaaacaggaggaggagggaggagagtgtggtgttgtgggactgagtggcgacagcatgacgtggccagcttttctgtgaagctttcaccatcagtcatttcagaagggttgagatgttaaatgttcacaatattaagaaaatttaaatatacaactatgtacagtaatataaactggagattagctgcagcttgccaagagcaggtttattatttgagatttgcataaagaaatggaaacaggaaattattgtaaataagactttttttttcttttttgagacggagtttcgttctgtcacccaggctggagtgcagtggcacgatctcggcttactgaaacctccaccttctgggttcaagcaattctcctgccttggcctcccaagtagctgggattacagatgtgcgccattacgcccggctaatttttaatttttagtagagatggggtttcaccatgttggccaggctggtctcgaactcctgacctcaggggatctgccagcatcggcctcccaaagtgctgggattacaggcatgagctaccatgcctgactgtaagtcagactttttaaaggaactcttttggatagaaatgtagttgaatttgcttatcagcaagatttcatgtggaacaagctaaaactatccctttccagtttaaacttaattttttaaaaaaagaatctaaattgcagggtgctttcttttgagctgagggatggacatttcaaaagtagaggaatagctgcattagaaatttgcctgggaaaacatttctcaaaagaatatgagcttttcaaattcctggaaataagaactccatttaccctactatctaaaattatttatagaaaaatgaggaaggccggtcgtggtggctcacccctgtaaatcccagcactttgggaggccgaggcgggtggatcacgatgtcaggagtatgagaccagcctggccaacatggtgaaaccccgtctctactaaaaatacaaaacttagctgggcatggtggcacgtgtccagctactcagggaggctgaggcaggagaattgcttgaacccaggaggcagaggttgcagtgagccgagatctcgcctctgcactccagcttgggtgacagagcaagactctgtctcaaaaaaaaacaaaacaaaaacagaaaaataaggaaatgtcaggaaattcagatcaaagtttgcatgtctacttgggtagagagagttttagaaaacatttgaagtccttggattgttaaagtggtggcatagttttctgggtatttcaggtagttcccaaataaaaaatatgctctaaaagttcacttgtatgttgacttttagtaatatttacccatgcaaacaatactcttggtgttagccttcttagtttgtgccctcaaagcttactgaaaccataggggccctgaaaggtaagcagtggtacagaaccaaaccgtatctgtatgtgttctgtactccaagaaattatagggcaacttttctccctactgcaccctgctggtgagatcagagaataaatactcctgtcgggcagtggcaaccaagactcagaaagcaactgaagttaagtgtctgttttatgggaaacttttcagaacgtatgccagcgtttgttgcagaaacttgagctgtgcatgggtaaggaacagaatgggccttataatgtgagcagggatcttgctaatgaaactgtctgaagtggggcagggggtgaaggagggcaaattggcaaaactgtcccctacctttcctgttgccacttatatgtcctccttaatattactggcttgaaatgggaagtaagggatggcccaagaaggaaggtgaaggtcttcagcacccagctgaaggagcagcagttccaaggcaaatgctattatatagagggtatccctaggtcacatacaagtaaaattaaggtctgtctgcacatcatatttccaaaaatgttgacattacccatgtgtattctaaaaaatacttaattttcaaaaatctaaagaacatctaaacaccttccaacattttatgggttactaaagggatagtaaccatatacttttgagttatgctttaatattataaatagggacaaacggatgacaagaaaggaatcattgtgtttgaacttctgtagaacttcagaaatagtatggcttgcgtactgttccaaatttctgaaaattacttattaactagataaatgttttgatcattattccttaactttcattaaatgactttgtggtgtgtcaaataaacgcactttaaaatctgtaaaatcccttggctctgaatcgacaatgtggtgtagctgcactggatatagcagtacacaagcgacataatttcagtgttaatagacctacaattttaactgaactggtaggtggtttttaaagtgtgtacaaagactactacttaatttcagttgtcaaatgtgaaaccactgacatttaagtgtgcgtgtgtaacttaaattcacactctaaaaacttggtaaaacaaacatcttcagtattcactcttaaaaacagatgtccattgccaaagaaattcagaaggttggatgattacctgggttagacaggatatgagtctgtcaggcctcaatttttttagtaggttgatgagactagtacagattcaataactagttttcatttctgtctgctcatcagctgagaaaaactgaacaaatgaacagggaatataaacgtattcatttttcataagatacagatattacaggtcagactgtgaccatatgctgagacggtccaaatttttttatcctggaagtttattagaaatcacttgaaattaatggaccattgaatgagacaaatattttgttacttacagtgattaatatttattgaaatgtaatttaatcttagagttaagtgtcctgaaaggattttggtaaggttttgtagttttactgaaataataccagtgcaacactggttcagaccaacaaacaggttgaaaaaactgaatattctccagagacaacaagtttatttctagaacaggtttaataaaaacaagataatacagaatacttaaacccctgtaagtcaaacaaaaaggtaaaggaaaaaatgtaagaaaaacatactgtttgcggttccaagatagccaaataggaacagctccagtctacagctcccagcrcgagtgacgcagaagacaggtgatttctgcatttccaactgaggtaccgggttcatctcacggggcttgtcggacagtgggggcaggacagtgggtgcagcccaccgagcgtaagccaaagcagggtgaggcatcgcctcacccgggaagtgcaaggggtcagggaattccctttcctagccaagggaagtggtaacagatggcacctggaaaatcaggtaattcccacccaaatactgagcttttccaatggtcttagcaaacggcacaccaggagattatatcccacacctggctcggagggtcccacgcccacagatactcactcactgctagcacagcggtccgagatctatctgcaagatggcagcgaggctgggggaggggcatccaccattgctgaggcttgagtaggtaaacaaagcagccaggaagctcgaactgggtggagcccaccacagctcaaggaggcctgcctgcctctgtagactccacctctgggggcaggtcatagccgaacaaaaggcagcagaaacctctgcagacttaaatgtccctgtctgacagctttgaagtgaatagtggttctcccagaaaggagtttgagatctgagaacggacagactgccccctcaagtgggtccctgacccccgagtagcctaactgggaggcacctcccagtaggggcagactgacacctcacatggccaggtgcccctctgagatgaagcttccagaggaacgatcaggcagcaacatttgctgttcagcaatatgtgctgttctgcagcctctgctgctgatacccaggcaaacagggtctggagtggacctccagcaagctccaacagacctgcagctgagggtcctgactgttagaaggaaaactaacaaacagaaaggacatccacatcaaaaccccatctgtacgtcaccatcatcaaagagcagagatagataaaaccacaaagatggggaaaaaagagagcagaaaagctgaaaattctaaaaatcagagcgcctctccccctccaaaggaacgcagctccttaccagcaacggaacaaagctggatggagaatgactttgacaagttgagagaagaaggcttcagacgatcaaacttctctgagctaaaggaggaagtttgaacccactgcaaagaagctaaaaaccttgaaaaaagattagatgaatggcgaactagaataaacagtgtagagaagtccttaaatgacctgatggagctgaaaaacatggcaagagaactacgtgatgaatgcacaagcttcagtagccgattcgatcaactggaagaaagggtatcagtgattgaagatcaaatgaatgaaatgaagcaagaagagaagtttagagaaaaaagagtaaaaggaaatgaacaaagcctccaagaaatatgggactatgtgaaaagaccaaatttatgtctgattggtgtacctgaaagtgatggggagaatggaaccaagttggaaaacactctgcaggatattatccaggagaacttccccaacctagcaaggcaggccaacattcagattcaggaaatacagagaatgccataaagataatcctcgagaagagcaactccaagacacataattgtcagattcaccaaagttgaaatgaaggaaaaaatgttaagggcagccagagagaaaggtcgggttacccacaaagggaagaccatcagactaacggcgaatctcagcagaaactctacaagccagaagagagtgggggccaatattcaacattcttaaacgaattttcaacccagaatttcatatccagccaaattaagcttcataagtgaaggagaaataaaatcctttacagacaagcaaatgctgagagattttgtcaccaccaggcctgctctacaagagctcctgaaagaagcagtaaacatggaaaggaacgactggtaccagccactgcaaaaacatgccaaaatgtaaagaccatcaatgctaggaagaaactgcatcaactaatgag

SEQ ID NO: 94512 - DNA, 34722 bp, Homo sapiens
  misc_feature (1)...(34722): n = A,T,C or G
agacggtcgggggcaaggccaggtagaagaggcggttggcctgtgaccccaggtggagggcattcatgtggctgttgaggcgctggtaggaggctgcatcatcgtactggccagccacataggagttgcgggcaaagaagtcctccagcttgagcttctcctctggggtggcctgggagacacggacagacagacacacagacagatgtcagcccctctctttgagtccgtgtgtgttctgccccaggggagtggagggtcttccctggaggtccagggagggtgccctcagaagtcagtgtccccgtcccacactgggttcagccccatcttagcagctctgcacatccagagggagggaggccaaagcaggcagcacagacactgccccaggctgggacccctgtgccttaggacagaggccagatttcaggatattttgacctgggagaaatacactggagaaagctctctctccaaaatcatgacacccaactatgattggcggagaaaacgcagcagagcacagcaggaggggacctgtgggtcctggtcacgggggctggtaatgggggtctcaaggaagtacgagagcaggcggggcggggcaggagaggaggagagcatcccgggatgggatggggggaggtccccgaagctggccatgctgggggctggtagagagggcagaaccaggctgggggaggccctgacaccacccaccttgaagaagggctcactctgtttgcggatgtcagccactgtgaggcgggaacgggcatagcccacgatgaaggtgttttcgggcagaaggccatcccggaacagccacctgagggcagggcacagctgtaaccagtgcgggcagggcaggaccaggcctgtccctggcgggaggtcacaggggcagtggtgggacacacttaccagatggtggggtagatcttcttcttggccaggtcaccctgtggcagagggaacaggtgtgtggttagaagtggctggggacacgacctacatacatcatcctccacccttggtgatctgggcactactcaggatcactactgggccacaagcatgtctgtcttgcctgatatacagacagaagagccccgagattcaagcctgtgccagccctccatccctgacccagaagacataaacgcatctcctgcgttccaggagaaaacctgaaaattcaattcagtagaaccaagggacgacagaagtaccatgtagccacatttgtgagacgtgacctcaagtgcttacattagcaaaaaagagtggttcaaaaataaggagctaagcattccacttaagaagtgagaaaaagggccagatgcggtggctcacacctgtaatcccagcactttgggaggctgaggcaggcagatcacctgaagtcaggagttcaagaccagccaatgtggcaaaaccccatctctattaaaaatacaaaaattagccaggtgtggtggcaggcacctgtaatcccagttactcaggaggctgaggcaggagaatcacttgaatccgggaggcagaggttgcagtgagccgagatcgtgccactgcactccagcctgggtgacaagagtgagacttcatctccaaaaaaaaagtgagaaaaagatagaactgcaagccaaattaccaggaagaaaataggaaataatgacaagtaaaattaataaaattaaaagctaacccaaagaaaagatgaacaaagctggaaattggtgtttgaaaaagacgaatagaaacagacaaccccctggcatggttgcttttttaaaagggcataggccgggcacagtggcttactcctgtaatcccagcactttgagaggccgaggcaggcggatcaagaggtcaggagatcgagaccatcctggctgacacggtgaaaccccgcctctaccaaaaatacaaaaaattagccaggcgtggtggcgggtgtctgtagtcccagctactcggaaggctgaggtaggagaatcacttgaacccgggagatggaggttgcagtgagccaagattgcaccattgcaccccagcctgggcgacaagagtgaaactccgtctcaaaaaacaaaaaacaaaaaaacaactaaacagctggacgcggtggctcaagcctataatcccagcactttggaaggccgaggcggatggattacctgagttcgggagttcaagaccagcctgaccaacatggagaaaccgtttctactaaaaatacaaaattggctgggcatggtggcccatgcctgtaatcccagctactcaggaggctgaggcaggagaatcgcttgaacctgggaggcggaggttgcagtgagccaagatcaagccactgcactccagcctgggctacaaaagcgaaactccgtctcaaacaaacaaaaaacagagcaatggacctgagaggggacagtggccacaaatcttcctacagaaacaaccccctggcatagagagtgttgccagtgggttctaccaaaatgcaagcacaagagaattccagcctgaagcaaactcttcctgcagaaggaagaaaggggaacacttcccaagccaccttatggggcctacagagccttggtacggaaacctgatgagaaaggcacatgggaaaacccatacgcctcattcacacacacatgcagatgcagaaatcccacacgaaatatcagcaggccgggcacaactcacacaccccagcactttgggagaccaaggtgggaggaagattgcttgaaatcaggaggtttttttttttttttttttttaaagacatggtctcactctgtcacctaggctggagtgcagtggcacgatctcagttcactgcaacctctgcctctgggctcaagcaatcctcccacctcagcctctggagtagctgggactacaggtacatgccaacacacccagctaattttttgtattttttgtagagacagggtttccccatgttgtccaggctgctcttgaactcctgggctcaagtgatctgcccgcctcagcctcccaaagtgttgggattacaggcgtgagccacgacgacccactgaccctgtctctttaaaaaaaaagaagaaaacatcagcaaaccaaatcctgcaatgttaaaaacggtaggttttttatttacagaataaatacatctgtaaataaaaagttggtttgatattaacagaaaaaaatcattgaaattcaccatattaagagattaaaaaaaacctctaagaactctctgcctactgctatgttttgattttttaaatctagcaatcttgctcaacccaacagatgtagatcaagtgtttcagaaatcacctattcacgctaaaactcttagcagagggggaatgcaagggaacttcactaacttgataaagggcatctataaaacaccattctggctgggcgtggtggctcaagcctgtaatcccagcactttgggaggccgaggcggggaatcgcttgaggtcaggagtttgagaccagcctgaccaacatggtgaaaccccatttctactaaaaatacaaaacttagctgaacatggtggtgtatgcctgtaatcccagctattcaggagactgaggcaggagaatcgcttgaaccaggaggcagagactggagtgagccgagatcacaccactgtagcctgagcaacagagctagacgtcgtctcaaaaaaaaaaaccaccaccaaaaaacaaagaacaaaaaaacccccaaaccatcatccttacaaatactacaaatatcacacttataggaaatgctgaaatattaatcatccctttaagcaatcaggaacaagaaaagtgcagtaaggcaagaaaatgaaaatggctgaagttgagctgtgaggtggtgcgggtgctccctctgatcaagtgaaacacacacctatcctgtgacctggccgttccaccccaagagaaatgaaagtgcaagtccacacaaagacctgcacacgaatggtcacagcagccttggttcatagcggccccaaactggaaacaagtcaaacacttgaattaacatgtgacccggcaaactgtgcattcatacaacggatactactcagcaacactgggaaatctcagcatcagagatgcaacccattgtgacagaaatcagatcagcggttgcctggagcagggcagattggctgggaatgggtacccaggaactttctggggagatgacgatggcctttattgtgatgagggtgtacagccaattgtacagttaagatttgcgcaccaacaaaagacggcgagaaaaccaacaatggagcggagggtggggagtgggtcagaaatgaccctttgagggccagtgactgtgagagccccaggtgagggggcttcctgggtgcagagcatattctgtttcttgatctaggagcagtttctgtggctgtgctgagtttgtgaaaagtcatcaacaagctagacctgcaccatctgtgttcttcatgacatgtatttctttttttttttgagacggagtctcactctgtcggccaggctggagtgcagtggcgtgatcttggctcactgaaatctccacctcctgggttcaagccattctcctgcctcagcctcctgagtagctgggactccaggcacctgccaccacgcccggctaatttttgtatttttactagagatggggtttcgccatgttggccaggctggcctcaaactcctgaccttgtgatccacctgccgtggcctcccaaagtgctggcattacaggcgtgagccaccgtggccggcccatgacatatatttcaataaaacatggtaaaaactaatagtctgggcgtggtggctcatgcctgtaaccccagcactttgggaggctgaggagggtggatcacctgaggtcaggagttcgagaccagcctggcaaacatggtgaaaccccgtctctactaaaaatacaggccaggcgcggtggctcatgcctgtaatcctagcactttgggaggttgaggtgggtggatcacgaggtcaggagattgagaccatcctggccaacatggtgagaccccgtttctactaaaatacaaaaaattagctggatgtggtggtgcgcgcctgtagtcccagctactcgggaggctgaggcaggggaattgcttgaacctcgcaggtggagattgcagtgagccaagattgcgccactgtactccagcctggtgaaagagcaagactccatctcaaaaaaaagaaaaaacaaaaattagctggatgtggtggcaggcacctggaatcccagctactcaggaggctaaggcaggagaatcacttgaatccaggagacggaggttgcagtgagccaagattgcgccaccaaactccagcctgggtgacagcaagactccatgtcacgaaaaaaaaaaaaaaaaaaacacatgctcttcgaagcaatcaggcactgcaaccatggatgggtccatttctacaaaccattacagaatgggggccatgccaccaggtcaaacgccctcacccagagccaggcagttaggaagccaccacagggcttccaggagggcaactgctatggtgtgggtgccttgtgtgcttgcgctcttcaggggccctgctccacttctgatgctcctcaggtgagctcggtgccaggactacagcgacacggacctctcactgctgcacccttcaaagtccagcagacaacccctcgccctggggtaggagctcctctactcagctcctcacagcacctgccatcagtggggctggggaggggaacgttgcccatgtcacatcaactcacggctggccccacacagaaagggtcagcttactgggaactaactggaccctgaaataaacggaaagaaccacagcctgcaaatacctctaagcctcactcaaagcaggtcatgtttgctcatgaccaaattccggaagactgggaggcatcgggacagactccagaaaggtactggtggcaggggactggtctgctgagtcacagcaaccccacgctccaggccgtttgttcctgctgctccctttgggattaactagagattgaaccggctcaccttgtttcagctcaggccctgcaaccgaccgaccgtctgctgggctccaagtcacctgagaggcgaggtgaggtaagacggacagtaggggtggggtaaggcaggccgctctctcccatggtgacagggagctaagctgagctgagccggactgagctgctctcctcaggactcaggggtagccctgccctcccagctggctgcgatgctctagtgggactttctggaggaacaaacatgggaagacatcgggaaacctgacagcttggtcaagagtctactcgtgccatgtgggtgggggcaattcaaggggtccttagtgaaaagcagttgggagcttctcatcttccccacrccctcctctttcctgaggaccacagcaggggagggatctgcccaaggacacaaggtgacttagtagaagcagggcatgatgaagatctctagccaccaacatctggctaggccagggcaaagggacctgggccatgacctgtctgttttataaaccgaaatcgctgcagcccttgtcttggcatgagggtttcatggtagagcacgatgcctgctggagggccagcgggggtgggccatcccatccccaagggtcactggggttaaggacctgcccagactccctgggtggagccctgggccttggcaggggcccagctggttcctggccactggggccagagaacctgggggctgctgagttagttcagctgaaaaaccaacaaaagggcctccctgctatacccgggggctcatgagtcaccggggctttgggggagtgccaacatcatcatgacacagcaagaatcttatcagaccaatggggaagtcagcccagaaatgttctgaggaaaggggaggcgggggccgctgggtcatccctcccacaggcccatcattgggatgcgtcctgaacgcccatcaagcccatggcccttgtgatccaggtggggaaactaaggcccagagaagtgaggaccccgcagactatcaatcccagtctcttcccctcactccctgtgaagctctccagcatcatcgaggtcccatcaggtggggaaagatgctgttccaggcgcacactagtctacaaggccagagctttctggaagggggcagtaagtacctcggctccctttctggtaggggtgggagtcctgagaaggcaggaagtggcccacttggtaactctgaggtgccatcagggcccccaggaaggaagctgggtgtgtgggcaagtgtgaggtaagctggccagggaggaggaagggacagaggaaggccacgtgggtccagcctgccccagggtgtcctgcttgcccaggctgtgggtctgccagccacttgcctgctttcagtttctaggtcatgctgagcttgttcccaactcggggctccgggcatttgctcttccttctgtgtttgtgctctcccggccctctttgtgggatctatgcgctttgggggactggggacacagggcccatgtgtatcttctgaaacacacgtcagcctgaactcttgctggtctgcttacttgccgtggttccctggccgcaatagcacataggtcccatgaggagggcagggactggctgctgtggcccagaagtacccaatcgctgtctgctcaatgaacggagaatgggctgctttcctggaacagcagattctaggatcacgtgccctcaagtgccaccctgcctacctcccgcaccgagtgaggcatcaggcgtggaagaagccygggagccggagctgttccaggtgctgcctgagcacgccacctcccatctcccccmcagcaggaagaggaaaaaacaaaccacgaggctcttcagagagaggaccccttgtcccctacccacagtgctggagctggcacttcctatttctgctttgaaagcctcaggttgtcactctcagaacagaggagagcaaaggggaaccctactgatttcaacaaaacaaagttgcccaacccgaagctggccacaggcggaggcagtgaaatgacaaaatcagcttggaaaarcctaaggaccctgggccctcgtttcaaaagctgtcatttgctacacgaaatgctgaggttcaggaaaaggaagacacttgctccaactcacacagcaagcttggatgctctcaatgaggtgtctaataagagctgaaggccaggagtcataagctatcattgtggcctgggttgctctgttgcagtgccttgtgacagcatggggtggggatggagaaagcaacctcagttaccttctcctccagtctgcttcttggactaagggtttaacggtcagagtcctggctgttaaggtttgtggctgatgcaggtatggctctttttatttttatttttttgagatggagtctcactcactccgtcacccaggatggagtgcaatggtgccatctcagctcactgcaacctccacctcctgggttcaagcgattttcctgcctcagcctcccaagtagctgggattacagatgggtgccactacacctaactaatttttgttattttttttttttttttgagatggagtctcactctgtcacccaggctggaatgcagtgttgcgatttctgctcactgcaagctccgcctcccgagttcacgcctttctcctgcctcagcctcctgagtagctggactacaggtgcccacaccaggcctggctaattttttatttagtagagacgggatttcaccatgttagccaggatggtctcaatctcctgacctcatgatccacccgcttcagcctcccaaagtgctgggattacagacgtgagccactgcgcccggcctttttgttttgttttgttttgagacagagtctcgctctgtcgccaggctggagtgcagtggcgcgatctcagctcactgcaacctctgactccctgattcaagcgattctactgcctcagcctactgagtagctgggactacaggcacgcaccaccacgcccagctaatttttgtatttttagtagagatggggtttcaccatgttggccaggatggtctcgatctcttgaccttgtgatctgcccaccttggccccccaaagtgctgggattacagatgtgagccactgcgcccagccaatttttgtattttaagtagagactgggtttcgccatgttggccaggctggtgtcaaactcctgacctcaggcgatccacctgcctcggcctcccaaagtgctgggaatacaggcgtgagccaccgtgcccggccaggtatggctcttctgaggggaccaggctggggctggggctgaggccaagcccaatctactgtgggctccacctggtacctctcctgggtctcaggcttatggggagtcagaggacaatggcccctccttactctgccactggcagagcccttctccctcggctgcctcctcattcccttttggctctccttttctaagttctgatcagaagtacaaaggtgtcaaggagtaggtttgacaaagtgtgacagcgcgttgttctatgtgaacaaagaaccactgagctcagccagcactgaggggcgcacgatgtggaagaactaactagttttgatagagctcctgctcaaggttacaaggtaagttaatggcaaagatggtcatacagtaatgagcagagagattcttgagtgcatccagggttaaaagtgaaaactgagaccacgtgtaatttgagatgaagcccttgttccaccagcccctgcacagtctcactgccccatgggacacaggggagggtgctctagtctcgggcgatggctgtcctaggaccacccctccctcccctcccatggaaatcctcatgctatactattcttttgtctttcctatgagtgcagaatggcggttctacaagctggacaattggggccaggtggggtgaggcagagctccttggtaggctttcgaaattgaggcaaagagacagtgttcaaagaaaagctaagtgtttgtatcgacggaacttgaagtgttagtgaagaggcagagatcaggcctcagatcctgcctttggaactcatttgttaaggcatgaacaggtctgaaaaaactacagaatgaatagcattccctgttttccccaagaagtccatctagacagtccctaaagagcctgcaactccaggattaagggctacattcagcggctaggcacagggttcagaaacgtcctgcagccgggcgtggtggctcatgcctgtcatcccagcactttgggaggccgaggcgggcggatcacttgaggtcaggagtttgagaccagcctggtcaacatggtgaaactccgtctctactaacaatacaaaaattagccgggtgtggtggtgcatgcctgtaatctcagctacttggggggctgaggcaggagaatcgcttgaacccaggaggccgaggttgcagtgagccaagatggcgccactgcaccccatcctgggcgaccagagcaaaactccgtctccaaaaaaaaaaaaaaaaaaaagtcttgcaagtgcatatgcacaccaggtagagccgggatgatcctggcgcactagcaggagcgggaggaggagctcaacttagcagagcctgtggggccctgcaacaattagttggaaaagctgaggcatggagcaggcacttcctggcttttaagattggggcctgggagatactcaccgatgcacccatgatgatgaatatgtgtgtatccgactgatggaaggcatcgccctggaaaagctcttcccgcaggatccygcacamstgggtccggctcagggccacctgctctgccatgacgctgtctggtggaagaaaggctcgttaacaaggcagaagaacaggagagcattgagaagttagcccctttcttgagagttcctctggggtctcacaccagggtgacacctgattgcccaaatcactccttgtgaacggctgggcattggggagtggttgatgggttagaaactgctggctctgggctccagccactctctcctaggcagccttcattcagggtgtacattacaaaattactcaaagcattggtgtattccgactacagcatcaattctggacaaccgagtaaaatccttgtggggcatggaactgcgtgcccaggaccatctcattcccgactgtagcgggaactccacaatgacctggagcatgggagatggtgcagatgctggagttcagctccagccctccccttgccaagctgggtgaccccggtcggcaagtccccttcgctctcggggtctcaggggctcaagagaggaggtgcggggtataaagggattggttaagaccctctcgattctgctcggttctcaagcacaacaaacagcgtgtattttaccgccgcgcggcgcagcgcgggacagtacgctcctccgcctgcgcggcgcccgcccggccggttacctgcgcttcgtcgtcgtcgccctccgcgctcgcagccccgaagtgtacgaccgtttccgggggctgagccccgccggcccatttaatcggcgggggcgggggcgggcgcctgggctgagcggacccgcctcaggcgaggcgtgcggggcggggcctcggccaccacccctcgtgcgggcggggcggggcgagggcaggtgcgcgcgcatcccaggccagcccctgcctctcgggcacctgcgctggaggccggcccgccggctgcctgccatacccgctgccgctgctctgcatccccaattccggcgggcacgggtgcagctccgcgtagtgctcccgmatcccmatcgccggccmggccccgcccctactgtccggtttccccgcctgccccggcggcctcgcgcgctcgcggagggctccacttccgccggcagcgtggccacgcctcctctgggctgtccctcggctcctgggcggggccttctgccgcgccactcccccgggaaccctcgcctgttcgcgggtcaagccggccctattgggcagtctcttcttgattcctcccccggagagggcggggcggccgagcgccccgaggctagacgccgccgtccgagagacgagggggcgtgtaggcggtgacgccctgcaaagtggccggcgtgcttatcattaccgagcttccgcgggcctgcagagcctggcggactcagacttctctccggagcgggatgcggccctaccgcggcctcacacttctcgccggcttcccgagttcycgggggcggggcttgtgtttttacttccggatcccacagctatgacaccggaagccggaagcgtggtagggaagggcgaccgcgaaactgggactttctcggagcgccggggccctaccagcgttcacagtccgccgctcccacccttctcacgtctgacggactctgctgacaggtgtggtccttttccccaaagacagggttccatccgtgggcgttccgccgcctccgaaacttcccccggacgttcaggctcccccctcttttttgggccccagcccgttcctgctccgcgcttctggagcactggccaaggcgggcmgattcaggacccaggttacttgggcggcgagctggactgtttctactsctccctcctcctccactgcggggtctgaccctactccttgtgtgaggactcctctagttcagagacatattctgttcaccaaacttgactgcgctctatcgaggtcgttaaattcttcggaaatgcctcacatatagtttggcagctaggtatctgatttcatatgcctgtttgctcgttttgcaagacaacatctgcctatcgtcatactgtttctgtgatctgagaatgaatgggctctcctggcacattagaggaatagcacggaggtcactatagctggagcagagtgagggaggggagcacagttggagaggaagggatggggaacccgatggtacagggccttgtaggccgttgtagggagattggcttttacgcagaaggcaacggggatccatggtagggttctcagtagaggaggaatgtgatcggaattacgtcttacactgatcgttctagcagtggtggggagamcagaccatagtgggcaagggtaaaagaagggtggcgtggtaagaggtaattgcagtaatccagctcagagacagtgctttgagcattttattattggaaatttcaaaaatgtacgaaagtagaaaaatgagtatagtaaatctttttggtttgtttgtttttgagagatggagtctcgctctgtcgcccaggctggagtgcagtggcatgatctcagctcactctaacctcctcctcctgggttcaagcgattctcctgcctcagcttcccaggtagctgggactgcaggcgtgcgccactacgcccagctaatttttgtatttttagtagagacggggtttcactatatgttggccagtctggtcttgaactcctgacctcaggtgatctgcctgcctcagactcccaaagtgctgggattacaggtgtgagccactgcgctcggccagtatagtaaatcttacattcacagctaccaacttcaacaattgaaggtatcaacttctgactaattttgtttatatccctcgcaatcctctcccattattattttatttctttttctttctttctttcttttttttttttttttgagacagaatctcgctctgtcaccaggctggagtgcagtggtgtgatctccacccactgcaacttccgcctcctggattcaagcgattcttctgcctcagccgctgggactacagttgtgcaccaccacgcccagctaatttttgtatttttagtagagatggggtttcatcatgttggccaggatggtcttgatctcttgaccttgtcatccgcccgcctcggcctcccaaagtgctgggattacaggcatgagccaccgcgcccggcctctttttttgagacccagtctcactctgtcgcccagaatggagtgcagtggcacgatcttggctcaccgcaacctccatctcccaggtttgagcgattctcctgcctcagcttcccaaatagctgggattacaggcatgcaccatcactcccagctattttttttttttttgtatttttggtaaatacagggttttgtcatgttggccaggctggtcttgaattcctgacctcaagtgatccacttgccatgacctcccaaagtgctgggattacaggtgtgaaccaccatgcctggccaccactattattttcaataacagcttgagatatcattagcatgtcacacagttcatccatttaaagtgtacaattcaatggtttgttgtatgtatattcacaggacattttcgtcacccctcaaagaaaccccataccctttagctcagcttatcttcccctcagccctaagtggcactccccagcaatctttaatccactttatgtctctgtggatttgcctgttgtagacatcttatataaatagactcatacaatgtttaatcttttgtgacttgtttatttctcagcatattttcaagatttgttcatgttatagcatgtggatgtactagattttgtttattcatagttgatggacatttgggttgtttccactctctggctgctatgagtaatgctgctacaagcattcatgtggacacatgtgttttcatttctctccggtatatacctaggagttttcccattatttggaggtgaattcagacatcatctttaaacatttaagtgtgcctctctctaagacaggactctgaaaaacaaccacaatatcattatgacacctaaaatagttaatgttaattgctcagtgtgatcagatcggttgggggatacattttaacaggatttcttgatggattagatgtgctcttgtgtgtgtgtgtgtgtgtgtgtgtatgtgtgtgtgtgtgtgtgagagagagagagagaatcaaaaaagacttttgacagctggaggatggattcgccatcagctgataacaaagaaggccttgggtagatctgggttttggggactgtcggaggtcttagagaggttcgttttgagaaggctactagataaccaagtagaaatgtcgagtttgataaatgaatgtggagtttagaaaagaggtctaattaagcatcaagattggagttcaaggcatgagactggacagaattcctgtgggagtgaatgaagttacagagaagaagatgtcctaggacagagccctggggcagcccaacatgaaggatgggaacccagtgagagtgcctgggcaggagtagccagcaagatagggaggaaaccaggagaaggggctgttctgaaagccaagggtggagtgcagtggcacaatctcagctcactgcaacgtccgcctcctgggttcaagcgattctcttgcttcggcctcccgagtagctgggactacaggcgcgtgtcaccacactctgctaattttttgtattttttttttttgagatggagtctcgctctgttgcccaggctggagtgcagtggcgcgatcccgggttcacgccattctcctgcctcccgggttcacgccattctcctgcctcagcctcctgggtagctggggctacaggcgcccgctaccatgcctggctaattttttgtatttttagtagagacagggtttcactgtgttagccaggatggtctcaatctcctgacctcatgatccacccgtgtcggcctcccaaagtgctgggattacaggcgtgagccaccgtgaccggcaatttttttttttttttttagtagaggcagggtttcaccgtgttagccaggctggtctcgatctcctgacctcatgattggcccgcctcggcctcccaaagtgctgggattacaggtgtgagccactgcgcccggccagacattttaatctcacagttctggagactagaagtccaaaaccaaagggttagcaagcacacaccctcaaaggctctaagagggcaatcctcccttgcctctcccaagcttctgccccatttattcctgggcttgtggctgcctcactccagtctccgaggcagtcccgacatggcctcctccccttgcgtctccctctggcttctctcttctgtctctcataaagacacgttgttggatttagggcccacccacgtcacccagaatgatctcatcttgagatcctacatctgcaaagacccttttcccgaatcacatatgtttcaggggttagaacatgggcatatcttttcggggggctaccattcagcccactacactggatgaggggccggtaccctccacttctcctgcttggaggtgtgtaggggatcaggattcccagcatactgacatctccctccacaaacagtcttgtcccgactctcccatctctggtgaaattcttctatttccagcctggagctaggccttttcaagtcccacatgggtggtccagcacctccctttggaatgggagtatctgctaccccttagactgaaaacccactttagcatcctgatacactaggtgaattatcagcattctgtttaaaatgtagccccagaactcataggctttttctgctgggtaaggatgtgggtctcctgtgactcccctgctgcctttctctttcagcccttgccctgttggatgaataggcacctctggaagagccaactgtgtgagatggtgcagcccagtggtggcccggcagcagatcaggacgtactgggcgaagagtctcctctggggaagccagccatgctgcacctgccttcagaacagggcgctcctgagaccctccagcgctgcctggagragaatcaagagctcygaggtgaggaaagagtcaggggatccagccctgctgaggggaaggcgtcttctccccacctgcacctctgcgtttcctgggcctggggtggggatgtgctgccctccctcttggtttcaggaagtagactctgagatgcagattagcggggaggaagtttagcatgctctcaggaccagtactgggaagggaaaggagggacaggggaagaagccagggagggcagagggagaagcacgctgccgggtaggctccaggacagccttgctggatcttacagggagctctggagctggaatgaaccttccaggttggaccaacatgtccaggcctctgtgtccctgcactgagcactcatgaagtgctgtccatcctgggacagggcagagtcggcgctgggaagaggcgtggtctgcccagagagggggtggggcctgtcctggaaatgggcggggcatgccctggtagaggggcgtggtctgtcttgggaaggaaggtgcgtggcccccacaggcaacattcctctggggcaatcccggcgcacacctcagcggaggtgaaggctgacttcccacacccagtggctgggactggggagttctttcctagactgccatccgggcgcccctcaccctcttgctgctcagctccaggtcgtcatgggttcagggctcagctgcacgctcctgcccgcgccctgggcgtgatggcacccccagcccctgccattcttccccctcaccccctctccctgccactgctctgcattgccctgggttagcctggcggggccaggtggcacccgccatatactcttgcctttctgctgcgggggccttctaagcctcgggtcccagagctgcagggaggggcggcatagactccccacatggctcactgggtgtggtggggcctgtagccctttttgtttcatcctttggttcctgctggggactcaggcctaagtgtccaccccatcgtggaggacaacaccccttccttgcaggagtcatccctgagctggcagcttcaattggctctccgtgtcctggctggctggcagctcctgggcgaggtggcatgtgccgtgactactagagatcgctgtcatgggcccactcccccgccttctttgctggactgtggtccgagatgttatgtggggctctgtgctgacaagtcacatagtctgtaggcttcagagagtggctctggctgacaccccgtgggcagagacaagacccatgcctgcgatgtgtctcctcttactgtcaaggcaaatcacctttccttccatggaggaaggggtcagtgcagtcagcttgctgtcagggggctgcttggtctcctcgacggtgaggctgaattggagaggccctgctggagcatggagacccaacatgacctgcctgttccaggacagggtcccccacctcagtgccatcggcacctggggctggagaattctcttgtacgttgtagggtgtggagcagagtccctggcctgtacctgctagatgccagtagcacctgtcctgttgtgacaactaacaatatccccagatatttattgccaaatgacccctgggggatacagttgtccctggtgagacccactgtattgggatcttcagagcactggtgcacagagaggtgacagttagactgggggcttctgctcatccccaggagagtgctctattgagggggacttgagggtgagtgttgcaggccagctgtgcagggaccctggcacagcgtatggcgcccttgcttcccttccaggctgtgtgttcagtgcagcagcttccctcgggctccagggacacaaggaggcctcaaggctgtattgactccccctgctccgcctgacctgagctttgtgggtggcaggtgaaacttggtagctccatgtgtcaggccctgggccaagcccctaagggcccagaagatgtctgtcccccaagatgtacatgcttatgtccatggaggaggctgtacttagaatgttgagggagagattcacgaagaagttgcatgtctctagtgtgtgactccactagtgtgagacatgtccagaagtggccaatctgcagaggcagatgcagatgaggagggtgctgggggagcgactgcttatggggtcccggaactgttctggaattagatagtgcggatggttgcacaacctgatggatacaccgaaaactgctgaattagttaaaatagtgaatttgatgtcatgtgaattttacctcagttcagaacattttttaaaagacaagttgccagccaggtgcagtggctcatgcctgtaatccgagcactttgggaggcccaggcggggggatcacctgaggtcaggagtttgagaccagcttggccaacatggtgaaaccccatctctactacaaaaattagctacagacgtggtggcgggcacctataatcccagctacttgggaggctgaggcagggagaattgcttgaacccaggaggtggaggttgcagtgagctgagatcgcgccactgcactccagcctgggcgacagagcgagagtctgtctcaaaaaaaaagacaagttgcagatgagctgagctttgggcagagcaagcgggattctgatggggggtggatgttgcgctcgtcagcaggcaatagttagttggttgagggttttgatcacggggtagctactgcctgccccattttatccagctctgtagttgctatagagttgctagaaccttggcacatcacttatcagttttgtcacctcagatggcttcttcactacttggggtgtctcctgggtgtggggctctccttcctgtggcctctgctgactgcctggcactggcacacatgctctggtgaggggaggaccagcggtttttcccgtttgttttctgcttcctcgtttaaccctcctcgtcttgtaagatgaatgttcttgtctctgttcactatgcagatgaggactttgaggctcagagacgccactaacttgcctggtccaagccttttgggcctctcaggctgcagccagcaatgctgcagtgaagtttgcctgggaggctgaccctaggagtctgcaggcgtgttaggacccccgatctagaagacagcagagatgtaggccagggaggaccaataccgagcatctgagggcaggcacacctcagactgaccagaatacaaatgaattcgagtcacttacaaacaaagtggcataaggccaggcacagtggcccatgcctataatcccagcactttcggaggccgaggtgggaggattgcttgaggccaacgatgtgagaccagcctgggcaacatagcaagaccttgtctctacaaaaataaaaattcaaaaaagtggcatttaacacatactttttttcttttttttgagacagagttttgctctgtcccccaggctggagtgcaatggtgtgatctcggctcactgcaacctccacctcccaggttcaagtgcttctcctgccttagcctcccaagtagctgggattacaggcgtgtgccaccacaccgggctaatttttgtatttttattagagacggggtttcaccatgttggccaagctggtctggagctcctgacctcaggtgatccacccaccttggcctcccaaagtgctgggattacaggcatgagccacagtgcctggccaacacgtacttttaagtgaagctgatgtgtttggtgttattttcttgcagaaagtgaggggcattagtgtaaaggattttggaagtgtttaaagaaacaaaagggagtgttgagacgccatccacccctgagagaagctgcgtggtattatggcgggtgggggcaccaggatgggtggccccacttctggcctctgacttcctgagcctcaggcccatgtgggcccaggcagggcccggcaggccgggctgcccagctcccctccactgtcccctctgccaccagatgccatccggcagagcaaccagattctgcgggagcgctgcgaggagcttctgcatttccaagccagccagagggaggagaaggagttcctcatgtgcaagttccaggaggccaggaaactggtggagagactcggcctggagaagctcgatactgaagaggcagaaggagcaggctactgcgggaggtggagcacctgaagagatgccagcaggtagtcggggcagggcnnnnnnnnnnnnnnnnnnnngcgaagggagaaggagggagtcgggagggggcgagtgcaggctcaggtgaaagatgacggggcagccagcgtccttgccgcgaggccagccgtgtgtgggagctgccggtgcttaccaaggttgggatgcttccgtcccgtggagactgggagactgggccccgcgcctcctgaggtttccgtttccaaggagtggctgcggggccctcgggaaagcccctgggttgtgggtgctacacagatgtctcaaagggacagggtaagccctttgtagtaaatgctgtcagaaagggaggtcaggtgttggccggaacagacagtacatgctctgggcagccctgagcgtttccagacgggaactcactcaaaagggggctggggcgtcccaggggcgcggccttaggctcccagaggccccgcgaggtggtggccgggtgtcttcgggcaggggtttgagtgcagtgtgcctgccgagaggttctgcagttcccagtgtttaacaaaattcagtgtccactcttgatctgcacaaactctcccatcctggcggccccgggtgtggactggggcctgtgtttactttgccctattcgtgtctggcctccttttgtcccaagtctcagagagacggagagagatcccctgctggggctgtagctgcaaggccaccgggttcagccctcraggcctgcttgccggggcagtgactaagccgttgacaacctcaaggcagctttgtgctccttcgtctctttggggatctctttttgccccatctgtgtgtcaccctgtggcagagggttaaggtgggcagctggggagggttgggtggcccttgggctcatgaggccctagggcacccaggtttgggggtgccgagggcaggaaaaaaggcctcatggcgcgcaggcctcagccgcttgcgggttgccccgggcttgcggatggcaggagtgggccgctggggagaaagcagtgctgacaggaagtggctttttatcctgcagcagatggctgaggacaaggcctctgtgaaagcccaggtgacgtccttgctcggggagctgcaggagagccagagtcgcttggaggctgccactaaggaatgccaggctctggagggtcggtgagtcgggggagccggctccggagaccccttscagggtttccaaaagcaatgaggtgggtttaggggcctccagggtgctccttgatgaggatagaccggggcaggctgcgtaaasacgtcggggcagacgtcgggagaggtctgggccaggcatccgggacctgggtcccagccggctctccgcactctgtgaccctttgatggagtttggattatttccttaggaggcattctgggggccccgagcccacacccacagtgtctagttctctggaaggacttctgggaccggcgcacagtcgccctcgtggctgaggttgatgacagggaaaaaggcacagggcaggagccgccagggcaggagccgtggggggagttggagaagccctgtcccagcctcccgctgccctgcgagcggcacagtgagaagcgcctcccacacgggccgtgttcctgcccagggatgcccgctagagactcagcgccctgggtgtttactgggggcaggtcctgtcagcgccctctgccaggcaggtacctaaatccccgactcccagcagcagagcgggtgctcacgtcaaccacgttcttcctacaaatggcctaggtgcagggaccgacctgaccactagagaaagtgtcactgtggcaagggaacttcaccagccaagggccaaccttgccagccggtggcctcaggcctgctggttactctcttttgcaaaggggtcttggttcttgtgagtgggaccattgggtcaaagggcagggaggtttctgtggttctcattcggtcctgcttctgccctccagacagatggatcagctgccaggggggccccagccatcccagcacagtargcggtcaaggtgcacttggggcagccagcagggcagaggggaggggagcttgacccaggctctgatgggcagagggaacccgtgcagggtgtgggggcagtatgcaggcaggcgcggaggggagagccaagcagccaggcctgccaggcagagttggggtgactggagaagggccgtgtctgcctgtggccagaggccacccaggacctggacagatgcacccaccattgtccctgcagtgaggctgtggaagggcttggtgtggtgggatgaggccagaccctggaaactggaggttaagggagctgtaggggggcaggtgtgggaactgagcatccgagcaggtcgtctgggactccagcagagctctgggcagcagcagggatggggccgaggcccggtctgcattgagctcagtgcttgcacgcccaggtgggcagtctctcatttttggaacagcagtctctcctgaccccctccactgagactgcttttgctggggcccccagcagtcccccagtggaactccacgggcagttccgagggctcctctcacctggccccagcactgcgggatgcaggcgaccccatccttttctcggaccacccccttcccctgrcttccaggtctccttgccatctgtacttggtcacctgctgggcccctgcattgaagcaaacacgtcttaagcaaagctcctcacctgctgctcccacctggccccctgcagttgtcctcgtgtctgttgacggtgcctccaccctgccgcctggcatcagctcgcagtcacagggtgttcagagccgacccccaccccccgcccacgccctgcgcatagcccctsccgtccccccgttcgtcctccctgagtctgctctttccccgtgccagggcccsggcggccagcgagcaggcgcggcagctggagagtgagcgcgaggcgctgcagcagcagcacagcgtgcaggtggaccagctgcgcatgcagggccagagcgtggaggccgcgctccgcatggagcgccaggccgcctcggaggagaagtgagtcagcgggggcggggccgcaccgcagggtctgtggttctacacttgatcttagccgaaaggctgagaagtgtcgggtccatggttctttctgccttctgaggactccttcagattctgcctgtggctgtgggcccattctgtcccttagccttgctaacggtagaggcgaccatgatgacacccggtttgtctttgatacagtcatgccatctgctctccagaccacgtttcactgcgtgtccacacgtggccttttttgtagtttttttttcctagccactaggtcatcaggggacttgtcctttaaaaccccttctaggccaggtgctgtggctcacgcctgtaatcccaacactttgggaggccaaagtgggtagatggcttaagcccgggagttccaagaccagcctgggcaacagaaagacaacaaaaatacccccaaacccccccgtctaccagcatccaatctgggacctcaggttcctgtccttggcgtgccttttcagtctcctttaatctagaacagttcccctgcctttctgagctgtttgtgaagttcacagttttgaacagtgcagggtagttccattgtattattactattattttcaagacagggtcttgctctaccgtccaggctggagtgcagtggcataatctcggcttactgtaccttccgcctcttggtctcaagcgatcctcccaggtagctgggactataggcgcaggccagcacacctggctaatttttgcatttttggtagaggtggcgttttcctatgttgcccgggctggtcttgaactcctgagctcaagcgatcctcctgccttggcttctcaaagtgttgggattatgggcgtgagccaccgcgtctggccgcgattttattataaacattaaaaatactagcttttaggaaaacgatattaactgcctggtgaccagcccaccaaagcctgctttagagttgacggcctcaggagtcctcacacagccttggaagaccccattccaggcctgtgatgcgagggagggaaggaagggggtagagttggaagcaggcagcaccgtggctggactggcatgaggtggtttctccagcaaaagctccctttcctcaggaggaagcyggcccagttgcaggtggcctatcaccagctcttccaagaatasgacaaccacatcaagagcagcgtggtgggcagtgagcggaagcgagtgagtgcgaccactggggctctagggctggccttgcctcttcctctccccgtggccctgaaccttgagaatgggtagacctgccttagacttgccttagacctgtgtcaggctgcagctgcgacagctcagggaagctgtggggagatggcaaccccaggatgttgctctcaggagtgtcagcaggccatcttaatggggggctgggccagagccttggggtgctccctctgtggggctggggacgtcttgtctccatggacattccctcttgccagccatcgccatctggcacctggctcagcttcccccaagccaaggtaagcccgacagcatttccaccccagtgttggctgggagccttttcctagtttgtcctcatcagacctaagctggggtgcagtttgctagtgatcacattttagcaggacaccgtcaatcgtaagtgtacccagaggagatttataaggacaaagcctgaagccaggtcacatggggaagagttagctacaaaactggccacttaatctctggaggggggcgttggtggggtgtgtctgtgtgtgtctcagggggctggagatgcctgcgtgggaggagtgcacctctgaccaggtggcagagtggaaggactgagggctctcagctgagctgtgcacatggcgggcacaggaccggctggctgtgagtgggtgtggcctgtggcctgtgaagggtgggaggagggctgtggagctggggattctgggaagggaatgtcggcccagctgggaggttgtaccagatgacctcagcggcctcttcagtcctgaaaaaaacctcagcatctcctctgtcgttttgggccgtgacaggacgcagccatctccctgtgcacgctgagatcctgcaatgggccctcaaatcaggggctggcatcacccagcctggtcagccagggccactctttcatccttctcagttcttctcagccagcctcgccctgggctgacgaggctccgtcagctccccttgcccgtccttagggaatgcagctggaagatctcaaacagcagctccagcaggccgaggaggccctggtggccaaacaggaggtgatcgataagctgaaggaggaggscgagyagcacaagattgtgatggagaccgttccggtgctgaaggcccaggtgagggccctcctctctgacccaccctggcactgggacctggagagtctctttggcgtctttttttttttttttgcttttgctttttgagattgagttttgctcttgttgcccaggctggagtgccactagtggcacgatcttggctcactgcaacctctgcctcccgggttcaaacaattctcttgcctcagcctcctgagtagctgggattacaggcgcctgccgccatgcccgtctaatttttgtatttttagtagagacagggtttcaccatgttggcccagctggtctcgaacttctggcctcaggtgatctgcccaccgcagtctctcaaagttctgggattacaggcgtgagccaccgcacccggcctctttggcatcattttgtagtggcctttcgtaagcttctgagccacttgtgctgctccttagacctctcggtgagcttggcattactcgccgacgtatctgtttcctctgcgccgctgggggctctgggaggacagcagtgggttctgctttgttcctgtggtgcctggcgcagtgcctggtgggtggctggcttgtggcgggcacatccctttctgttggatttgccaggcggatatctacaaggcgracttccaggctgagaggcaggcccgggagaagctggccgagaagaaggagctcctgcaggagcagctggagcagctgcagagggagtacagcaaactgaaggccagctgtcaggagtcggccaggtgggcctctgagagcgtgcccgtgtgagcagtgggtgcgacactggggggtcgccagtggtgacccygcagtgggtgcgacactggggggttgccagtggtgaccacaggagayggatggctcctggtgttctgggttagggctcactgtggtccctctcctctcacctgagcttccaagagctgctttgacactagtccagccaaggagctttacagaaatgcgtggcttgactggacggtttctgtttycaaaggatcgaggacatgaggaagcggcatgtcgaggtctcccaggcccccttgccccccgcccctggtgagtgagcgagaactgggcctgcgggaggaggtgggtggggagggcaggtgctgcgccgcgggaggtcacagttcgaccttcctgttgctctctggagacttgacggcgggagctcgtgtaggccaccccatcggtagcccacccccttccccgaggctaagggaggcatgccgtggtagcggcggctcctggtcttacatgagtggcctgtgagaccaggcctgccattgacagtcctgccaagtctccgtccccctccatcctccccttccctctgactcttctcttttcccagcctacctctcctctcccctggccctgcccagccagaggaggagcccccccgagkagccacctgacttctgctgtcccaagtgccagtatcaggcccctgwtrtggacaccctgcagatacatgtcatggagykcattgagtrgggccggccagtgcaaggccactgcctgccgaggacgtgcccgggaccgtgcagtctgcgctttcctctcccgcctgcctagcccaggatgaagggctgggtggccacaactgggatgccacctggagccccacccaggagctggccgcggcaccttacgcttcagctgttgatccgctggtcccctcttttggggtagatgcggccccgatcaggcctgactcgctgctctttttgttcccttctgtctgctcgaaccacttgcctcgggctaatccctccctcttcctccacccggcactggggaagtcaagaatggggcctggggctctcagggagaactgcttcccctggcagagctgggtggcagctcttcctcccaccggacaccgacccgcccgcygctgtgccctgggagtgctgccctcttaccatgcacacgggtgctctccttttgggctgcatgctattccattttgcagccagaccgatgtgtatttaaccagtcactattgatggacatttgggttgtttcccatctttttgttaccataaataatggcatagtaaaaatccttgtgcattagtcgtgcgtatctttggcatagattctgagaagtgacaccactgagcatgggcgatggcgtagatggtacctgagcccccttcctccttggagcttggtttcccatctctccccaccccctatttccctagccttgccaaggaggaggtgggaaagcccgtttgggtttttgtcattcgctaggccatgcagttctctgttaagagtgagcttaaacatctttcctgaggctttaaggaccttttttagttctgcttctgaatgggctgctcatatcatatatatatatgtatatgtatagttgtgtatatgtatgtgtgtgtgtgtgtgtgtgtgtgtatttttttttttttttttgagacagagttttgctcttctcgcccagactggagtgcagtggcgtgatctcagctcactgcaacctctgcctcctgcgttcaacctattctcctgcctcagcctccctagtagctgggactacaggcgcctgccaccacgctcggctaatttttgtatttttagtagagatggggtttcaccatgttggccaggctggtctcgaactcctgacctcacgtgatccacctgccttggcctcccaaagtgctgggattacaggtgtgagccactgtacctggccaatttttgtatttttagtagagatgggggtttcagcactttggccaggctggtctcaaactcctgacctcaggtgatctgcctgcctcggcctcccaaagtgctaggattacaggtgtgagccactgcgccccgctgggctgctcatatcttttatccgtttttctactgggttatcttttgttgctcagcttttagaaactctttgtccatgagcaggattgggtttgtggctgtgatagaaattgcagatatcttttcctgctttgacctcgctactagtgtttctttgttttttgttttgagataaggtctctgtcacccgggtgggagtgtagtggcacaatcagagctcactgcagccttcacctcctgagctccagcagtcctcctgcctcggccttgcgagtagctgggatcacaggcgtgcgccaccacaccctgctaaactactggtgcttctcagcctcgaagtttttttttctttatgtagtcacatttatccattttttcccccttttactgctttgactttggagtcgtcgtgaccaccttgtggtctgtgggagggatgcttcacacatgagcacttttctttttctaacaccgaagcgtgctcttgtcttcaccaagagtgttgttgcccagtgtgactggtgatggctgtttcatcatattccagaagtttgtgatgccatttcccacactggccccaattaggaagaacagacgactctacttgttttgcaagattctggaaatttcccggggtgtcagagccctgggcattaaccctgcaattgtagcaaaggaaacaaagttggaagttgactccccagcacccaggccttccttcctgccctcctccaagctgccctggttgggaacgggatattgtgaatccaccctgaggcttcctcacagggcttcctgctatttgacagtgtgaggctggctagaattgggatatgaggccttctaaaaattaacctggcctgagggctttctcagcatctgggggcggggtgtgggggcggggagtgacctttcccctccttcaagccaggtgcccatcagattctacttgggaaaatgtgaaaggcacagacagcttgtctgctcacgggtgctgcacttaaatcctaatcttgcaatttttctacaagagcactttacattttttttttggagggagggtgtatgagtagacggtggctgctgtaacaaaggactgcacacttggggcttaaaacaacagaaactccttcacagtgttggaagccacagtctgcaatcaagttgtcagcaaggctggtttcttttttctttctctttctttctttctttctctttctttctttctttctttctctttctttctttctctttctttctttttctttctctttctctttctttctttctttcttttttctttcttttctttctccctctctctctccctctctctctcctctctctctttctctctttctttcttgttggatacagtcttgctctgacacccaggctggagtgcagtggtgccatctcagttcactgcaacttacgcctccagggttcaagcaattcttgtgcctcagcctcccgagtatctgggattacaagtgcccgccactatgtccggcaaggctggtttcctctgcaggtgccaagagaatcgtttacaggtctctgtcttagcctctgctggttgcttatagagccatcaccctagtctctgcctctgtcatcacacagtctcttcctcttcgtctgtgtcttcccttttgtctcataaaggacaccagtcattggatgtagggcccacctggataatccagaatgatctcctcatctcggcattcattacatctgcaaagacccttttcccaaagaaggtcacacccataagatatgcacgtatctcttcagggccatcacacaacccagtatggggacatgttccagtgcacacagatgagggcaaatgcagcagcagtgcctgggagctggaaaaacacccctgcttgggccccctggaccaaccgagtcagaatcttggtctagacccaccaggcattggtctagacccaccgccctgcccggaggtggggctgcctcctccctcctccggtagcacagtgtagggttgaccgtacaccagacaccaaggatttaaaaccataccatttgcgcagaagtacggcattccagggttttccttttcggctttacttaggttgagcttccagaacaactggttggattactcttgggagggaaccagcctgcctgccctattggctgcggccccttgatccacaaacgaagcccatccctgccggagcttgtggcgttctctggtgttcatgcgcgctccccctcctgccgaccaatgcacaagaacagtgcgggcgaccagtaagcacagtgagaaagcatttcaccctcatcagtaactaaaacaacagcaagtctgacagcaagcaaaaagtgatctgaaaatggcaaccgatgaagccctaggtgagcgctctgctggcaaggtgcaggacagcggcccttgcaatgctgccctttccgagggggccatttgctgggatggagcaagcccgtaggcagcgtcctcagccctggtgcgtaaccctaagagagagtcgggcactcagcgatgactctggcattgggaaggtgcttcacttcgtcatttgtagctgccaaaggtcggggtgagataagaggctgcgtatgtaacgatgtggtccggcacagctggcattttgaacatctcctcacacgcaacatgccttgtagcatgttggtgtgaacaggccaggtgacaaacttatggataaagcgtgaccccaatagagaagtaaaagctctgagtgcataccctgctaacatttggacggacgtgagtagctgggtggccagtaatgagaagttttccttacatgttagtacctttcctaaatgcctatcatttgcacgcattcctttgatacacagagaatacgtcttcccacacagtcgctcgggtggtaacgcagcttggttttcttctgtgccagtggcagggaagagcccgctgttgacacagcctctcagcaaggcacggggcaggggctgactgtgtctcctggggctgccgtgaccaagcaccacagactgcggggccgaagccacagaaacgcgtggcctcccgcttctggaggcctggaggctgagctagcggtggtgtcggcagggtgggctccccgccagggccgcgagggagctgccttccaggcctctccacggcgccgggggccgccggctgcacctctccagcctccatctccgtcatcctgtggccttgtccccgcgggcctctgtgcctgtcctcctcttttgacaagaacaccggagatacacaaaggtacacaaaagcgggcctttgttcaagctggcaaaagagatcttcttcagaaacccctgcttgcgggggagagagctgagctccgttcccgccccagcagaggcggcctggccttgcgaagggagaaggagggagtcgggagggggcgagtgcaggctcaggtgaaagatgacggggcagccagcgtccttgccgcgaggccagccgtgtgtgggagctgccggtgcttaccaaggttgggatgcttccgtcccgtggagactgggagactgggccccgcgcctcctgaggtttccgtttccaaggagtggctgcggggccctcgggaaagcccctgggttgtgggtgctacacagatgtctcaaagggacagggtaagccctttgtagtaaatgctgtcagaaagggaggtcaggtgttggccggaacagacagtacatgctctgggcagccctgagcgtttccagacgggaactcactcaaaagggggctggggcgtcccaggggcgcggccttaggctcccagaggccccgcgaggtggtggccgggtgtcttcgggcaggggtttgagtgcagtgtgcctgccgagaggttctgcagttccgagcaccatcattttctcctcctcagaccccttggttctccttccacgtcctggcagctgcttcgcaggctccttgctggttcctgtgtctccgagctgactcccgaattctcttcctctccttgctcagacactgcccctttgtgacctcgtccatcttcaaggccttgatgctgatgacagatttctgtcttccagtcccgatctgttccttcacgaaaatgagcccagtagcccgtccaagccagaaatggacttttagcccccaccccctgccaactctgccctttccctcatccccagttgcttaaaccaaaacggattcctcttcctctcatgatccaaactcctgagtcccttcaccttttgcctacactatcacagtgacctccttgctgctttcacactggagagcgtgggctccctgtgatctactctccacatggcagccagtgtcatctggtaaacctttgctgaaaccctgccatgcccttcagttgccctggaaacctgaactcatcctcagcctggctcgcagagccctcatgccgctgggacgtcacgttatgtccctctcctgctggcccgctgcacccagccgcaccacatgccggccgcacctcacacacgctggcctcttggcccttcctcgaacacacggcgcttgtccttgttgtcccctcatctttgcatggccgatttctttttctcattcagctctaagtttaaactttcaacagttctaagcgtatcaccttcttcatcttaaagtcctcatcctaaatcacactgcactgttttaactcccagcttggcagtccaaacggcctcatttattctgctttgttttctctctccttccaccagagggagagcagaggcctcctccagctcagtcaggcaccatcccccggaacagcggtctccaacctttttggcaccagggaccggttttgtggaagacgagttttccacagacggggatggggcgtgggatgacggttcggggatgaaactcttccacttcagatcatcaggcattagtcagatgctcctaaggagcacacaacctagatgatccctcgcacacacagttcacaatagggtttgcgctcctgtgagagtctgaggccgctggctgatctgacaggaggcagagctcaggcggtcatgcgagcaatggggagcagctgtacacacagatgaagcttcgctcgcgtgcccaccactcgccgcctgctctgtggctcagttcttaacaggccacagaccagtatcggtccgtggccggggggttggggacccctgccctagaacgatgctcggcaca

SEQ ID NO: 94513 - DNA, 20021 bp, Homo sapiens
ttgaccattttaaagtatacaattcagtgctgattcctttaaaaaaaaaacaaaacctattttcagctaggctgttgtgcttccagttcagtgagagagtcaatgaataaatataatttcactggtagaaatgctaagttttaaaaagccttcactttttaattaaaaagaataagtggactaggcacagtggctcacacctgtaatcccaacactttgggaggccaaggcggaagcaacacttgagcccaggagtttgagactagcctgtcaacacagagagactccgtttctacaaaaagataaaaaagtagccagggatattgtggcacatgccggtagtcctagatattcgggaggtggaggtggaggtgagaggatcactagagcccaggaagtcgaggctgcagtgagccatgatcccaccactgaactccagcctgggcaacagagcgagacccggtctcaaaaaaaaaaaaaagtggtcatcgtggaaattcaggtaataccagcaataccagcatgtaaagtaaaacgtgaaaacgttcccctcatcgataatcccaactgcctagagatagccactgttaaggtattgtcatgtatccttacagagatttctctatacatacacatatacttatatataggggatgctgttgtttttaacataaaaaatttctaagacataaaattatgcattgctctgcatcttcttttccacataaccatagcttaggatcctcccaaagaaggacatcaatttctagtttcagtgtctgagcctgctcacttcacgatacttttgacaattgtatatttttattgtactctttgccaatctaataagcaactcattaagtttaacttcctagcttagtttttcttcttatggaatagttcaaatacttagaaacatagagaagatagctttctttcttaattcagctcaagtagacaagtatctgaagtgcttaactggtatttttagagtatgtgcacagtttttctctattagaggaagcacagaatgtacaggaaatagagttagaatgactgacgtagggtttgagtcctcgttcattttctaaatttaagactctttttctcatctataaaattagagggtataagtaattgctagtagtcttaaagtcctaagagtataggactccaaatcacaaacgtttgaaaacgcattgttaaaattcctctacctggattgcttaatggtgagaatactgtatctcctccacttcctaaagcctatgagttccacaagatcttagttttgttcatttatgtatatcaagtgcctagaacattgcctagcatgcttacatttgtggaatgattgaaaatggttaggagctttcaatctggtaaattgccttgaaacaattatttggacaaagtaataaatctggcataatttcactctttggtctaactctcacactcctgaaatgaaaatgctagaaaatagagaactcttacacatcattcagggagttacatcggccagcagtatagagtctcagatatcctactcctgggatctaaagtcgaactccccacccccaacacctgacggggcccacactcaaaagtgtcaaaactcatagctatgcacattcacaagactgtagaagtcgggctgtcacctacgctactccactctcagattctacatccccagaagacaaagagttacagttccttctctcacgaattccacaactccgaaaaccgcgtaattgaagccaccaaaggcatagaagcggcagggaaagggggctgggaagaggcgaacagaccctcttaagccccagtcattgggaaaagcccatgctgctggaaaccgcgttctcacctccttctttctttgggcagaggctgagggaacgtcgcaaacgatgagcagcgccaccaccatggtcacagagacacaccaaaaccgccaacgcgctgccatgttcgctcctctcccttctataagtgaaactttgctccggctaggtctgagggtggggcgtgagaacaggcaaatcggccccttgcctttcctcattggtccagctcagccctgccgggagacccctcacattacgtcacagcgcgctggcgctacacgcccgctaaaagaaggttgatttctaattggccccggtcggccaatagaaaaaagataatctggagcgttttcattggtccgctaaagataatgacccgcccctttctcgatacgtaaacatctagcgcgctgacgctttccaagcacgcatgcgcagttgtgaaatattgcggagttttcggagtccaaaatggcttgaagttgctagaacagaatctttcaaagactcatttagaagtccttgaaattcgccgccttcatgtaatattctagaaaaatgggacctagccgcgtgagggataagagctatttagtccgttatcctgcctccaaagtacttcaaagtgaaaaaataaaagtaggaaagcaaaaatatacctaataccactgagggaaatttttaaaggtaaatatgaacaagagcttgttgaatacctattgtgtcctagaaactgccaggagcgctgaaaaaagaggacatcaaagattattttttaaagtttttgtttatttatggctttttttgagatggaatttcgctcttgtagcccaggctggcgtgcagtggcgccatctcggctcactgcaacctacgcctcccgggttcaagcgattctcctgcctcagcctcccgagtagctgggattacaggcgcccgccatcacgcctggctaattttttgtattttagtagagacggggtttcgccatgttgggcaggctggtctcgaactcctgacctcaggtgatccgcccgcctcggcctcccaaagttctgggattacaggcgtgagccaccaagcccggccggctttttttgtttgttttttcagttaaactccttgacttaatatttaaagcaccaacaaggactttaattgcaggttatagacagcaaattccttctttttattcattattttgtttgggggatgggtacaaaagtaaggttgtaaagaaggaaaacaccaacaagataaaatcaatctgcctacaatttggatttattttgatggtgtggaaaatattatatgactattattttaggcgctactggataaaaaaaccaggaaattaatttcagtatgttggagagacaaggagatgggatggaaagaaaaatagctggttccgaagtgaagagatgtgaaatacagatgtgaaaaaaagttaaatcatttatggaaacttatattaagaaaatgcaggccgggtgcgatggctcatgcctgtaatctcagcactttgggaagtcgaagtgggtggatcacctgaggtcaggagttcaagaccagcctgaccaacatggcaaaacccccgtctctactaaaaatttaaaaattagcccggtgtggtggcgcaggcctgtaatcccagctacatgggagtctgaggcagaagaatcgcttcaaccctggaggcggagtttgcagtgagctgaaatcgtgttatcacactccagcctgggcaacaagagcgaaactcaatctcaaaaaaaaaaaaaaaggaaagaaaaaagaaaaaatgcaaaataaaagtacactgagacatactgtatgattcaatctatatatgacattctggaaaaggcaaactcattggtacagagaacagattagtggctgccaggggctaggggtagggaaaagggttgatcacaaagaggtcaaacaagggtgtttttatgatgctagagctattctgtccttaattgtggtggtggtgacacaattgtatgcatttgtcaaaacgcatagaactgtacaccaaaaagtgaattttactatgtgtatgttttaaaaataaaaattttaaagtttaaaagggatatcttacctatcatattggcaaaaatccaaaagcttgacactacatgctattagcaaggctgtggggagtcaggcaccctttatattaatacgttgctggtgggaaggcaaaacgttacaacatctataatttggcaatatctaaaaaaactacacatatatttatcctttaatccagcaatcccacttctagtaacctaccttggagagagacatccagcaatatgaaaatatgtgtgcacaaagttattcatttcagcattattgaaattgaaatattcttgaaactacctaaatattccaacataggagattgactgaatatactatagcacatatacaccacagattttgcagctgtaaaaaaggaatgaggaagacttatgtaaaatgataatggatttttatgctacatttgtataaaatagagaaataagaaaacatacaggtatttgcctatttttgcaaaaggaaacacacaagataaaccagaaagtaatgaaatcggttacctataggaattggtggaaatggaatgcaacagttaggggagggaatgacacttctctaagtacactagtctgtttagttttgacttttggaataatgttaatattttcaatagtcaaaatgtataatcaaagcatttagttttacacgatgaaaaagtcttagagatgaataatggtgatagttgcacaacaatgtgaatgccattaatgccactgaactgtatgtattttattttttttgttttgggacaggtctcaggctagagtgcagtggtgcgatcttggctcactgtaacctccgcctccccggttcaagcaagtctcatgcctcagcctcccgagtagctgggattagaagcatgtgccaccatgcccagctaattttttgtatattagtagagacggggttttgccgtgttgccatttcttttctttcttttttttcttttcttttcttttcttttttttttttgagacggagtcttgctctgtcaccaggctggagtgcagtggtggtatcttggctcactgcaacctccgactccctggttcaagcgattctgccgcctcagtctacagagtagctgggattacaggcacatgccaccacgcccagctaattgttggtatttttagtagagatggggtttcaccatgttggccaggatggtctcgatctcctgacctcgtgatccgcccacctcggcctcccaaagtgctgggattacaggcgtgagccaccgcgccaggcctaacagctttcttttctttctttctttttgagacgtagtctcgctctgtcgcccaggctggagtccagtggcacgttctcggctcactgcaacctccgcctcccgggttcaagtgattattctgcctcagcctcctgagtagctgggatgacaggcgcgcgccaccacgccggctaatttttgtatttttagtagagacggggtttcaccatcttggccaggctggtctcgaactccgacctcgtgatccgcccaccttggcctctcaaagtgctgggattacaggcgtgagccaccgcgcccggccaatagctttccaaagttattttatcacgtatttatctacatattacagaagtttttactgttcttgcaacttttctctaaacttgacgttatttgaaaactaaaagctaagccaattagtatagtagtaatagcagacaaaaaaaatgagagaagtaaaggaagttttgggggaacagaaagaagaaagagctagtgtggagatactaaaccgaagcttgtggaacttgaacgccattttgaagctagttccttagacgattcggtcgaagatctgtctctcggctgccctctatagagctctaaacctggcttcaaggagttctttcattcttcattagataccacccaccatacgtcattttataaagccggaaactacatttcccaaaaggcctttatttttcctcgcgggaaaagggattgcaattactataggttttacaggtatcgcgagatttcgtcaaatctcattacggatcccggctgaaagccattttgtttttcagctcacttcaagggtacctgaagcgaattggcaccaaagcagcagctgtattgccgcagttctagcttcaccttcacgatgtttcccttggtcaaaagcgcactaaatcgtctccaaggtgagcaaaaattatgacaaatcatttacaacaaccttatatcaatgtgtcctcgcggcctctcgtgtgctttccttttacgaacatctcggccttctaatcttgaatgctgtctgtctcccatctcgtcccaagtcattgggatgatgtccttagcattggctttatcacccagtatttctgtttcggtttccagctctctttctgttatcggagtgatagtctagccctgctttttaattcttcagtaacctttgatttcagggaaggacattcttggtagacacctcgttccttaagtgatgtcctacattttagctttggggatatgtttactcctaaccctgtatagaaaaatatcttctccaattcctattactgtaatagacggaaactgtaaatctagctcttcacctggtttaattgcagggaaacaacccaaatggtatcgatgcagctttgaagttatttgtggattaacaatgttagctggccaggcgcggtggctcacacttgtaatcccagcactttgggaggccaaggcgggcggatcccctgaggtcaggagttcgagaccagcctggccaacatagtgaaacgccgtccctactaaaaatacaaaaattagccgggcgtggtggtgggcgcctgtaatcccagctacttgggaggctgaggcaagagaatcgcttgtacccgggaggcggaggttgcagtgagccaagactgctactgcactccagcctgggcaacaagagcgggactccgtctcgaaaacaaaaacaaaacaatgttagctgtcctgaaggcaatcgtggtcatttttttcttatccaaaggttgggcaggtacagggagttttgagaccagcattatgtagagaaaatgcaatagattgaggagaacaaattaattttcatacttgatttgcaccgaaggtgaccttgagtaacgtgggcagttgttacacaatgaaggtgacccgtaattactatttagtttgtttagccatcttttgattttcacttaatagaatcattggaggatattattagattgtgtcctaaactcttaagcaactttgaaaataaccacaaaatattagctggactattttcatattcccaaagtagcatttattatctcttttactttgggcatatgatttagcctctctcaacctcagtttccttctttgtaaaataagtaatttgtaaataatgcctacttcatggggttgttgaggattatatgagatcaccaatgtgtggtaattaaacagttgtcacagaggagaggtctgatgaaatccaccagagttacatgagtgtgttgaagttatgagatgttgcagaattttttggtagtcttaatttctttgctctttgagcaaatagggccaccttgtacctcaggaaaggttttttgtttttttttcagcgtggaattcacatgcccactttttatcttttctggagcagaatatattatgaaatatttgtaaatttgcctatcccggtgtgactaaaagatgaaaagggaaagctatgtaagacagttagaagatctgataatggtctaataactatcatgaagtaacccattgtaccatgtagaaatattcattgctagtgaatgggcaacattgcagtttcttttttttttttttgagacaaagtttcgctcttgttgcccaggctggagtgcagtggctcaatcttggttcactgcaatctccgtctcctaggttcaagtgattctcctgcctcaggctccctagcttttcattatatatgtaagtacctttggaggctctttaaaacgataagaacctgccccttaaattggacaggaagaaaaaaaaaaacagctagaaacaagctttttccagtctcggctgtttcccaagccctcctttttagttcttccaggggccgtttgaaaacttttgttcttctctttctactggtataatactaacagcaaactttatcattctgctcaaaaactaagtccttagctaattctgcttccttgtacgatactgatttttatctacatgtgtaatcctctagactggaagttacttgaggacaggatctctgtcttatacttttttatataccccatttctcattttttatttttagggacagagaattgctctgttacccaggctggagtgtagtggtgtgatcatagctcactgcatcctctaactcctggactcaagtgatcgtccggccacagcctcctgagtagctgggactacaggtgtgcatgcaccaccatgcccggctaatttttaattttcaatttttttgtagagacagggtctcactatgtttcacagactggtctgaaactcctggcctcaagcgatcctcctaccttggcctccgaaagtattgggattacagatgtgagccactgtgcctggcccattaattttttaaaaatcaagattactctagttgtggcgagtttttttgttactgtagtaattttacagtcataagcatttagtgtgctttaatttgaagttcatttgagttcatttgcccttgtatgttgtaagttgttgggctctattgagtaaactttaatgaaaatttaagtcataagtattcaaattaatcaatgggagccaaaatttcaggggttatgcaaataccactttgtagagaatgttactgacatcattcattctttgcttttttcccccaacactattatgaaaactctcagacatactgaagagttggaagaatcgtatgaacacccatatacccaccacaaagattctacagttaacattttgctatttgttttatcatgtatttgtccatctgtcaattcatcttatttttgttgcatttcaaagtacactgctttaatagctacaatatgttttaacattttattgaactacataatactgtaaaattaacttccttggctttcctgattggcagtatcaatcacatatgttttctttacctgacaattgataatatgcttctgtattcttttttcgttttcctgtaagttcgaagmattcagcaaacaatggcaaggcagagccaccagaaacgtacacctgattttcatgacaaatacggtaatgctgtattagctagtggagccactttctgtattgttacatggacatatgtaagtactattgattaataatttctgtttcagatgtttttcattctcagtctatgcattcaaagtgtcttaacatagtagtgtacatatctagttaggagggacttgagagattgtgtaatctaattacccacacagtgcaggggattttttccccccagcattcatccatcttctgttcttaacattcccagtaataaattgcttactggatcacaaggcagccctttccatcttgtgtagctgttttttttgtttttgtttttttttttttttaagaagaagtcttgctgtgtcccccaggctggagtgcagtggtgcgatcttggctcactgcaacctctgcctcctgggttcaagcacttcttctgcctcaggctcccaagtagctgggaccacaggtgtgtgccaccaggcctggctatttttttttttttttttttttgagacggagtcttgctctgttgcccaggctggagtgcagtggcgcgatctcggctcactgcaacctctgcctcctgggttcaagtgattctcctgtctcagcctcccaggtagcgggattacaggcgccctccagtacgcctggcagatttttgtatttttagtagagacggggtttcaccatgttagttaggctggtcttgaactcctgacctcaggtgatccgcccgccttggtttcccaaagtgctaggattacaggtgtgagccactgtgcccagccttgtgtagctgttaaaaggatcatatggtgagttaaaatctgcctttttcctatgctacccattgttcattgaagcacagaaattctgacccacttccatataacagccatcagataatagaaaattgctatcatatctcctcaattttctttttcaaattaaacatccttagttctatcagtaatttttttgttcatggtttccaggatttttactgtcttggatcgccttcctggacataacttcacttaacaatttttcttttaaaattttacactcagaacttagcacagtattcgtgacagatgagatgtaatgtatctttttatattttagtttctttacatcttacatttaacaatctatctttcagtcactgttacttactggctaaaagtaggagtcctgaagtctgtgttttttttttttgttttgttttttgttttttttttttttgagatggaatcttgctctgtcgcccaggctggagtgcagtggcgcgatctctgctcactgcaaactccgcctcccgggttcacgccatcctcctgcctcagccttccgagtagctgggactacaggtgcccaccaccatgcccggctaattttttgtatttttagtagagatggggtttcaccgtgttagccaggatggtctcgatctcctgacctcgtgatccacccacctcggcctcccaaagtgctgggattacaagcgtgagccactgcgcccggcccgaagtcttaataaatgcataagttggtttaaaaagatacaaattaatccttaatgtaataaactttatttaaataaataggcctttttagtttttgttttgatcttcctgaaatcaaatattaagatgtgtgcctaggctgggcatggtggctcacgcctgtagtcctagcactttgggaggccctggcgggtggatcacctgaggtcaggagtttggtactagcatggtgaaaccccatctctactaaaaatacaaaaattagccgggcgtggtggtgggcacctgtagtcccagctacttgggaggctgaggcaggagaatcgcctgaagttggagggggtggaggttgcagtgagttgagatcgtgccactgtactctagcctgggcgataaagcgagactgtctcaaaaaaaaaaaaagtctcaaaaaaaaaattaaagtgtgcttaattagaaggataaacagatgttgaacaaatgtttgatcagaggagcttttggaggtgaaatgttccttagtgatacagagaatataaaatactctggcagttacttaggtagttgtggttgagggaatcagtgtattgagtgggtagtatagaaatgtgaagtataaatttgaattaaataaaatttaaaaattcatttccttggtgatactagtcatattccaggtggctagtagccacatgtagctagtgactactgtttttaacagtgaagatctagaacatttccttcagctcaagaagttctattgaacaacaggactgctctagaaaattaggacagcaatcaggtttggcctatatggagggtattagatcccaggtgagtttctgtgtatttttaacctatagaacagaatatctgtcattttcaagaaatagtctccgagagagtgtactctggtttaaacacgtaactgacagcattttaattcttacaggtagcaacacaagtcggaatagaatggaacctgtcccctgttggcagagttaccccaaaggaatggaggaatcagtaatcatcccagctggtgtaataatgaattgtttaaaaaacagctcataattgatgccaaattaaagcmctgtgtacccattaagatatggcattattgaagaaataaagtacatttgaaaccttcattgtaggttttgtttctttgtaaatgaaactaagcttgatcactttagcctttatgttaatattaaagtcaaatgctgtgcagcttcttaaataggtttttttttttttttttttttttttttgggacgaagtctcactttgtcccccaggctggagtgcagtggcaccatctcagctcactgcgacctctgcctcctgagttcaagtgattctcctgtctcagcctcccgagtagccagaactacaggcacatgccatgacgcccagctaattttttttttttttgagacggagtctcactctgttgcccaggctggaatgcaatggcgtgatctcggctcctgcaacctccgcctcccgggttcaagcgattctcctgtctcagccttccaagtagctgggattacaggtgcacgccaccaggcccggctaatttttgtatttttagtagagacggggtttcaccatgttggtcaggctggtctcgagctcctgatctcgtgatccacccaccttggtctcccaaagtgctgggattacaggtgtgagccaccgtgcccggcaatttttgtatttttagtagagacagggtttcaccatattggtcaggctggtttcaaactcacgacctcaggtgatccgcctgccttggcctcccaaagtggtaggattacaggcgtgagccacggcacccagcccttaaatggcttttatgaggtaatgtgaaaggaaaatttgcctttgacctggaagtcaactttatagtaagctgaaattataaataactgatcatggaactattgcagatcacctttgagccaaaaatttggcctggattttggttatgcctactactatgtgcctctcatttgtatttatacctggaattggcattattaactccttttcactcctgcctagaaaacttaaagtgtcaccagacccaagggcggagtggtcctataaaacaaactcgtagcctgtctgaagactagctactagctccttggctgttttggcatattcatcttgattatagctcttggtctttcatcatattagggatgtttatgatgttattaaagaaaatcttgtcaaatgcagtctgttcctagttatctactatcagtcacctgttgtataattataacaatgtttggatttgtggattattattttagtatataacattggattttatgtatgttacctgaagaagagcaatatctgtaccacatatttctttgtttttcttttttgagatgaagtctcactctgttgcccaggctggagtgcagtggtgtgatcttgacacactgcaacctttgcctcccggattcaagtgattctcctgtctcagcctccctagtaactggaattacaggcgcctgccaccatgcctggctaatttttgtatttttagtagagatggggtttcaccatgttggccaacctggtcttgaactcctgacctcaggcgatccacccacctcagcctcccaaagtgctaggcttacaggcatgagacaccgcgcccggcttatatatcattactttcttggctgagagctgtagtctgtggtagttgttttgttttgttttttgttttttttttgtagttttcttgatcgtgatcaattaagcagaaagtagaatttcagtcaggtaacctgtctatattagctaaattatcttttgcttattacatagagtgctagaagtatgctgtcatggcatatgtcctagtttctcatcaaatggaccaaagtcagtgattttatttgaagaggaaaaattgaacgtcattgtaaattaagttgcaagtttagtaaccatattgtaccactgtttgataaatttgaacgctttatggtatttcatatttagaatgttcaaaatagtactgaagtattcaaatacatacaaccctgagcgatattgaagtaaaataaacatgtatttaaggaagtgtcaaccttcaattatatacctttttgtcactgaattaacacttatttctcacgacgtggaagcagtttcagtatggtttgtactaagctaagtgatagttgtcatctgtatgacaatttagaatgttttctgtgtccatttgtgatcaaaattatatgttgctttgtgtgataaaacctggtggtggtagtaactttgaacacactttttgaacttaattttgtagttaatcttatcctgatgagtaattctaaaacttatgaccactactagaaatgaagcagttttttgtgtgtgtgtgccatcacagtatatactgaccttggagctttcctagtgctctcagagccatgaaaatatcctttcacacaaattttctcaacttacccgtaacatcgctttgagtttcagtcatacctagagttggaaagtcgtcaaattagtcctctgtcctcaagtatctgtaagtctgaagaatttaggtaagttacttaccttaaaatcattgccaatcctttaaactctatttggatggctgtgaaatattttaacattagggttaatgtcataaatcccattctttttttttttttgagaccgagttttgctctgtcatccaggctggagttcagtggtgtgattttggctcactgcaacctccgcctcctgggttcaagggattctgcctcggcctcccaagtagctggaattacaggcgcccaccatcacacctggttaatttttatatttttagtagagacagggttttgtcatgttggccaggctggtctcgaactcctgacctcaggcgatccacctgcctcggcctcccaaagtgctgggattacagtcgtgagccacggtgcccaacctcataaatctcattcttaatttcactctaggacagaattattgtagcacctgtgttctgttattttagattcattttaacttacctagacacgggtactgtggtagttgtagaggtacagatgttgagttcccatcctcctggcttaatgtcactggggttattaatacacttcataagcattttagggacacctgctgtctgctcaacccccagcaaacctgattatttcttgaagacattcccttctatgcttgtgcattggtaaggaggattagggatgatgcatttaaagacaagagttttaggctgggcctggtggctcatatctgtaatcccagcactttgggcagctgaggtgggaggatcatttgaggccaagagttcgagaccagcctgggcaacaaagggagactcccatctccacacacaaaaaaataaaaactagccaggtgtggtggtgtgtgcccatagttccaactacttgggaggctgaggtgcaaggatcgctttagccccggagtttaaggttacaaggacctatgatcacacttctgcactccagcctgggtgacagcaagactctcaaaaccaaacaacaacaaaatatatatatagctctctaggtttttatgttaaatattagagtgcctaagaatgtacatggttggcagaggatcttgcagctcatagtgataaactttagtatttacataaaaatactagatagctagtagattcaatgttctgcttctgaaaaagatatatttttggttttgccttttagtgaatttcttttggatgcttaacacaatgttaatatagttacaaaccaacttgctaatatttggaaacccacttaaaagctatcttcatttcatatgatgtgatttttaagattttaaatttggggctgagtttgtatcttaataattaaggctgcacacattgacaactacaaaataatgcctgggaagatgagtcctgaggctaattttatatttatgtggatgagtgtggagggggataataattctgaaatacttaatcacagacctaaaatgtagatctatgggtaattttaaatgttgcctgtcaaggcttaatagggacttgacaacagctaggatggaaattatttcaacacttaaatatgcttactttgtgccggacgctgttctaagtcttttacaaatatttacttgatatttgtattttgtgtactattttgatttctgcaacattattaggcttcatactcttctgtgggaactgggttcaaatggttccagatgaaaatacaaatagtcctgtgattagttttgttctacatcttatgacagatacttcatgaaaggaaatatgaaaaggccacatcttgctttgaaataagtgagatggagcctctccctctttttactgttaatgttcatagttttaaaaatcctagaattttgctgcttttcaaaatgttaagttggaaagcaagaataaaatgacccttttttcaaatgttttctgtaccatttattgcattgtttacattttatgcatctcatttctaaatgaactcatggtaacagagactgtaacacttttgcatcaccggaatcttctaggtgtgtaaaatgatggacgagtgaatgaataaatgggggagtggttcagagcttggaatggcgctatgaaggtggtgaagtgacgtccctaccccctcaacacacatataaaaattatgaatttataaacattttcctcttgatgtaatttttcaatggagggaagaggataaattcatagttctggcacttacatctggaattaggctacacagtctacgggaagcaagttaacacagtctaacagatgcacgtgaatttcatgctgggcgaagatgaactatgtggaagatgacttataaggagcttttatgttacatcttggcagttaacacagtctaactgatgcacgtgaatttcatgctgggcgaagatgaactatgtggaagatgacttataaggagcttttatgttacatcttggcagttaacacagtctaacagatgcacgtgaatttcatgctaggcaaagatgaactatgtggaagatgacttataaggatcttttatgttacatcttggcctgaggttaggaaactaaagatgacaaaggcactgttttagtatgggttttctggtttcgcttttgtcgtgggggcggggtgggatagtggactcgtaccctaacaaagacccactcgaggctgcgtgtcggcccgggggcagcagggggcaggagaagctggctctagaccacgcgttccttttcacgtgaccagtcgctctctttcccgtggcggccctgcttccggcaggggcatcacccggaagtgggggtagtcgagggagggaggggtaaaggcggctggccgccgcggcggggggtgggaaaagagaagcagagggaggagttgttgctgccgccgccgcagccgcagctactgtgacttctccgattgtgtgagctttgttggagcctgcgtacgtggatttatcgctgccacggtctgcgtagctccagaggtttaaccataggatagagaaaccaggtaagtcctacattggcttcccgtcgtcctttctcctggagggggtcttctgtgctgtcagtttgtactacgagtgtggtgagaaggtcatgttagtctggggcagtctcgaaagtttcacttattcacaattcaggtattaactacatttatgttttacctcccctaacaggggatagaggaggggaaattaaatcctgacctgtgtcactttcttgtaccctcttggagagaatgtcctgatcatccatggcctacgttacccaattaattgagggtacaagaaagtttgtgtttggcattgaaagtcacatggactggggtctttgcttagtgacacctctttatactttggaagctaaggttactaaaatgaccataattgatgaaataataattgaaaaatagatatttggcttcttgtcttgctctgggagcgtaaggtaaactgagagaactcttgtttccacttagttttgttcattgtgccccctttccagtaaagttactgtccattgtccgaccctgtggcatcttatctttgacacttttcttcgttgtagacgttgagattatcttaagcacaaacacttatcgtttcacaattcagcgtttgtccaggatctgatctttattttaatcacagactctttatctacaatagtatggctttgtattgagaatatgtgcagaacattgaattagatgatactgaggttattaatttttttttttttttgccgggtgcgggggggtggtggggagggggtgatgcacaagaaataagacagagttcctggcctcaaaagagtttacttacagtaggctgggcgcagtgtctgacacacctgtaataccaacactttgggaggccgaggagggtggatcacctgaggtcaggagatcgagaccagcctggccatcatggcgaaaccctgtctttactaaaaatacaaaaattagctgggcgtggtggcgggcgcctgtaatcccagctagtcgggagactgaggcaagaggatcgcttgaacctgggaggcggatgttgcagtgagccgagatcgtgccactgcactccagcctgggctacaagagcgaaactgtctccaaaaaagaagaaagaaaaataaacagtttacatacaattgagtccgaattgagtcagttgaattcagctatgaagacaacggtttctagcagccccactgactgaattactaggttgcttatcacatccttttcaatggttatttttgaactggcattttattatatttaacattttctggtgtctaaggtcatgacatgagagagttttttttgtacttgaggatctcaatgtagtaggaaagaaagatacacgattacctaaacatttaaaaaatctcactaacgttatatattagaaacaggaggtgttatgagagtgcagggaagggagcatgtgaactgggctttgaaaaatagataggatttagctttgcaggaatggaggaagaggaagacatctatctggactgatagatagaagaaataatgtgagcaaagccatgggggtctggaaagttgcccgacatccagtaacacactgtaagtcaatattcctatttctaacagccacatcttccaagatgtcactgattaaaattagaaaaaatatagaatacaaaactagtcagctcacaaacatatccaactgccctccagccaataagaaagcttatatagagaaaaaaatacatggaaatgacaaaagcaatgttaatgtatgaggcttaattctgatgtaaactcaaatctaaaagagaaaaaatgtaaaactcgctatactttaattctgattgagtgttgtgccttaaatataatttggaatcatttttaaaattgttgggaatgaataacattttctgaagtgagcaactgttccaggttttccccaaggaatctctgcttttccttttttcctctaaattgatttctctctattgatcttcttaacttgataggaactattctattccgatcacagccttagaaagatcttgatgcctgccctcaagataaggttaaacactaatccctccaaaggataggttaacatctctgttctctaaagcagaaggttgattttctttgaaaaatgcttgcagaagcagtaaaatttgcttacaaaacaagagagagagagaaaagagtgcaaaaataaccccagctaacacaccacaaccttcacttctgtgagggcgctaaaggaaatacattttaaaaaaataaattccttgttataactccttttatctatatatttaaaagctcttggcaaactttattaatcaagactttggacatcctgatgagtgaaaataatcttcatttgccagttgggaaagtaaattgcaaggagagatttttgtctgaactcatagaagcactagcatagatgagaatagtatttgggagttttgtctcaaaattccttctattcatctttgttaaagggcagttcaggttttagcgttttgtttttagacaacgatatttcttaggatatagctcaacatggggccggggcaagggggaggctgggggacagatgagtgataggcaatggttaggcagag

SEQ ID NO: 94514 - DNA, 151958 bp, Homo sapiens
  misc_feature (1)...(151958): n = A,T,C or G
gtctcaaaaaaaaaattaaagtgtgcttaattagaaggataaacagatgttgaacaaatgtttgatcagaggagcttttggaggtgaaatgttccttagtgatacagagaatataaaatactctggcagttacttaggtagttgtggttgagggaatcagtgtattgagtgggtagtatagaaatgtgaagtataaatttgaattaaataaaatttaaaaattcatttccttggtgatactagtcatattccaggtggctagtagccacatgtagctagtgactactgtttttaacagtgaagatctagaacatttccttcagctcaagaagttctattgaacaacaggactgctctagaaaattaggacagcaatcaggtttggcctatatggagggtattagatcccaggtgagtttctgtgtatttttaacctatagaacagaatatctgtcattttcaagaaatagtctccgagagagtgtactctggtttaaacacgtaactgacagcattttaattcttacaggtagcaacacaagtcggaatagaatggaacctgtcccctgttggcagagttaccccaaaggaatggaggaatcagtaatcatcccagctggtgtaataatgaattgtttaaaaaacagctcataattgatgccaaattaaagcactgtgtacccattaagatatggcattattgaagaaataaagtacatttgaaaccttcattgtaggttttgtttctttgtaaatgaaactaagcttgatcactttagcctttatgttaatattaaagtcaaatgctgtgcagcttcttaaataggtttttttttttttttttttttttttttgggacgaagtctcactttgtcccccaggctggagtgcagtggcaccatctcagctcactgcgacctctgcctcctgagttcaagtgattctcctgtctcagcctcccgagtagccagaactacaggcacatgccatgacgcccagctaattttttttttttttgagacggagtctcactctgttgcccaggctggaatgcaatggcgtgatctcggctcctgcaacctccgcctcccgggttcaagcgattctcctgtctcagccttccaagtagctgggattacaggtgcacgccaccaggcccggctaatttttgtatttttagtagagacggggtttcaccatgttggtcaggctggtctcgagctcctgatctcgtgatccacccaccttggtctcccaaagtgctgggattacaggtgtgagccaccgtgcccggcaatttttgtatttttagtagagacagggtttcaccatattggtcaggctggtttcaaactcacgacctcaggtgatccgcctgccttggcctcccaaagtggtaggattacaggcgtgagccacggcacccagcccttaaatggcttttatgaggtaatgtgaaaggaaaatttgcctttgacctggaagtcaactttatagtaagctgaaattataaataactgatcatggaactattgcagatcacctttgagccaaaaatttggcctggattttggttatgcctactactatgtgcctctcatttgtatttatacctggaattggcattattaactccttttcactcctgcctagaaaacttaaagtgtcaccagacccaagggcggagtggtcctataaaacaaactcgtagcctgtctgaagactagctactagctccttggctgttttggcatattcatcttgattatagctcttggtctttcatcatattagggatgtttatgatgttattaaagaaaatcttgtcaaatgcagtctgttcctagttatctactatcagtcacctgttgtataattataacaatgtttggatttgtggattattattttagtatataacattggattttatgtatgttacctgaagaagagcaatatctgtaccacatatttctttgtttttcttttttgagatgaagtctcactctgttgcccaggctggagtgcagtggtgtgatcttgacacactgcaacctttgcctcccggattcaagtgattctcctgtctcagcctccctagtaactggaattacaggcgcctgccaccatgcctggctaatttttgtatttttagtagagatggggtttcaccatgttggccaacctggtcttgaactcctgacctcaggcgatccacccacctcagcctcccaaagtgctaggcttacaggcatgagacaccgcgcccggcttatatatcattactttcttggctgagagctgtagtctgtggtagttgttttgttttgttttttgttttttttttgtagttttcttgatcgtgatcaattaagcagaaagtagaatttcagtcaggtaacctgtctatattagctaaattatcttttgcttattacatagagtgctagaagtatgctgtcatggcatatgtcctagtttctcatcaaatggaccaaagtcagtgattttatttgaagaggaaaaattgaacgtcattgtaaattaagttgcaagtttagtaaccatattgtaccactgtttgataaatttgaacgctttatggtatttcatatttagaatgttcaaaatagtactgaagtattcaaatacatacaaccctgagcgatattgaagtaaaataaacatgtatttaaggaagtgtcaaccttcaattatatacctttttgtcactgaattaacacttatttctcacgacgtggaagcagtttcagtatggtttgtactaagctaagtgatagttgtcatctgtatgacaatttagaatgttttctgtgtccatttgtgatcaaaattatatgttgctttgtgtgataaaacctggtggtggtagtaactttgaacacactttttgaacttaattttgtagttaatcttatcctgatgagtaattctaaaacttatgaccactactagaaatgaagcagttttttgtgtgtgtgtgccatcacagtatatactgaccttggagctttcctagtgctctcagagccatgaaaatatcctttcacacaaattttctcaacttacccgtaacatcgctttgagtttcagtcatacctagagttggaaagtcgtcaaattagtcctctgtcctcaagtatctgtaagtctgaagaatttaggtaagttacttaccttaaaatcattgccaatcctttaaactctatttggatggctgtgaaatattttaacattagggttaatgtcataaatcccattctttttttttttttgagaccgagttttgctctgtcatccaggctggagttcagtggtgtgattttggctcactgcaacctccgcctcctgggttcaagggattctgcctcggcctcccaagtagctggaattacaggcgcccaccatcacacctggttaatttttatatttttagtagagacagggttttgtcatgttggccaggctggtctcgaactcctgacctcaggcgatccacctgcctcggcctcccaaagtgctgggattacagtcgtgagccacggtgcccaacctcataaatctcattcttaatttcactctaggacagaattattgtagcacctgtgttctgttattttagattcattttaacttacctagacacgggtactgtggtagttgtagaggtacagatgttgagttcccatcctcctggcttaatgtcactggggttattaatacacttcataagcattttagggacacctgctgtctgctcaacccccagcaaacctgattatttcttgaagacattcccttctatgcttgtgcattggtaaggaggattagggatgatgcatttaaagacaagagttttaggctgggcctggtggctcatatctgtaatcccagcactttgggcagctgaggtgggaggatcatttgaggccaagagttcgagaccagcctgggcaacaaagggagactcccatctccacacacaaaaaaataaaaactagccaggtgtggtggtgtgtgcccatagttccaactacttgggaggctgaggtgcaaggatcgctttagccccggagtttaaggttacaaggacctatgatcacacttctgcactccagcctgggtgacagcaagactctcaaaaccaaacaacaacaaaatatatatatagctctctaggtttttatgttaaatattagagtgcctaagaatgtacatggttggcagaggatcttgcagctcatagtgataaactttagtatttacataaaaatactagatagctagtagattcaatgttctgcttctgaaaaagatatatttttggttttgccttttagtgaatttcttttggatgcttaacacaatgttaatatagttacaaaccaacttgctaatatttggaaacccacttaaaagctatcttcatttcatatgatgtgatttttaagattttaaatttggggctgagtttgtatcttaataattaaggctgcacacattgacaactacaaaataatgcctgggaagatgagtcctgaggctaattttatatttatgtggatgagtgtggagggggataataattctgaaatacttaatcacagacctaaaatgtagatctatgggtaattttaaatgttgcctgtcaaggcttaatagggacttgacaacagctaggatggaaattatttcaacacttaaatatgcttactttgtgccggacgctgttctaagtcttttacaaatatttacttgatatttgtattttgtgtactattttgatttctgcaacattattaggcttcatactcttctgtgggaactgggttcaaatggttccagatgaaaatacaaatagtcctgtgattagttttgttctacatcttatgacagatacttcatgaaaggaaatatgaaaaggccacatcttgctttgaaataagtgagatggagcctctccctctttttactgttaatgttcatagttttaaaaatcctagaattttgctgcttttcaaaatgttaagttggaaagcaagaataaaatgacccttttttcaaatgttttctgtaccatttattgcattgtttacattttatgcatctcatttctaaatgaactcatggtaacagagactgtaacacttttgcatcaccggaatcttctaggtgtgtaaaatgatggacgagtgaatgaataaatgggggagtggttcagagcttggaatggcgctatgaaggtggtgaagtgacgtccctaccccctcaacacacatataaaaattatgaatttataaacattttcctcttgatgtaatttttcaatggagggaagaggataaattcatagttctggcacttacatctggaattaggctacacagtctacgggaagcaagttaacacagtctaacagatgcacgtgaatttcatgctgggcgaagatgaactatgtggaagatgacttataaggagcttttatgttacatcttggcagttaacacagtctaactgatgcacgtgaatttcatgctgggcgaagatgaactatgtggaagatgacttataaggagcttttatgttacatcttggcagttaacacagtctaacagatgcacgtgaatttcatgctaggcaaagatgaactatgtggaagatgacttataaggatcttttatgttacatcttggcctgaggttaggaaactaaagatgacaaaggcactgttttagtatgggttttctggtttcgcttttgtcgtgggggcggggtgggatagtggactcgtaccctaacaaagacccactcgaggctgcgtgtcggcccgggggcagcagggggcaggagaagctggctctagaccacgcgttccttttcacgtgaccagtcgctctctttcccgtggcggccctgcttccggcaggggcatcacccggaagtgggggtagtcgagggagggaggggtaaaggcggctggccgccgcggcggggggtgggaaaagagaagcagagggaggagttgttgctgccgccgccgcagccgcagctactgtgacttctccgattgtgtgagctttgttggagcctgcgtacgtggatttatcgctgccacggtctgcgtagctccagaggtttaaccataggatagagaaaccaggtaagtcctacattggcttcccgtcgtcctttctcctggagggggtcttctgtgctgtcagtttgtactacgagtgtggtgagaaggtcatgttagtctggggcagtctcgaaagtytcacttattcacaattcaggtattaactacatttatgttttacctcccctaacaggggatagaggaggggaaattaaatcctgacctgtgtcactttcttgtaccctcttggagagaatgtcctgatcatccatggcctacgttacccaattaattgagggtacaagaaagtttgtgtttggcattgaaagtcacatggactggggtctttgcttagtgacacctctttatactttggaagctaaggttactaaaatgaccataattgatgaaataataattgaaaaatagatatttggcttcttgtcttgctctgggagcgtaaggtaaactgagagaactcttgtttccacttagttttgttcattgtgccccctttccagtaaagttactgtccattgtccgaccctgtggcatcttatctttgacacttttcttcgttgtagacgttgagattatcttaagcacaaacacttatcgtttcacaattcagcgtttgtccaggatctgatctttattttaatcacagactctttatctacaatagtatggctttgtattgagaatatgtgcagaacattgaattagatgatactgaggttattaatttttttttttttttgccgggtgcgggggggtggtggggagggggtgatgcacaagaaataagacagagttcctggcctcaaaagagtttacttacagtaggctgggcgcagtgtctgacacacctgtaataccaacactttgggaggccgaggagggtggatcacctgaggtcaggagatcgagaccagcctggccatcatggcgaaaccctgtctttactaaaaatacaaaaattagctgggcgtggtggcgggcgcctgtaatcccagctagtcgggagactgaggcaagaggatcgcttgaacctgggaggcggatgttgcagtgagccgagatcgtgccactgcactccagcctgggctacaagagcgaaactgtctccaaaaaagaagaaagaaaaataaacagtttacatacaattgagtccgaattgagtcagttgaattcagctatgaagacaacggtttctagcagccccactgactgaattactaggttgcttatcacatccttttcaatggttatttttgaactggcattttattatatttaacattttctggtgtctaaggtcatgacatgagagagttttttttgtacttgaggatctcaatgtagtaggaaagaaagatacacgattacctaaacatttaaaaaatctcactaacgttatatattagaaacaggaggtgttatgagagtgcagggaagggagcatgtgaactgggctttgaaaaatagataggatttagctttgcaggaatggaggaagaggaagacatctatctggactgatagatagaagaaataatgtgagcaaagccatgggggtctggaaagttgcccgacatccagtaacacactgtaagtcaatattcctatttctaacagccacatcttccaagatgtcactgattaaaattagaaaaaatatagaatacaaaactagtcagctcacaaacatatccaactgccctccagccaataagaaagcttatatagagaaaaaaatacatggaaatgacaaaagcaatgttaatgtatgaggcttaattctgatgtaaactcaaatctaaaagagaaaaaatgtaaaactcgctatactttaattctgattgagtgttgtgccttaaatataatttggaatcatttttaaaattgttgggaatgaataacattttctgaagtgagcaactgttccaggttttccccaaggaatctctgcttttccttttttcctctaaattgatttctctctattgatcttcttaacttgataggaactattctattccgatcacagccttagaaagatcttgatgcctgccctcaagataaggttaaacactaatccctccaaaggataggttaacatctctgttctctaaagcagaaggttgattttctttgaaaaatgcttgcagaagcagtaaaatttgcttacaaaacaagagagagagagaaaagagtgcaaaaataaccccagctaacacaccacaaccttcacttctgtgagggcgctaaaggaaatacattttaaaaaaataaattccttgttataactccttttatctatatatttaaaagctcttggcaaactttattaatcaagactttggacatcctgatgagtgaaaataatcttcatttgccagttgggaaagtaaattgcaaggagagatttttgtctgaactcatagaagcactagcatagatgagaatagtatttgggagttttgtctcaaaattccttctattcatctttgttaaagggcagttcaggttttagcgttttgtttttagacaacgatatttcttaggatatagctcaacatggggccggggcaagggggaggctgggggacagatgagtgataggcaatggttaggcagagtattttagttcactctaccatcccagcaatcatgtttttccctcttaaatctcagtcttcaggttgatttaatgtgatattacttgcttacttaacttgctgagatagtttggcaggaaaaatatcaaaattcctttagaatgtgtttcattaaagtaaaagggtcctgtgtttctgattttataaaatgttcttactttttccagcactgtttgcaaattgaagtgatttcctaatctttttgtgcccaaatgtatgagatattggtagactacatcagttttcacagatacctctttccttgaaggaaatgagggtaaaataccccattttgagtcagttatgtgtactttgtaccatattttctgttcacatttaaaattatacagctatgtctcaaggatgaaaaaagagttttacttatttttactattaatctctagtgtagaagtccagtttttcagacctataatcaggagtgcatttttaacaatttaccagttgaaataaatgggttatttcacattgtagggatattgttttagactggccattaaccttattttattttatttttattttaaaagatgttattgttattatttatctatgtatttatttttagaggcagggcctcgctctgtggcccaggctagggtgccatggcacaatcatagctcactgcagccttaatctcctgggctcaaatgatcctctggcctctcaagtagctggaaccacaggcgcatgccaccatgcctagctacttatttattaattaattattattttttaaataatattatttttaagagatggggtcttgctctgtcacccaggctggagtgcagtggcgccatcataactcactgcagtctcgatctcccaggctcaagcgatcctcctacctcagcctcctgagtagctgggactataggtgtgtgccaccactcccagctaatttttaaactttttgtagagacagcatcgtgctgtgcagtggtgctatctcggctcactgcaacctccgcctcctgggttctagtgattctcttgcttcagtctcccaagtagcggggattacaggtgcgcgccaccacacttggttagtttttgtatttttggtagagaaggggttttgccatgttggtcaggctggtatcgaactcctgactgacctcaagtgatccaccctcctcagcctcccaaagtgctgggattacaggcatgagccactgtgccaggccttaaaacacctagtgttaaaaatggtgtcttaattgtattctcagattctcctagaaagaaaagatatactaaatgtatatttagatatactaaaacacctaatgtttatttttgtttatttatttttgagatggagtctggctctgtcacctaggctggagtgaaatggtctatgtttgttttttcatcttgacagtaatatctttgaacattttctggagtattagatattattctcttgatgcttcaaggtatcttaacttcaccattgtattgcgatatattgttttggagagacagtataatataggattaagagtggaggctaggtggggcacagttgctcacgcctgtaatcccagcactttgggaggccgtggcaggcggattgcttgagcccaggcgttcgagaccagcctgggcaacatagggaaaccctgtctctacaaaaaatacaaaaattagctgagtgtgttggcacgtgcctgtagtcccagctactcaggaggctgaggtggaaggatcgcttgagcctggaaggttgaggctgcagtgagctgagatcacacyactgcactccaccctggatgagagagtgacagagtgagaccctgtcttgtccggaaaaaaaaaaaaagcctgtcttgtctggctcagtccaggtgctagactgtctaggtgggatcccagcccctctgcttactacttgtatgaccctgcgcagatttcatactcctctgtgcctcagttccttcaaatttctaaaatggggacaataacagtacctgtctcacaggattgttaatgatctaatacatgtacggtgtctggcagatagtaaacatacaataaaatgtagttacctttaatattttaatatattatttactgtaaaagtaattttaacatcctatataataaaattataaattacagttttgctgtactataaatttagtagactacaggatcaatatactaatcaatcaatacttgcaagcaatatttaaattctttaaaaaaattttttttggagacagggtcttgctccgtagcccaggctggagttgcaatggcacgatctcggctcactgcaacctctgcctccagggttcaagcgattctcatgcctcagccccccgagtagatggggttacaggcgtgtgccaccacacccggctaatttatttatttttagtagagatggggtttcgccatgttggccagcctggtctcaaactcctggcctcaggtgatctgtccgcttcagcctcccaaagtgctgggattacaggtttgagctaccgctcccggccctgccaccacgcccggcacaatacttaatttctaacttacaccatagaaaattggccggtgcggtggctcacgcctgtaatctcagcactttgggaggctgaggtgggtagattgcttgaattcaggagttccagaccagcctgggcaacaaggtgaaaccccatctctacaaaaattacaaaaaatagccaggtgtggtggcatgcgcctatagtcccagctactggggaggctaaagtgggggaattgcttgagcctgggaggttgaggctgcaatgagctgagatcatgccactgcagtccagcctgggtgacagagtgagaccctgtctcaaaaaaaaaaaaaaaaagaaaaaaaaagagaaagaaaatggaaaactcagattgagagggtcccccagtagcctatagtacacctacatatgctaacatggcatcttaaagctcattattacagctggcaaatcaaatcactgtgatgtgctcatcctatttccctatcaagaaaactcataacaatctgcttctgtaattagtgagccacagactctaggccatcgagattttccacattccctaattgtcaaatgctgaaccatacttgtactgaataagttgtgatacagtgtaagcaagggaaaaggccttatgtatgtctaacctactctgcaaatagctgcattcttacaaagttgtgtgtaaattgaatttttacaaagcatgtcagcactttgattagtacatttttattgtgtgcttattgcatattcagtgtttcctgtgagctatacaaagaagcataaggcatatgttccaatgtctagcaagagaaagaagtttaataccaagcagagagaaattaggtactactaaactatgaaactgattccagggtattcggaatttaaaaagaaagtggctaggagtatttgacatgatttttcatgaaggaggtgggacttcagttcatttacttactcaacagtgatttattgagtagccaccatgttcactggtggtatgatagtgaacagagcagatatggtcctgtttctgtggagtttacagactagtgaagtaatagaacttaaatatgtgcaagaaaacattctaggtgaggggaccagttctaaacaaagtcatagaaataaatgataagagcatggactatatggcaatcagtgaagggacttgcttgattgtagtagagattttatgttggggaggagcactgcaagtgatagatgcagaccatcttttgaatgctttgaagaactatttaagtctgtctaaaagtcctttggatacactgttctggagagggtttggggctttggggtcatactgccttggtttgatctcatctctactctaatttgtttaagtttagaattttatagtaagttttctcagtgacacaactctataggcaacaaactgatatttacagagtggttggggtcagtaacccttgtatcagttaagcaatgtacacatgaagtgccagtaggaagtccaaggaaaggttgggagaaataaaaggaggttagtaaaggaaagagaaataaatacattctgtgatagttggtagaatgtcatcagaaatgtcttcaagcaaaacaatacatttgcctgtcttttgtttctagttgcgtttaatggtagtgtgttttccttgtctaaatatgagaaagagaaactaaactgcagctacttgacgtgggcatctgagagctaccaatggttggcttaggttatgttctacatttgaagcatctggtcagttttagattgtcttctatatttgaagcatctggctagaccacttgtgtcccagttttctattttacctaaactcaacttggtcagaagcttatgtagtaagtattgtttgtaacctgtgttagtactctcttaacatggcttaaagcatgaatggattgtcaaatgaatacctgttatgacctgtattttttcttgttacctttggatttaatgtaagtataataatgctctaagaacatttgacagtattgttcaggcacttttttttttttttttttgagacagggtctggctttattgcctaggctggagtgcagtggcacgatcacagctcactgcagcctcaacctcctgggctcaagcaatcctcctacttcagcattccaagtagataggaccacaggcatgtgccaccatgcctggctaatttttaaaattttttttttgtagagacgggatcttactttgttgcccaggctggtcttgaactcctgggttcaagtgattctcctgcctcagcctccccaaagtgctaggagtacacaggcatgagccatcatgcatagctgcttattcaggtgcttttaagaaattttttccaccagaaaagtagaaatgatcataccagactacctttgtctcctcccaatcttttattatggtgatgtccaaccttgttataaggaggagcttcttttaatctcagagtcatgagatcagggcagatactgacagtatagttcctgagaagtagttgctggctgtgctgttcttcctttcccaatgggaatcttagctgagacatgtagcagagagaagacattatggggagccagcatggagctttataggaggtgaggtgtctagatctaccagtagatcccgatttgcaggtttgagactcctaccttatttcatccatggctgttgcattgtacaaatctagtgggcagcagccacagtctgtaaaaattatgacatggaattacacaatgtggcagccctggaaactacccaaaccacttctatttctagtcctgtattcccttcaatacctactacatccagcagccgtgatagtcccaacacgtttatcatttgactctctttgcctcccacttgaaggctcccctttaatccaacagataaaaattacatctttgtctaaggatttcaaggtgttgcataaattttcttattctatttaagtatactcatcaagaaaatgataataactgcctcgtctaattcataggtttttatcagtatcaagtggaataatgtatgcaaaaacttcataaattaaagaatactacacaaatataatattcttttcagatatattatgttgtggaaagaatactgaattccaatcagatgtctggcatctcagttctttctgctattaacaaactgtgactttggacaaattactttgtgctctggggactttgtttccttacctataagaggaaacttataatgccactcctatctacccagacacctaagagctactttttcctcacctccacattcagtcaccaaatttgttgtctagttcttaaaatttcttaagttggtcctgccctctctatctccattcagttcctaatcacttcccttttgggcagcagcctgttaaaaaaaattgtggtaaaatatgcataatataatattgactattttaacctttttttttgagacgaagtctcactctgtcacccaggatgcagtgcaatggtgtgatctctgctcactgcagcctccgcctcccaggctcaagcaattctcctgcctcagccccctgagtagctaagattacaggcacacgccacccctggctaatttttgtatttttagtggagacggggtttcaccatgttggccaggctggtgtcaagctcctgacctcaaatgatccacccgccttggcctcccaaagtgctgggattacaggcgtgagccactgtgtccggccccattttaaccatttttaaaggtacaagtcagtggcattgagtgcattctcagtgttgtacaatcatcactgttatgcatttccagatttttttcatcatcccaaactgaaactctgtacccattaaataatagcttctcattctgccttctctcaccccctggtaacctcattctactttctgtctctatgaatttacctattctaggtactttttgaaaaataatttcaacatttatttttgattcagagggtacatttgcaggtttgttacctggctatattgcatgatgctgaggttggggtacaattgatcctggcaatcaggtacagagcagagtgcacaatagtttttcaacccttgccccactccctccccacccagtagtccgcagtatctattgttgccatctttatgtctatgagtacccattttttttttttttgagacggaatctcgctctgtcgcccaggctggagtgcagtggtgtgatctcggctcactgcaagctctgcctctcgggttcatgccattctcctgtctcagcctcccgagtagctgggactacaggtgcccgccaccacgcctggctaattttttttgtatttttagtagagactgggtttcaacatgttagccaggatggtcttgatctcctgacctcgtgatccgcccacctcggcctcccaaagtgctgggattacaggcgtgagccaccgcgcccggctgagtacccattgtttagctaccacttataagtgagaacgtgtggtatttggttttctggtctgcgttagtttgcttaggataatggcctccagctgattccatgttgctgcaaaggacatgattttggtctttttttaatggctgcatagtattccatggtgtatatgtaccacattttctttatccaatccaccattgatgggcacctaggttgattctatgtctttattattgtgaatagtgctgcattaaacatagaagtgcatgtctctttttggtaggacaatttattttcttttggatatatactcagtaatgggattactgggtcgaattgagttctaagttctttgagaaatctctgtactgctttccaccacggctgaactaatttacattcccaccaacagtacctaagcatttctaggtacttttaataaatggaataatacaatatttgcccttttgtgtctggcttattttacctagcataatgtctcaaaatttcatccatgttgtagtatatgtgagaatttctttcctttttatggctgaataatattccattgttgggtaataacgttttaactggtcctcctaactccaggctttgccctatcaaatttgtccttcgtgatctgaccttacttacctttacaatctccttgttgttaccattcatgccatatgcctcagccataccagtggtggtccttaaatatggcatgctgtttgacaactctgtaactttattcatggctcttttgtctgaaatttatttccattcttctggagaactcctactcaatcttcaaggccgtttacctaacaatagtggatgggtgaaattatgatacgttcatatagtggacttctagtcagccttttaaaattatggcatatatattagtggttaaaagcacaggctctggaccaggcttactgggatcgaatttcaaatctgtcacttactaactatgtgaccttgggaaagttccttaccctctctgtatctcaattttttcatctatgaaacagggatagtaattgtatctatcccatcaggttgctgtgaacatttaattacttagaagtattagctaggccaggtgcagtgcctcacgcctgtaatcccagcactttgggagtcccaggcggatggatcacttgaagtcaggagtttgacaccagcctggccaacatggtgaaaccctgtctctactaaaaaatagataaaaattagccaggcttggtggtgggcacctgtaatcctaactacttgggagactgaggcaggagaatcacttgaacccaggaggcggagggtgtggtgagctgagatcacgctactgcactctagtctgggcaacagagctagattctgcctcaaaaaaataaaaataaaaataaaaatattagctattatgttttatttatttgttagtttttaaatttttcgtagagatggggtctcgctatgttgctcaggctgatcttgaactcctggcctcaagaagtcctcctgctttggcctctcaaagtgctgggattacaggcgtgagtcactgtgctcggtcaaaagtattagctattgttatatattaatatttactgtcatagaaaaatgtttattatatagtgttaaatgaaaagaaacatgctgtaaaatagaatagtatatcatttttgttaaaaatgtgtgtgttcttgggtgtggtggctcacgcctgtaatcccaacactttgggaggaccaggcaggagggttgcttgaggctgggagtttgagaccagcctgggcaatatagggagacctcatctctacaaaaaataaaaaattagctgggcatgtggtgcatgccttgagtcccagctactcaggaggctgaggtgagaggattgcttgagcctaggaagtcgaggccacagtgagctattactgtgccattgcactccagcctgggcaacagagtgagatcctgtctcaaaaaaatgtgtgtttatatgtagacacacatataataccctcctagacttacatacacacaccccaccccaccccacatacacaaccctcaacatgttagccttcattatttctcagtgatagaccaattggttgtttattttttatatttgcttatctgtatttcctgtttttctccatttgacatttatttcttacatttggggagcatgaaaaaagacacagttaaagcatctcttctgtgaagccttccctgatttcccttccttcgtcctttagggcaccagaataccttgcatccctgaactccttaaagcctgtattatattcatttacattttaatccccaactgggactagtgcagagcctaaaagatacatgaacttagccatattagtaaggtgaaaatggaattatgtgcaagcactttacacatgttatctcatatacagcactcagcagtctcatgagtaagagttatctgtgtttttcagatgaggaaactgagcatcagaagagaccaaacaatttgctgaaggtatacaacagtaagcaacagaatttggattcaaatccaagtctgtctgatgccaaaggtggtcttttcaatgtatattgaatgactgaatgatctaatgaatatatctgctgtctcagatgacataatttatgaaagacttattggtaaacaaatatgctatatgaatgtaaagatatgttgttgttattttctgctatattttcatctgcaccctagattctgactaggcaaatgagctttccttctccccatgcacaattttttccctctgttagtataaattggcaattttggctctccatttgtctttttatactgcccatgctctttccactctttaggaacctgactcataattatgatattaagcttttcagattaatctagccatgtccatcagatttactgttgtgtgtacatgttgagaaaactaattagaaagtatctggccagatacaatttgtttcagtgatgccaaagtatggtaattcctagtttaatgtgtttacctttttctttttttttctttctttctttttttttttttgagacagagtctgtttacctttttttgtgtgctgatatgtccacatttaatttcctacattcatattcataccgctttcaaaagaaggtgttgtcaatgataaaacattagacagaaatagtttttagacagaggatgttaataagttcagcctatgtcttatttaggtttatgtttttgtgtgtatgtgtgcacagccttcatcatttaagtttatgttttgtgtgtatgtgtatgcagccttcatcaaaagaaaaaaggcagatagtcaagaggtgttttaataatttatatcacagctacaacagaatatactaaaccaaaatttagaatttgattatagcttgactccctacaattttttcagaattaaaaagatgaatcccctttaaagcaaactaactgaagggaagcatctactttgtgaaaattgcctgtctaaaatggggtgggaaataactcccttttaagtaccgcacttttttttattctaccagaacctggtttctaaagatttcaacctatttttatagtctcagttttgtgagatgacaaagttcatcttagtgatttctaactaagaaagcacaaccacagaaacgaggaatggattctggaaagggaaacttcctgcaaattatgatgaatttacagaaatagtaaatatttaaattccataaatagttaatattgttgttgataattatttgtcttgatttctgttcaagaagtatacatttgaattagcacacagtttattttattcctagcaatttagtatatttttcatagccatcaatatttgggattctgcttgcttatgattacaaatcacttgaaacctgccagttgaaaattctcaagggtgtgaaatgatatgggccttcagtgaattcattcccctttatctgtataaaatacctggctaaacagttgtctttgacaattttaaattactgtttcctttcttaaaaactcctttccagaagctgatctcccgtacatttccagtacataatttttcatccttatctgtcctgacagtgattcagctttgaataagagagaatgttaccagagtttcacctttattggcctaagtctttgtttattttttgagacagagtcttgctctgtcgcctaggctggagtgcagtggcatgatctcggctcactgcaacttctgcctcccgggttcaagtgattctcctgcctcagcctcccgagtagctgggactgcaggaacgcgccaccacgcccagcttatttttgtattttgggtagagacggggtttcgccatgttggccaggctggtctcgaactcctgacctcaggtgatccacccacctcggcctcccaaagtgctggaattacaggcatgagccactacgcccagccagcctaaatctttaaaacaggacatgaaaggaattgaagggttgggtatgggtggggttgtagatctagactatatttatggaatgtttgcttccttcgtgctgaaaattgttctttggaccttgggatgaaaagagaaaatatatgaaaaataagaatgttatgaaaagtctaagtattctgaaaaatacattagtatactactttataatcataccatataaatatttcagctataaaaattaatgcaaaataaattttctcccaatatgttaactgctttaaaaaaaagtattggcaagattgattatattctttcctaagaggaaagataactttgcataatcaccaagatggtttaccaacatacaccacgtatactgagtattacagtcttcaccaacatgagtcaaatgctagcgtgtatagggttggtagtataaacctacctggtacctttttggttttgctgactaaatggtgctaatgaagccagggttatagacttcatctctgtgggagtcacttgttctttggagtcattaggtatgccactaactctgctccacagttttccgaatgcagtttgttcattaagaaagggaggctagtacagagtaaaaatagctcagcaaaaagccatcatcagtacccatgcccttagcctcctgatagggggaggagggtctttaatgtccaggctttcaaactcacatatacatttttattattaatcagtggaggctgcacttagaaatttatttctttggacttctgcaatattctgcttataaagtgtttctgtggtttcaactgtagatccctttttgcctttatctccagactcttttgtctcaaaactttatggtctcagagaactaaggaaagacttggctcactatatgcatttgcagaaagtaataaggctttttttttttttaacgccataaagtgatctcagcaaagtgacaaatctacagtttcagaactgaaactaaacaactctttcgtggtttattagactcttctatattaagtagagcagttttaggtgagcctctgggaatctcatgaaactgagcttccagtgtggctcatagtcgtttgtaatctatacaaatctatagtatctttcattgagtatcattaaagaatgaggtattttgcagaagtgaatttccaaataactgaagtataccctttacatttttgtcattcagggatctgatgcatgcatcctacaaaggcatccttgaaatacatttacttttccaaaataaaaatacttttatttctgattagaacattgataaatggtcaatgtaaaaacaaaatctagtcaatatttatttatttatttatttgagacagagtctcattctgtcgcccaggcagtgggggcaatctcagcccactgcaacctctgcctcccaggttcaaatgattctcctgcctcagcctcctgagtagctggggcaacaggcgtccaccaccacacccggctaatttttgtatttttagtagagacagggtttcgccacattggccaggctggtctcaatctcctgacctcaagtcatccacccaccttggcctcccaaagtgctgggattataggcatgagccaccacgcccagccccagtcaatatttagatatctctcctttctgagatttattttttcttacagcatttatcactacttgacttttgcaatttttttttttttgagatggagtcttgctctgtcacccaggctagaatgcagtggcgcaatctcagctcactgcaacctccacctccccagttcaagtgattctcctgcctcagccccccaagtagctgggattacaggtgcacaccaccatacccagctaatttttgtgttttcagtagagacggggtgtcaccatgttggccaggctgatcttgaactcttgacctcaagtgatcctcctgcctcagcctcccaaagttccaggattacaggcatgagccactgcgcctggctcactacttgattttatacattcctttgtttgcttattgtccatctccctcaagagaatatgagccccatgaaagaagagacagtgcccctcttcactgctgtatcaccagcacgtagattagtacctgaaacataatgggacttcaataaatatgtgctaactaaatgaagaaagtagaaatcactcttaattccaccatccagggattagccactgttaagattctggtatcatttctttctttttttttcttttttaaagagcaaccctattaactgatctggtatgatttctaacaaaagttttttctcttacatacacattctcatgtgtatatataaatttatacaacattttaatagaaataggactatcgtcaattgtttgtagcctcttttttcacttaactcatcacagacatgatgtcattaagcaaacaattatgtgtttttaatggagatatgataatatatttgaccaattctgtattgatatttaggttggttccagtttttcaatcacataaacaaccttgtgataagcatccttagccatacatcttagtacagttgtctgtacctttcctcccctttgaatatattcttagaactggaatttctgggttaaaaggtatgcattttttttattatactttaagttctagggtacatgtgcacaatgtgcaggtttgttacatacgtatacatgcgccatgttggtgtgctgcacccattaactcgtcatttacattaggtatatctcctaatgctatccctccccccatcccacaacaggccccggtgtgtgatgttccccttcgtgggtccaagtgttcttattgttcagttcccacctatgagtgagaacatgcggtgtttggtttttttgtccttgcgatagtttgctgagaatgatggtttccagcttcatccatgtccctgcaaaggacatgaactcatcaaaaggtatgtatattttaaggctttttttgagacggggtctcactctgtcacccagactggagtgcagagcttcaattatggctcactgcagcctcaagtgatcctcctacctcagcctcacgagtagctgggactacaggtatgcaccaccacacccggctaatttaaaaattttttgtagggacagggtcttactatattgcccaggctgcctattttaaggcttttgataaatattgccaacttgtcttttggaaactctgtagggattggtgttagtttatactaccatcagcagtatatcatagttcgttaactcaaaactattttgatattaatgattttgaaaaaaaagactttctaaaacacattaagtatttttagtgctttattgcttttctaagcagaatacctgtacctgatttaattataacacacatacacacacacacactcatatatatatatgacatgacatgtgctcgacctgttattgctcactgtccttgagttgagagtagtgttcttccttctaccactgcctccatggggcagagaggtcctttccagagctgagaatgtcagtaagagatatatgttccttggcatcttgacttcctaattggaatttactatatgtttccccacacgaaacagtgttatagcactattaatatatagtccaactgtgctattgtctaaactcctaagaaatggacctttgaacctagccatcatttataaagttgttcttatgagaaaacatgtttcatcttcaaaattgagaaacaactgttcaagaaacccatttttaaattgaaggtacacattcaaaaagtatatattgagggcttattgtatgtgtgaagataaatgtgctaggccgtcaatgggtaattcttttcttgatgatgcaatgttaaggtacccctgccccctagtcatcattttggtcaggtcaggacaaccagttgcaattgtaacccagggagaaaatattactggagtgtgtttgctaggcaggggaccacgtacaagggtttctgcagaactttggaggccaggattgaaggaatagctgctcagaagaggtagaagagaaaaacatacaggaaatggtaaggaagtgggaaagttggaaagattaatgtgtttcttttagattaaggggagaagagggtactgtttgtcttctcgagatgagtgaggatggacattcaggctgacattctgccatcaaaatgccttgtgtaggaatattagtctttgcatataacttaacaaagctgacctgccattgttgtgtttttgcttgaggacagtgccacactgctgctgccatgtacccaaagaattgcttgaacccatccccttcattacttcaactctaatgactattacttttcattaatttaggctgtattcttttcagacaacgtaaggtaggggaaaagagcctactttttggaatctcagaggcctgagttagagtcagattctatcattcattaacttatttgtattaggcaaaggagctctcactatgtcttcgaacttgaatcttctctagaaggagaaaagttttatgtgattattaggattaaagtgtttaaaatgtctggagtatgataggaacgaaataaattttaatttgtttcttttctttttctttttttttttttttgagacagggtctcattatgttgcccaggctggtcttgaactcccgggctcaagcaatcctcccgctttggcctcccaaatttctgtgattacaggcatgagccactgtgctcagctaaatcttaatttcttttattctcctctcctccacctcattttccacccactaccagaatcatcttctattttaaaaatctgcgtctgaaagaataacattataaaagtagtatattgaggttaaacgtggccacctggccatatgtttagctctcgtccttcacaaaactccattaatgtgacagtgaaaagattttaaaaaggttacacctgcaaggaaaagaaaacaggagagctaaatcagcagagggatgaatttaatatatttttggaagataagaagcacatgaagagggagaaccttccagcagaggaggatattaatgagaagtgagctctttaatctcacattacccatgataggctcagaatttgaaggtaagttgtttatcctgaaaggtgaagaagagacccagggctgaaaataagggaaatgttttaaaaactgaacaggaagggattggacctcttagtttttctcaggagaccaggagtatagtctcagtactaagtgaatctgaaaggctctgagctcctggacagtggggtagagtggaggatactaaagcattgggttgagaacagggaaattcagtggaagtctgcatactgcgtggtcagccccttccccacaccttgctcccaaatatagcagcaaatataccttgctttgcagataggagattggagaattcttttcttggaaaatgaatgatcccagagaaaagaattccagatggtaacatgatagggttccgcaatgaaaaagatagctagctgccattcactcaatactgaaatgcatagtggttaaaggcatgggctctagagttaggcttcctgagtttgaactcagacttaactacttaccagctatatgaccttgggcaagttacttaacctatttgttcctcagtattcccatctttaggatggggaaaattatgtttacctcaagattgttgtaaaggttaaatgagttaacaaagcactgctgatggtaagctctggtaaatactagctgaggaaggaggaagtacccagggacttccttagctgtcaaaggcagctctcgactttagatcatgccccaatggtgaccagcagccttttctacataggtggtacatggggtctgaacaggggctttgaccccacagaagacacctttccccagttcctctctctcattcttaactctgtcttttaggaacattctttttttttttttttttttttaccttttttttttattttttattttttattgatcattcttgggtgtttctcgcagagggggatttggcagggtcataggacaatagtggagggaaggtcagcagataagcaagtgaacaaaggtctctggttttcctaggcagaggaccctgtggccttcctcagtgtttgtgtccctgggtacttgagattagggagtggtgatgattgttaacgagcatgctgccttcaagcatctgtttaacaaagcacatcttgcaccgcccttaatccattcaactctgagtggacacagcacatgtttcagagagcacagggttgggggtaaggtcaccgatgagcaggatcccaaggcagaagaatttttcttagtacggaacaaaatgaaaagtctcccatgtctacttctttctacacagacacggcaaccatccgatttctcaatcttttccccacctttcctccctttctattccacaaaaccgccattgtcatcccggcccgttctcaatgagctgttgggtacacctcccagagggggtggtggccgggcagaggggctcctcacatcccagtaggggcggccgggcagaggcgcccctcacctcccggacggggcggctggccgggcggggggctgacccgcccacctccctcccggacggggtggctggccaggcagaggggctcctcacttcccagtaggggcggctgggcagaggcacccctcacctcccggacggggcggctggccgggtggggggctgaccccccccacctccctcctggacggggcggctggccgggcggggggctgaccccccccacctccctcccggacggggcggctggccgggcagaggggctcctcacttcccagtaggggcggccgggcagaggcgcccctcacctcccggaccgggcggctggctgggcggggggctgacccccccacctccctcccggacggggcggctggctgagcggggggctgacccccccacctccctcctggacggggcggctggcctggcgggggctgacccccacctccctcccggatggggtggctgccgggcggagacgctcctcacttcccagacggggtggctgctgggcggaggggctcctcacttctcagatggggcagttgccgggcggagggtctcctcacttctcagatggggcggccgggcagagacgctcctcacctcccagacggggtcgcggccgggcagaggcgctcctcacatcccagacggggcggcggggcagaggtgctccccacatctcagacgatgggcggccgggcagagacgctcctcacttcctagatgggatggcggccgggaagaggcgctcctcacttcctagatgggatggcggccgggcagagacgctcctcactttccagactgggcagccaggcagagcggctcctcacgtcccagacgatgggcggccgggcagagacactcctcacttcccagacggggtggcggccgggcagaggctgcaatctcggcactttgggaggccaaggcaggcggctgggaggtggaggttgtagcgagccgcgatcacgccactgcactccagcctgggcaccattgagcactgagtgaaccagactccgtctgcaaacccggcacctcgggaggccgaggctggcagatcactcgcggttaggagctggagaccagcccggccaacacagcgaaaccccgtctccacgaaaaaagtatgaaaaccagtcaggtgtggcagcgcgcgcctgcaatcgcaggcactcggcaggctgaggcaggagaatcaggcagggaggttgcagtgagccgagatggcagcagtacagtccagcttcggctcggcattagagggagaccgtggaaagagagggagagggggaccgtggggagagggagagggagagggagagggagagagcaggaacattcttaagactgtctccaactgcagcattgaactcttactgttcattttttcaataaatgtttattaggtgcctactctgtgcaagtactgctcaagctgctggaatgacagcagtgaaccaggtctgtcataatagctaacatttactgaatgcttactgtgtgctttacatgtattaagttgttgaattctcgaaacaaccctctgaaacagatgatgttatgatctctgttttacagataaggaaactgaggcacagagattaaatagcttgccaaggccacacagctagcaagcagcagagataggaatcaaatccagacagtcttgctcttgagtctgtttaaaaaaaactgtagagacaggggtcttgctgtgttacccaggctggactggaacttgagtctgtttttaaccattatgcctccctgttctcatggagcttatgttctggaagtgggagactgacagtaaataagtaaacaaagaaaatagagaccaagtagcaataggtggtaccaattgagtatcccttatcagaaatgcttaggaccggaagtgtttcggatttcggaatttttggattttggaatattagcatatatgtaatgagatatcttggggatgggactcaggtttaaacatgacattcatttatgtttcatctataacttgtacacatagcctgaagttaattttattaatattttaaataattttgtgcatgaaacaaagtttgtgtacaatataccattagaaagcaaaggtgtcactatctcagccacccatgtggacaatctgtgatcgacctaaccattgttcctgactctgaatttatatgctactggtaagcaatcattttcttgcacttattcacataactgtaaattttaatcaattaaaaaacatgacataccattaatacagtgaaaaaacaaggtgttcagggtagcaagcagtacagtagcatcaccagagttccttttttagctgttaaaccacagcaacaaacaacagcaagttttcagtctctacttatgatactgtgttttgattaaaagattactatatactatattttatgtttttaggtgaaaagaaacattagaagtaggtcctgtagggatgaggaggcattctgctgtatggctttttaaaatgtcttttctaggccaggcgtgatggctcatgtctgtagtcccagcactttgggaggccgaggcaggaggattgcttgagctcacgaggttgagaccagcctgggcaacatagcaagacctcgtctctcctaaacatttaaaaaaaaattagctgggcgtggtggcacacacctgtagtcccagctacttgggatgctgaggtgggaggattgattgagcccagaaatttgaggctgcagtgagctatgttaacaccactgtactctagcctgggtgatagagcaagaccctgtatcgaaaaaaaaccctgaagtttcctctacagtcttctgcctcattaacaatggttttttcttagaagtctctctttgatattttggacagatatgatgtcttgttctgttatgaatgcacgcaggtacattgcagctgaagggagctgggagggcctttttttcccccttagggatgctgaataaactgttgtgtgcctgcattttgattgcaacccatcacatgaggtcggggtggaatttctcaactcgtggcatcatgttagcactctaaaagtttcagattttggagcatttgaggttttagattttcaaattaggaatgctcaacctgtctgataacatataaaacaagggattgtgatacagagggactggcagagggtagcattagttggggtggtcaatgtttatgagcaccaagtgagataagttatagttttttttttttttttaaacagccttactctgttgcacaggctggagtgtagtggtgtgatctagtgtcagcccccagagtagctgggactgcaggtgtgcaccaccacacctggcttttttttgtgtgtgtgtcttttgtaaagatggcattttaccatgttgcccaggctggtcttgaactactgggcttgagcaatccccctgcgttggcctcccaaatgcgggattacaggcatgagccaccacgcttggctgagttctttaagaattaattacttagagtattgctgtctctgcagatttgcaaaatgccctttctatgatttgatttataatgctactcccacacgttttaatattactaataaaaagcaggaatagttcatgtgcactggtgtcttactgtgtatgagggactatactaagcaatttatatagattgtttcattttatgctcatagcaatgctataacaattcttttctttttcagtcatggaaaactaaagcttaaggagacaagtgacaggcccagggctttaaatttagcaagtggcagagccaggatttgaacagaggtagcctgattccagaaccactgctgttaaatacttaactattttattgatgaagtgatatgtgcaaggtaattctttttataaaaaatagctgacttttatagagatttaaaatattgtaagcattactgggtcttcacagtaacagtgaagcttacctatattttggaggcttcaagacaggacataaacaatacattttgagtaaagaagcttctagggttgtatgattttatcaccccaaattagcaattttgttcatatgaactaagatgcgtaagattctttagcacaaagccagagccaggatttgacaccaggccagttgacttaagatgtagagctgttacccattccactgcagagtaaatgataacatgtagcttatctttgttcaaggtactgtgggaagccaatctagtgaaattacattttaacagtccccaaggaatgtttgttaaataatttttagttttttaaaacttctaaatttctcaaaacaaaagctgagtgaagacagttttattttacagacttggagacagtatggagcagtggcccagagtgagagttcttgggtcagattgtctggtggcttacgctaattttcacttcttgatttaactgattcaagtattaatataattttgaacaggcaaccttgccctccaagtcttagttcccttaattgtgaaagaagctaatatagtatcttcctcataggataagtatgaggactaaatgagacaacctctctacaaagtgcaaggcatggtgccttttggccagccatctcttctcttggaaatggacccctcattcatcattcatgaatccaaagtgaagttttggctccattgccttggttttatcagtgcctgaagtattcttctgacaaatagtgtgcatgaacttagagtatagactttcctgacatatttttgttgctcactttcaagttttaaaaacttacagtaaaatacacataccataaaatttaccatttaaaccatgtttaactataccagttctatggcattaagtatagccatactgttgtgcaaccatcactaccatccacctccagaactttcttcatcttcccaaactgaaactctatacccattaaacaacactagtggcagtttttgcttattattcttagctttgtgaccaaggctgctagttaggagaaatgttactctgtttgtacaaagaaagactttgaaagaaatgtgattagaaatctatattatcccaaaagcataatccataaatgaaaaaatggatatactggacttaattaaaatgaaagcttttgctctgtgaaagaaagtgaaaagacaagccataaactaggagaagatattttaaatcaaatttttgtttaagagatgcagtctgtgttctccaggctggacttgaactcctggcctcaagccatcctcttaccacagcctcctgaatagctgggactacaagtatgtgccactgtgcccagctgcaaatcacatttttgacaaagacttgtatccataataaacttttaaaagcctccaaatttaacaatgaggaaacaaccaaataacaaaatgggtaaaagatgtgaataggcacttcacctagaagatatgaaaatagcaaataaaggaaatgcagattaggcagatgaaaattaaaaccaaaataacaattayaacaaatgtaccactctggtatgtgatgttgctaacgagggaggttgtatgtatatggtggtaggaggtatttgtgaaatctctgtactttctgcccaattttgttgtgatcctaaacatcatctataaataaaattaaagtgagataccactgtacacttaaagcggaaataccagttgttggcaagtgtgcagagcaactggaacttttatacgtttctgatgggaatacaaaatgatactgccactttggaaaacagtttgccagcagtttcttatgaaattaaacctgtatctccaatatgactcagcaatcctacttctagatatctctccaagagaaatgaaaacctgtgtttacacaaaaacctgtatatcaatgtttatagtagcattgttcagcattagtcactaaaaattggaaacaacccagttctttcaactggtgaaaaagatgaatagattgttgtatttttataccatggaatatactccttgattcgtgcaataacagattaatcttaaaatgcattttgctaggtgaaagacaccagatacaaaaggctatgtatcatttcatttatccacttatatgaataatcattccatttatataaaaatctgaaaaagcaaaactatagggaggaaaacagtggatgccagggtttgggggtatagggaagtattggttataaaataaaggcatggcatgagggattttggaggtgatgggatggttctctctctctctctctctctcacacacacacacacacacacacatacacacacacacacaccccactacccctctctctctcgccaattgtcaccaaattgatgggcatgttgtcagtgttaatatttggtctggtgtactaattaccacccctcccaaaatctatattatcagcttggtagcatatatagtacaatttcattaaagaaaataaatgatgatttattaactaatatgtcacatgaaaagtcatagaatgtgtattttagtttaaaaatatgggtatggatatacacacacacatttatttatcgtaagcgtcttactttactggaatttgctggttataccagataaactttttccactgcttgagctttcagtagaccattgtgcaagttaatgataaatttcgtgagcataacacctacttaagtttctcagaatctgttacagaaaagcatttatcttgcggttcaggcagcctgggatggaaggtaaatgctttctttttataagtatcctgaaatttcaagtgtaatagggaacaagatattaacataaattttcaaaaggcctcattcagttctagttccttttttttctttacaaacttaaatctcttcataaccatcagatgccataccacccttgtgaaacagtctgctagaactagacatgtctcaggattcttagaggactggggtaaccaaagtgggatttgaacttgtttgaggaatatacatgggtagtgagctgaaccttttaattcctagaatttatgggtttaacactacaagggttgtcaccctgtttatttctgtaaataattaaggcatgtttattgtagaaaacttcacaatgcacagcacagattataagagtactaccaggattattactcctaagataactgtttatttagttttccaaactttgctacgtaggtatatacatgtgtgtctgtccatgtctccttttaaaaacaacaaaaaaacctcattttaatattcaatatattattgactgtctttgtatgtgagaaaatttaaatataatagttgtgtattctactgaatatatggaatattatttattttaccaattcccattttattagtcttttaacttatatccacttattttggctgggcgtggtggctcacacctgtaatcctagcactttgggaggccgaggcaagtggacaacttcagtccaggagttcgagatcagcctggccaacatggcaaaaccctgtctctactaaaaatacaaagaattagctgggtgtggtggtgtgtgcttgtaatcccagctactcaggaggctgaggcacgagaattacttgaacttgggaggcggaagttgcagtgaactgagattgcaccactgcactccagcctgggtgacagagcaagacactgtctcaaaaaaaaaaaaagtacatatatccacttatttttgctctgatgaatattcctatattagtatctttgagtatctttccattatccctccatttatttccttaggatatattcctgaaagcagtatggccgggtcagagagtggcactttttaaaaacttattttttattatcaaagtagtatatatgctcatagtaatgagaagacacaaggtgcaaaaaggtacaaggtaaacagaaaatgctctgacttaacagttcccctctcagaggaactgtaaaataaacagatatacatttacattaatttatacattctatagaaaattcatgtgtgttagatgatatatttgttttcttgaaacatccactctaattacagagtttactaaggttacagagttaatatagagaggtattagagagtttaataaggttggcagttaaatatatcaaaattatgcagttatacaattatatcacatatacaccaacaataatcatctagacaatataatgaaaaaagctcttattcgtatatatcttcttattaagtttattccttagtatttttttttgttttttgggggggaccccccaaaaacaaaaaaatactaaggaataaatttaagaaatgtgcagtaagattcaatattgtaaaaagaggttaactctatttaagttagtctataaatttaagagattttgatggagggaggatctgacacaatgatgttaaggttcatatgaaagagtaaatatttgaaaacacacagagaaattctgaaaaagaaggatgacaagggggatgtgccttattagacaaaaaaatgcattaaaatgtacaacaattttaaaaagtaacattgtacctaatatattgtacacttaaatatgtgttaagagggtaactctcatggtaagtgtttttactccaataaataaaattttaaagaatttcttcatcccccctccaaaagtactggcaccaaaatagaataacaaatcaatgcaagaaaacatccagaaagagacccccaaataaaaatttagtatactgtatatttaatagtggtagcttttcaggtagatgaggaaagagtggcttacttaacaaatggcattgggacaatcagttaatgattttgaagaaaaaaagttagtttcttatgttatatacttaaactaaaataaattctagatgagttaaggatgtaaatgtaaagtacaaaaggtactagaagagagtgtaagttgaggtaaggaaggccttccaaagcctgacaccaaaggcatggtacttaaaaattaaaaaaccccacaaacagataaaagataaacaagaaacttaaaaaagactaacaatatgtgacaggtaaatgatgaatatctttaatatgcaaagatctcttacctatctgtaacaaaaaaggtaaacacccaaaataaaaatgcacaatggaagtaaacaggcagttcacaaatgaagaatacaaatggtcaaaaaatctcacaaagttattggagataaaaaacagatgatcatttttcacataacagattgacaaagcttaaaaagaattttcatagtacctgataaaagtgtggctagacactttcctatactgctagtgtaagtgtgaaatgatatctttccagagggtaatttacagtatgtatcacaagccttaagaagtactatttatatttagaacatgtggaaaaataaaaaataaataagtactatttatatatgttgttagtgggtatataaattgatacagtttttctggagggcagtttggaactatttatcaaagtttagaatgtacatgccctttgtcctagcaataacacttccaggaattttatctaaaagatatgctcatgaagatgtatatacaaggatattcattgaagcagggtttataatagcacaaaactgaaaacaacctaaatgttaatcaaaaaggaactaattaaataaaatatagcatatccacataagggaatattacaaccattttataaaatggtacgtttatctatcttctttggggatagttcagttttgttttttattgtggaggtctatatgtccttaaaatttttttttctttttaataattagagatgaggtctcactatgttgcccaggctggtcttgaactcctggcctcaagtgatccttggcttctcaaagtgctgcgattacaggcatgagtcactgcacctggcaggaggtttatatgtcttgatacaaggtgtaaaagatatgttaaatggaaaatgcaaggtgcaaaatagtacatatagtatgatcccatgtgtgtaaagaagaaaaaatagggaagatgggcattacagaggctttaaaatgcactgggaataataaagttttcatttttatctttagagtatagttcatgagtgaattcttttccattttttttcccagttatcttaaaagctctgttgattgtggatctgagaactaacatcacatgttataaaatccaaatagaaaatatatttaaattattagacaatttaaagcttatgagaacataagaataaaattactgcattcctttgcttattaattaagtatatcacactaacagaatttatttctgtgggaacaatgttaactcataggacccagatggaaatgatatgccagnnnnnnnnnnnnnnnnnnnnnnnnnnnnnnnnnnnnnnnnnnnnnnnnnnnnnnnnnnnnnnnnnnnnnnnnnnnnnnnnnnnnnnnnnnnnnnnnnnnnnnnnnnnnnnnnnnnnnnnnnnnnnnnnnnnnnnnnnnnnnnnnnnnnnnnnnnnnnnnnnnnnnnnnnnnnnnnnnnnnnnnnnnnnnnnnnnnnnnnnnnnnnnnnnnnnnnnnnnnnnnnnnnnnnnnnnnnnnnnnnnnnnnnnnnnnnnnnnnnnnnnnnnnnnnnnnnnnnnnnnnnnnnnnnnnnnnnnnnnnnnnnnnnnnnnnnnnnnnnnnnnnnnnnnnnnnnnnnnnnnnnnnnnnnnnnnnnnnnnnnnnnnnnnnnnnnnnnnnnnnnnnnnnnnnnnnnnnnnnnnnnnnnnnnnnnnnnnnnnnnnnnnnnnnnnnnnnnnnnnnnnnnnnnnnnnnnnnnnnnnnnnnnnnnnnnnnnnnnnnnnnnnnnnnnnnnnnnnnnnnnnnnnnnnnnnnnnnnnnnnnnnnnnnnnnnnnnnnnnnnnnnnnnnnnnnnnnnnnnnnnnnnnnnnnnnnnnnnnnnnnnnnnnnnnnnnnnnnnnnnnnnnnnnnnnnnnnnnnnnnnnnnnnnnnnnnnnnnnnnnnnnnnnnnnnnnnnnnnnnnnnnnnnnnnnnnnnnnnnnnnnnnnnnnnnnnnnnnnnnnnnnnnnnnnnnnnnnnnnnnnnnnnnnnnnnnnnnnnnnnnnnnnnnnnnnnnnnnnnnnnnnnnnnnnnnnnnnnnnnnnnnnnnnnnnnnnnnnnnnnnnnnnnnnnnnnnnnnnnnnnnnnnnnnnnnnnnnnnnnnnnnnnnnnnnnnnnnnnnnnnnnnnnnnnnnnnnnnnnnnnnnnnnnnnnnnnnnnnnnnnnnnnnnnnnnnnnnnnnnnnnnnnnnnnnnnnnnnnnnnnnnnnnnnnnnnnnnnnnnnnnnnnnnnnnnnnnnnnnnnnnnnnnnnnnnnnnnnnnnnnnnnnnnnnnnnnnnnnnnnnnnnnnnnnnnnnnnnnnnnnnnnnnnnnnnnnnnnnnnnnnnnnnnnnnnnnnnnnnnnnnnnnnnnnnnnnnnnnnnnnnnnnnnnnnnnnnnnnnnnnnnnnnnnnnnnnnnnnnnnnnnnnnnnnnnnnnnnnnnnnnnnnnnnnnnnnnnnnnnnnnnnnnnnnnnnnnnnnnnnnnnnnnnnnnnnnnnnnnnnnnnnnnnnnnnnnnnnnnnnnnnnnnnnnnnnnnnnnnnnnnnnnnnnnnnnnnnnnnnnnnnnnnnnnnnnnnnnnnnnnnnnnnnnnnnnnnnnnnnnnnnnnnnnnnnnnnnnnnnnnnnnnnnnnnnnnnnnnnnnnnnnnnnnnnnnnnnnnnnnnnnnnnnnnnnnnnnnnnnnnnnnnnnnnnnnnnnnnnnnnnnnnnnnnnnnnnnnnnnnnnnnnnnnnnnnnnnnnnnnnnnnnnnnnnnnnnnnnnnnnnnnnnnnnnnnnnnnnnnnnnnnnnnnnnnnnnnnnnnnnnnnnnnnnnnnnnnnnnnnnnnnnnnnnnnnnnnnnnnnnnnnnnnnnnnnnnnnnnnnnnnnnnnnnnnnnnnnnnnnnnnnnnnnnnnnnnnnnnnnnnnnnnnnnnnnnnnnnnnnnnnnnnnnnnnnnnnnnnnnnnnnnnnnnnnnnnnnnnnnnnnnnnnnnnnnnnnnnnnnnnnnnnnnnnnnnnnnnnnnnnnnnnnnnnnnnnnnnnnnnnnnnnnnnnnnnnnnnnnnnnnnnnnnnnnnnnnnnnnnnnnnnnnnnnnnnnnnnnnnnnnnnnnnnnnnnnnnnnnnnnnnnnnnnnnnnnnnnnnnnnnnnnnnnnnnnnnnnnnnnnnnnnnnnnnnnnnnnnnnnnnnnnnnnnnnnnnnnnnnnnnnnnnnnnnnnnnnnnnnnnnnnnnnnnnnnnnnnnnnnnnnnnnnnnnnnnnnnnnnnnnnnnnnnnnnnnnnnnnnnnnnnnnnnnnnnnnnnnnnnnnnnnnnnnnnnnnnnnnnnnnnnnnnnnnnnnnnnnnnnnnnnnnnnnnnnnnnnnnnnnnnnnnnnnnnnnnnnnnnnnnnnnnnnnnnnnnnnnnnnnnnnnnnnnnnnnnnnnnnnnnnnnnnnnnnnnnnnnnnnnnnnnnnnnnnnnnnnnnnnnnnnnnnnnnnnnnnnnnnnnnnnnnnnnnnnnnnnnnnnnnnnnnnnnnnnnnnnnnnnnnnnnnnnnnnnnnnnnnnnnnnnnnnnnaaattaaagaatcacattctgctaattattttagtgcccagcactaaaagaattccttttttggtatgttttctgtcagccctctcttactgttgttttcttcacttccttaattgcagtttcctctttgttatctttaacctttgctcatttctgcctttaaacaggaactgtatatgacctgcttaatcttgggtttgggaaaaagctatctacaaatgtccaaagctatagaagacaataaatgcatccaattcagacaaagaaaatgtttggctaatttcagcattttcttaattattttcctgaataataaagtaatacatgcaaaaaataaaaataagaaattaaaaaaataaaaaatacatgcttgttttaatgaaactaaagtaatatagaattacataaagtaaaaagatagtcactccctcaaagggtaatcactattaatagcttgtattcttctagaccctttactagtcacagatatgcttccatgtcagtatatgcagatttagcttcttgttcttaactgctgtatagtattctatagtatggatgcaccataatttatttatctattccctaattgataggcatttagagagtctccaaattttaactattttagatatgcttatacctataactttatacatctgtgtaagtatttttgtagctagattcttttaagtaaaattgctgggtcaagttaggtacacatcatatgttgataagtattgcaaatttgcctttcaaaaaaggccgtagtgatttacacttcattaacagtatgataaaatatttttctatacccttgaccatgcttaatagatacataagtcttttaaatttttgccaacattataagaaaaaaacacgatgtcattgttttagtttgtatttaaatttctcaaatttgtgtttttaactagtttagttgaacatcttgtaacaactacattatatgtcaaataaaaaagtttgtaaattagagcatatgctataaaccttcagcaagaaaaaagtgtacacagaagaaagtttgtaattgtttatccctctttttctgcatatgtttgggataaagtaacataatatatgaactgatcatcttttcaggtgcctataaagaactcccaactggtagactttagcatctgttgggatgataggccaagtgatatttttaatttaaaatttttttagagacagggtctctagctcaggctggagtgcagtgacatgatcatagctcaccgtaacctcgaactcctgggctcaggtgatccttcctcagcctctggagtagttgggactacaggtgcactaccacgctcagataattttttttaaaaagtttatttaaagacgggacctttctgtgttgcccaggctgatcttgaatgccaatcctctagtgatcctcctgtgcccggccccaagtggctcttttctaccctgctctctcacttgttgtctggctgaacaggctcaagtctgccagtgaaagtgacttagctttgtggacagttgtgtcattcctcagtatggtatgtatgtatgtatgtatgtatgtgtgtatttatttatttatttatttatttatttatttgtgatggagtcttgctcttgttgcccaggctggagtgcactggcacaatcttggctcactgcaacctctgcctcccaggttcaagcaattctcttgcctctgcctcccaagtagctgggattacaggcgcctgccaccacacccagctaatttttgtatttttaattgaaatggagtttcaccatgttggccaggctggtcttgaattcctgacctcaggtgatctgcctgcctcagcctcagcctcccaaagtgctgggactacaggcataagccaccacgcctggccgaggatgttatttaatgttttgttttgttttgttttattgagataagatctgactctgtcacccaggctggagtgcagtggtgacattttggctcactgcaaccactgcctgcctggctcaggtgatcctcccacctcagcctcctgaatagctgggaccacagtcattcactaccacacccaactaacttttttgtattttttgtagaggcggtgtttcgccatgttgccccggctggtctcaaattcccagactcaagcgatctgcccactttggcctcccaaagtgctgggtttacaggtgtgagccactatgcctggcctggcaattatctttgactttataaatctttcttatattttagataactgatatagctcactactatttaatgtttatctgccttgataactctttatgttgtgtttataggccagagtccctgtagacacatgtactaattgaccagaattacacaataaaattgcagagctacatagtagcagaatagtaatttgccaaattattttaataggtcaatactgaaaggataatattatttgctgacttttattaagacctatattaagattctatagtgttatatttctaaggttacaagtttttttcaagaataaaaatatatgtttaattatgagttttactgttcatccaaaggtgtaacataaaataaatttacaggtgggataagatggattgagttacaattttttaacctcaggatctttgatggctagttcctacccctaaggtcatcttatgtgttcatatgcggtaatgcttttttcattagattttgcatttcaatcacagacatatttgtcaaaaaagatgaggtaggctggacactgtgactcacacctgtaatcacagcactttgggagacctaagtgtgaggactgcttgagtccaggaatttgatgccagcctgggcaacatagtgagaccccatctctacaaacaaatccaaaannnnnnnnnnnnnnnnnnnnnnnnnnnnnnnnnnnnnnnnnnnnnnnnnnnnnnnnnnnnnnnnnnnnnnnnnnnnnnnnnnnnnnnnnnnnnnnnnnnnnnnnnnnnnnnnnnnnnnnnnnnnnnnnnnnnnnnnnnnnnnnnnnnnnnnnnnnnnnnnnnnnnnnnnnnnnnnnnnnnnnnnnnnnnnnnnnnnnnnnnnnnnnnnnnnnnnnnnnnnnnnnnnnnnnnnnnnnnnnnnnnnnnnnnnnnnnnnnnnnnnnnnnnnnnnnnnnnnnnnnnnnnnnnnnnnnnnnnnnnnnnnnnnnnnnnnnnnnnnnnnnnnnnnnnnnnnnnnnnnnnnnnnnnnnnnnnnnnnnnnnnnnnnnnnnnnnnnnnnnnnnnnnnnnnnnnnnnnnnnnnnnnnnnnnnnnnnnnnnnnnnnnnnnnnnnnnnnnnnnnnnnnnnnnnnnnnnnnnnnnnnnnnnnnnnnnnnnnnnnnnnnnnnnnnnnnnnnnnnnnnnnnnnnnnnnnnnnnnnnnnnnnnnnnnnnnnnnnnnnnnnnnnnnnnnnnnnnnnnnnnnnnnnnnnnnnnnnnnnnnnnnnnnnnnnnnnnnnnnnnnnnnnnnnnnnnnnnnnnnnnnnnnnnnnnnnnnnnnnnnnnnnnnnnnnnnnnnnnnnnnnnnnnnnnnnnnnnnnnnnnnnnnnnnnnnnnnnnnnnnnnnnnnnnnnnnnnnnnnnnnnnnnnnnnnnnnnnnnnnnnnnnnnnnnnnnnnnnnnnnnnnnnnnnnnnnnnnnnnnnnnnnnnnnnnnnnnnnnnnnnnnnnnnnnnnnnnnnnnnnnnnnnnnnnnnnnnnnnnnnnnnnnnnnnnnnnnnnnnnnnnnnnnnnnnnnnnnnnnnnnnnnnnnnnnnnnnnnnnnnnnnnnnnnnnnnnnnnnnnnnnnnnnnnnnnnnnnnnnntataaagtagtaccgcggttaccagggtctgaagggagggagaatagggagttattttttaataggtacaaaatttgaatttgggaagatgaaaaagttctgaagacagatggtggcgatggttgcacaacaatatgcatgtacttaattccactaaattttacatataaaaatggttaaaatggtaaattttatgttattgtgtattttaccacattttttttttttttgagacagagtcttgctcttgtagcccagactggagggcaatggcacaatcttggctcactgcaacctccgtctcccgggttcaagtgattctcctgcctcagcctcctgagtagctgggattacaggcgcccatcaccacacctggctaatttttgtatttttagtagagacgggtttcgccatgttggccaggctggtctcgaactcctgacctcgtgatctgtccgcctcggcctcccaaaatgctgggattacaggcatgagccaccatgcctggccaatttttttttttttttttttgcgacagagtttcgctcttgttgcccaagctggagtgcaatggtgcgatctcagctcactgcaacctctgtctcctgggttcaagcgattctcctgcctcagcctcctgagtagctgggattacaggtgtgtgccaccacacccagctaattttttgtatttttagtagaaacggggttttaccatgttagccaggctggtttggaactcctgacctcaggtgatcgccctcttcagcctcccagagtgctgggattacaggcgtgagccaccatgcctggccattttaccacaatttaaaaatatttatttatttatttatttatttatttatttatttatttattcattcattcattcattcattcgttcattcattcattcattcaagacggagtcttgctctgtcacccaggnnnnnnnnnnnnnnnnnnnnnnnnnnnnnnnnnnnnnnnnnnnnnnnnnnnnnnnnnnnnnnnnnnnnnnnnnnnnnnnnnnnnnnnnnnnnnnnnnnnnnnnnnnnnnnnnnnnnnnnnnnnnnnnnnnnnnnnnnnnnnnnnnnnnnnnnnnnnnnnnnnnnnnnnnnnnnnnnnnnnnnnnnnnnnnnnnnnnnnnnnnnnnnnnnnnnnnnnnnnnnnnnnnnnnnnnnnnnnnnnnnnnnnnnnnnnnnnnnnnnnnnnnnnnnnnnnnnnnnnnnnnnnnnnnnnnnnnnnnnnnnnnnnnnnnnnnnnnnnnnnnnnnnnnnnnnnnnnnnnnnnnnnnnnnnnnnnnnnnnnnnnnnnnnnnnnnnnnnnnnnnnnnnnnnnnnnnnnnnnnnnnnnnnnnnnnnnnnnnnnnnnnnnnnnnnnnnnnnnnnnnnnnnnnnnnnnnnnnnnnnnnnnnnnnnnnnnnnnnnnnnnnnnnnnnnnnnnnnnnnnnnnnnnnnnnnnnnnnnnnnnnnnnnnnnnnnnnnnnnnnnnnnnnnnnnnnnnnnnnnnnnnnnnnnnnnnnnnnnnnnnnnnnnnnnnnnnnnnnnnnnnnnnnnnnnnnnnnnnnnnnnnnnnnnnnnnnnnnnnnnnnnnnnnnnnnnnnnnnnnnnnnnnnnnnnnnnnnnnnnnnnnnnnnnnnnnnnnnnnnnnnnnnnnnnnnnnnnnnnnnnnnnnnnnnnnnnnnnnnnnnnnnnnnnnnnnnnnnnnnnnnnnnnnnnnnnnnnnnnnnnnnnnnnnnnnnnnnnnnnnnnnnnnnnnnnnnnnnnnnnnnnnnnnnnnnnnnnnnnnnnnnnnnnnnnnnnnnnnnnnnnnnnnnnnnnnnnnnnnnnnnnnnnnnnnnnnnnnnnnnnnnnnnnnnnnnnnnnnnnnnnnnnnnnnnnnnnnnnnnnnnnnnnnnnnnnnnnnnnnnnnnnnnnnnnnnnnnnnnnnnnnnnnnnnnnnnnnnnnnnnnnnnnnnnnnnnnnnnnnnnnnnnnnnnnnnnnnnnnnnnnnnnnnnnnnnnnnnnnnnnnnnnnnnnnnnnnnnnnnnnnnnnnnnnnnnnnnnnnnnnnnnnnnnnnnnnnnnnnnnnnnnnnnnnnnnnnnnnnnnnnnnnnnnnnnnnnnnnnnnnnnnnnnnnnnnnnnnnnnnnnnnnnnnnnnnnnnnnnnnnnnnnnnnnnnnnnnnnnnnnnnnnnnnnnnnnnnnnnnnnnnnnnnnnnnnnnnnnnnnnnnnnnnnnnnnnnnnnnnnnnnnnnnnnnnnnnnnnnnnnnnnnnnnnnnnnnnnnnnnnnnnnnnnnnnnnnnnnnnnnnnnnnnnnnnnnnnnnnnnnnnnnnnnnnnnnnnnnnnnnnnnnnnnnnnnnnnnnnnnnnnnnnnnnnnnnnnnnnnnnnnnnnnnnnnnnnnnnnnnnnnnnnnnnnnnnnnnnnnnnnnnnnnnnnnnnnnnnnnnnnnnnnnnnnnnnnnnnnnnnnnnnnnnnnnnnnnnnnnnnnnnnnnnnnnnnnnnnnnnnnnnnnnnnnnnnnnnnnnnnnnnnnnnnnnnnnnnnnnnnnnnnnnnnnnnnnnnnnnnnnnnnnnnnnnnnnnnnnnnnnnnnnnnnnnnnnnnnnnnnnnnnnnnnnnnnnnnnnnnnnnnnnnnnnnnnnnnnnnnnnnnnnnnnnnnnnnnnnnnnnnnnnnnnnnnnnnnnnnnnnnnnnnnnnnnnnnnnnnnnnnnnnnnnnnnnnnnnnnnnnnnnnnnnnnnnnnnnnnnnnnnnnnnnnnnnnnnnnnnnnnnnnnnnnnnnnnnnnnnnnnnnnnnnnnnnnnnnnnnnnnnnnnnnnnnnnnnnnnnnnnnnnnnnnnnnnnnnnnnnnnnnnnnnnnnnnnnnnnnnnnnnnnnnnnnnnnnnnnnnnnnnnnnnnnnnnnnnnnnnnnnnnnnnnnnnnnnnnnnnnnnnnnnnnnnnnnnnnnnnnnnnnnnnnnnnnnnnnnnnnnnnnnnnnnnnnnnnnnnnnnnnnnnnnnnnnnnnnnnnnnnnnnnnnnnnnnnnnnnnnnnnnnnnnnnnnnnnnnnnnnnnnnnnnnnnnnnnnnnnnnnnnnnnnnnnnnnnnnnnnnnnnnnnnnnnnnnnnnnnnnnnnnnnnnnnnnnnnnnnnnnnnnnnnnnnnnnnnnnnnnnnnnnnnnnnnnnnnnnnnnnnnnnnnnnnnngcccggtgtggaggcgcatacatatagtcccagctacttgggaggctgaggcaggagaatcacttgaacccgagaggtggaggttgcagtgagccaagatcacgccactgcactccaagcctggtaacagagtgagactctgtctcaaaaaagaaaaaaattaaaaaaaatttaaaaaagtcaaattcagcgatttctagtatgttcacagacttgtgcaactatcatcactatctaattacagaatatttttattaatacaaaaagaaattccatgtatatgtttttgcagtttgtttacatggtggtttttgccacacaaaattttaaaatttcatttaattacattttaatctcttttcctttacagtttctgttttggcttatgcttagaaatgctttccccacccaatgttttgttgttgttaggtaatgcttatttttatattttcctagtattttttactttttatttttacatcttgttctttaacttggaattaatttatagattgtaagatggtttctaaaaatgttcacaattattaaatggttagcgtattatcccagcactacttactgattttctcagtgatgtgaattgctgcccttgttatatactgaattcttatatacacacatatgtacgtttctggaactttctgttctgttgcaaggatctttctattctgacatcagcacaagacctttttttttttttttgagatggagtctcgctctgtcacccaggctggagtgccatggtgcaatcttggctcactgcaccctctgcctcccaggttcaagtgattctcctgcctcagccttccaagtagcttggactacaagcatgcaccaccatgcccagctaatttttgtatttttttagtagagacgggtttcgccatgttggccaggctggtctcaaactcctgacctcaggtgatccgcctgccttggcctcccgaagtgctgggattataggcgtgagtcactgtgcctggccaatactttttttaatagacaattttttagagtaattttaggtccacagcaaaattgaacagaaggtacagtatgtagccttttcagattggcttctttcacttagtaatgcacatataagtttcctccaagtttttttatgaatagctcatctttaatgtgtgtgctgaataatatttgattgccttgctgcaccacagtttatttatccattcacctactaaagggtatcttggttgcttccaagtgtcagcaattatgaataaagttgctgtaaacatctgtgtgcagttttggtgtagacataagttttcaactgttgtgggcaaataccaaggagtgcaattgctggattgtatggtaaattatatttagttttgtaagtaactgcccaactgtcttccaaagtggctgtactattttgcatttccactagcattaaatgagcattcctattgctccacatcctctttagcatttggtgttgtcagtgttctggattttggccattctactaataatagatatgtagtagtgtctcatcattgttttaatttgcatttccctgatgacgtatgatgtggggcatcttttcatatgcttatatattatctgtatatcttctttggtgaattgtcttttaaggtccttagcccataacatcaggttgttttcttagcacaagactttttaataattaaaacttttaaagactctttaatgtctggttgggtaattagcatttagcatcattattttttagtaatgacttttataaaattaatggtatacttgaaatgtttggccaaactgagttgtccttttcagcctcaccaaacttttattgttttcttgtagtttattcttaacaagttatgataaatataaaataagtgttttttctttttccttttttttttttttgatagtcttgctctgttgtccaggctggagtgcagtggcatgaacttggctcattgcaacctctgcctcctgggctcaagccgtcctcccacctaagcctcctgagtagctgggactacaggagtgtgccaccgtggtcagctaatttttgcattttttgtggagacacagtttcactatgtttcccaggctggtctcgaactcctgggctcaagcaatccgcccatctcgacctcccaaagtgctgggattacaggcgtgagccaccatgtctagcctgttttttcaacttattctacataagtggttaaatactgacagttattttcgttttcataggcatttaatgttttcgcatttgttggttttggcactattttgtcttagaagtaaatttgtcttagaagaaagcaataacattacaggcagttcttgatttagacatagattgtgtctgacaagttgaatcagatgatttaaaaataaattttcttaatatttttatattcgggggtacatgtgcttgtttgttacatgggtattacatgtgtaatcaggtgattgttttgatgagggagaggaggcattccaatcaccaaatagccttcatagactcaaagattcctgcaccaagaccatatttaacacataacattgttgaaaagtagctgactcatttgtaatttcaagtagttgaattctacttccccctaccttcctgagataatgatagctgccttgcaagaaaagttccacacacactaaaaacatgtttctaccttttgtctattattgacatggcagcaattgcttagcccctgttggaaaggcacatatatacttgaggcatatttctcacttttggggaacctgtctctacctgtgtttattgcagggtattggtatttttcaagcattctctccacaccactctcacctttggctggttttactttatgacttttgcacacattgccctgttaagttaatccttttgaggttattgttagctttggactccagcctgaattggctgtatgaacatagacaagtctcagctttagcttccttaattttaaaaggaggttatgattctatttacgtagcaggattggtgtgagacacatgcagtgctataggaatctgaagcatctgtattgttatcataggacaacttatttgtagagatgctatgactactctaggagtcacaaaaatgaccagtgaagtacattgccttttaatttgaatgttctgttcttttttgaccttattactgtgtttaagtattactacctaatcttttaggaatggtcaaataaaaaaaactgttatttattttattttttttcctgagatggagtctcactctgtcacccaggctggggtgcagtggcgtgatttcagctcactgcaacctctgcctcccgggttcaagcgattcttctgcctctgcctcactctccgagtagctggattgcaggcgtgtgccaccatgcccggctaatttttgtatttttagtagagacgggatttcaccatattggccaggctagtctcgaactcctgacctcattatctgcccaccttggcctcccaaagttctaggattacaggcgtgagcaactgtgcctggcaaacatacacctgcctacttcagttgtttcatctggaatcttagtcctctgtttatataatactggttgtttgatgaaagaaattagacacttagtattttggaaacaagttaagtaataagattaattttcattttaaaggtttatacaatttaaaagaaaaggatgaattatataaaataatagagaagctaatgctttccccttttgttttcattttagaatgtggtagcaattttaaataaaagtgaatgggtaggaaaaaaattaattgatctggaaatactatatagataccttgaaggcaactagttgattgttatttgcatagctagaaatcatctatttatttaataaaataagcacgtttttatagccttggtataataaaatgggttatttgggctttttatatatatgaatttatcattggtcttacttattgaattatttcagtttcagtaacttttctcttaatttctacgtactttgtattttttttctttttcatttcccattaaaatgagttggctttatgagatgaaataatttaggcctacaatgagtataggtagtcctatgacatacctgtgtatttactacccagcctaagaagttaaacattaaatatatagttgcatttcccctttgtgctcctctcaagtcactcctctcccctctctcccctcaatctgttgaatttggagtttatcatgtctgtgcacatttttatatttttactatcacaactatatatgtgtgcatacaaaaacaatgtataacattgttttatgtttttaaacctttgtatcctttttttggacataacatcaacattttattttattttttattcataagcattgttttcttttgtcttgcatattttaaaatgtattagatggtatcaaactatcactttgtcatttgcatttttcttagaacattgttttcttagaacaatgtttcttagaacatttttcttagaacattgttttcttagaacatgcatttatttatcaacatatattgatacataaaaatacttctagttcatttgtttttaaaattattttgtggcacattataattattcatatttatggggtacaatttgatgttttgatacatctacatgttgtacaatgatcaaatcagggtatttagcatatctatcacctcatacatttatcagtgctttgtgatgagaacattcaaaagcctctcatccagctattttgtaatgtacaataccttactgttaacaatcctcaacctactgtgcaataaaaacaccagaacttattccttctatctaaatgtgaccttgtagccatttaccagactctttccatccttccctccccagtctctggtaaccactgttctactctatgacatcaaccattttttttttttttttgaaattccacatgagcaagatcatgtggtatttgtctttctgtgtctggcttacttcacttaacatgatgtcttccaggtccatccatgttgtcacagatggcagaattttattcttttttatggctgaatagtattccatgtatatatatacaccacattttgtttatgcatttatccattgtcggacatggattgattccatattttggctattgcaaatactgctgcaataaacatggcaatgcagataatctcttcaacataccaatttcatttcctttgaataaatacccagtagtgggattgctggatcatatggtagttcaattttcaattttttgaggaatcaccatactgtttcccatagtggctatactaatttacaatcccaccaactgtgtataagggttcccttttctccataccatcaccacccctcttttcttttgttattttgataataactggagtgagttggtatctccttgtggttttcatttgcattttcctggtgatcagtggtatggattgcatctgtgtcctggccaaatctcatgttgaaatgtaatccccagtgttgggaggtggagnnnnnnnnnnnnnnnnnnnnnnnnnnnnnnnnnnnnnnnnnnnnnnnnnnnnnnnnnnnnnnnnnnnnnnnnnnnnnnnnnnnnnnnnnnnnnnnnnnnnnnnnnnnnnnnnnnnnnnnnnnnnnnnnnnnnnnnnnnnnnnnnnnnnnnnnnnnnnnnnnnnnnnnnnnnnnnnnnnnnnnnnnnnnnnnnnnnnnnnnnnnnnnnnnnnnnnnnnnnnnnnnnnnnnnnnnnnnnnnnnnnnnnnnnnnnnnnnnnnnnnnnnnnnnnnnnnnnnnnnnnnnnnnnnnnnnnnnnnnnnnnnnnnnnnnnnnnnnnnnnnnnnnnnnnnnnnnnnnnnnnnnnnnnnnnnnnnnnnnnnnnnnnnnnnnnnnnnnnnnnnnnnnnnnnnnnnnnnnnnnnnnnnnnnnnnnnnnnnnnnnnnnnnnnnnnnnnnnnnnnnnnnnnnnnnnnnnnnnnnnnnnnnnnnnnnnnnnnnnnnnnnnnnnnnnnnnnnnnnnnnnnnnnnnnnnnnnnnnnnnnnnnnnnnnnnnnnnnnnnnnnnnnnnnnnnnnnnnnnnnnnnnnnnnnnnnnnnnnnnnnnnnnnnnnnnnnnnnnnnnnnnnnnnnnnnnnnnnnnnnnnnnnnnnnnnnnnnnnnnnnnnnnnnnnnnnnnnnnnnnnnnnnnnnnnnnnnnnnnnnnnnnnnnnnnnnnnnnnnnnnnnnnnnnnnnnnnnnnnnnnnnnnnnnnnnnnnnnnnnnnnnnnnnnnnnnnnnnnnnnnnnnnnnnnnnnnnnnnnnnnnnnnnnnnnnnnnnnnnnnnnnnnnnnnnnnnnnnnnnnnnnnnnnnnnnnnnnnnnnnnnnnnnnnnnnnnnnnnnnnnnnnnnnnnnnnnnnnnnnnnnnnnnnnnnnnnnnnnnnnnnnnnnnnnnnnnnnnnnnnnnnnnnnnnnnnnnnnnnnnnnnnnnnnnnnnnnnnnnnnnnnnnnnnnnnnnnnnnnnnnnnnnnnnnnnnnnnnnnnnnnnnnnnnnnnnnnnnnnnnnnnnnnnnnnnnnnnnnnnnnnnnnnnnnnnnnnnnnnnnnnagttttatgtaatctcatttgtctacttttgcttttgttgtctgtgcttttgaggtccactcaaaacttccttgctaagcccagtgctgtaaagcatttcctgcatgtttttttttagtagtttcatagtttcagattttatatttaagcatttaatccattttgagtagatttttgtatatgatgagaggtaggggtctagtctcatttttctgcatgtggctattcagttttctcagcaccacttattgaagagagcagtgtgtgtttgttatggtttggatgtttgtcctttccaaatctcatgttgaaatgtgattcccagtgttggaggtgggacttgtgggaggcgattggatcataggggaagatccttcatgacgggtttggcaccatctccttggtgataagcaagatatggtggggggttttttttgtttgtttttgtttgtttgttagtttgtttttcaccatctcttacaggaaggagaaatctggttgtttaaaagattctggtacctccccctgtctctcttgctcattctcttgccatgtgacatgctggcataccttcgctttctgccataattgtaagcttcctgaggccctcacaagaagcaaatgccagcatcatgcttctgtatagcctgtacaaccatgagcccaaataaattctcttttctttataaattgcccagtctcaggtatttccttatagtgatgcaaaaatggactaacagtgttcttagcacctttttttgaaaatcagatggctgtaggtgcatgaatttattttagggctctattctgttccattgtgtatgtgcctgtttttataccaatactatgctgctttgattactatagccttgtagtatattttcaagtcaggtagtgtgatgcctccagccttgttctttttgcttcagattgctttggctatctggggacttttgtcattccatatgaattttagggtagttttttcctatgtgaagactgtcattgatatttttatagggattgcattaagtctatagattgctttgggtagtatggccattttaacaatattaattcttccaatccatgaacatgggatagcttttcatttgtttatgtcttcttcaatttctttcatcaatgttttatagttttttttttttttttttttggagacagagtctcactctgtcacccaggctggaatgcaatggcatgatctcagctcactgcaacctctgcctccagggttcaagtgattctcctgcctcagcctcccaagtagctaggattacaggtgtgcaccatcacactcagctaattttgtatttttagtagcgatagggtttctccatgttggccaggctggtctcgaactcctgacctcgggtgatctgctcccctcagcctcccaaggtgctgggattacaggtgtgagccaacgcacccagccagtgctttatagcttttagtgtagagatctttcacctccttggttaagtttattcctaagtatcttttttttatgtagcaattgtaaatggaatttttttttcaggtggtttgctattagcatatagaaacactactgattttaataagttgattttgtatcctgtgacttactgaatttattttttagttctgttttttagtagattctttagggttttctgtatataagatcatgccacctgcaaacagggacaatctgactttcttctgaaacttttttttctaaactatgttaatgggatttatccctgttgctacttgcagctctacttcaagctttctcattctcagtgctatagacatttggggccagatcattctttgttgtgaggggctttcttgtccattacaggataattggcagtatccatggcctctatgcactagatgccagtagtactcccttgctgcactctgagttgtgacaaccaaaagtgtctccagacattttgaaatgtcctattggtggtgacatcaccccttctctcagtgagaatcacatttctagttcattcattttaacttctatattatgtttcattataaatataccacaaccaattttttcatttccttgttgatggacatctagattatttccaaagttttaactattagcaacattgttgcaatgagcatttttgttcttgtttccttgtgcacatgtgtgagactctgtctaaggtactatgcttaggagagaaaatgttgagttttaatatatgcatattttcaactctaccggctatcatgaagcagtttccataattgtactaatttatactctaaccaacggaacaagagagatcctgtttctccatatcctcaccgacacttggtattgtcagattttgagatttttatctacctgatggaggtacattatattccttgattaccacaaggatcacaaattgtgcagatagagttgtatccaaaaaaggattaaggctgggcgtggtggctcatgcctgtaatcccagcactttgggaggttgaggcgggtggaccacttgaggtcaggagttcgagatcagcctggccaacatggtgaaaccccatatctactaaaaatacaaaaattacctggggcctggtggcatgtgcttttagtcccagctactcaggaggctgaggcaggagaatcacttgaacctgggaggtggaggttgcagtgagctgagactgctccactgcactcccgcctgagcgacagagcaagattctgtctcaagaaacaaaaacaaaagcaacagcaaaacaaaacaaaacaaaaccccaaaaaagaattaaatcttactgcatgattattgagaatacaggagcctttcccaaattataagtgctgattattttaggggaattttagaatgatgtttgagcttctgtgaccagctttaagaagtggttttgaacaatcagacttcatatgtgccatgttttctactcaatttctgtagtttctatttccaaaccagagatgatcatctagtcataatattgttcttcatcttagaaaatgatattactgatggtgattaccatctctacttagggaatggctcaaaatatattaataacttgaagttatttccctcagtgttgttggatgcttttgttctcagagtcactcatcactaacagctggatgccaaatttgtctctttgatactgtcgtttcccagaagcctacatgttttttccatactatatgaaactgtttatgatcttactctgttttctgagtcattttgctaaatgcagtaggatgttacaaaagatattcctggttttgtacctacctttaagatttaaaatgaaaacgatggacataacatatataacaaagtcaattagagttgtgtgtatatgtaataaagtagtgagagtgagatggaattcctccaaggtttcatgtgtaaagtccaatttaagtagagttttgaaaaaaaaacaatgcaggtgaattacgaaagcgaaagaaatatgtattcagaattgatatgacttaaattaagatgtagtgggaaaagtggcttaattagtataatttttgtttgtgctcacacattgtggactcctcaatacttacttcctgggtgaattatccagtgcctttctgcctgactgatctctctcagttcctcagtaagcctgagagttagtccagtgctttggtctgggacataccccatgataaaactgtatttcagtcttacattcctaaacaggtaaactagccttcacctaccaaaggtattgtattctaaaagtttgttgccaattctgtttgttgaatttgatgttttcccataaaacgatttagtcaactttggtaatcttgcaagatcagccctcaaaagccccatttgacccataagatacaggagcaagtctgagttctgtgttctggaggtagacagccaaagctataagaagaataaggaagagtttccttttttaggctcaggactatccttagataaaattttgataggatctgtttgttttagacattcttctacttccatttttatacccttgtactgcttcccactgactcctcctgggctcctaataccttcatgcttgccttaagtactccatcctggactcgccacctgaactcatcctatttgtcctttgctcccaaacttgcctttcctgtcctatctgggcttttgttctcttgtagtaactgaccttatgtaggtattaagagatataattccaactatcacccccctgattatcaaaaaagagtttatattttaaaaagaagatacactggatgttaagacaactgaccttcaaaaagtcacttcatgggggaaaagagatatggaaggagctattctagattaaatgagacaaaagagacataaaaccaaatgcaatgtgtgaaccttgtgagggtcctgaatagtaaaattggacttcttcagacttgaaaacttgtacacaaaaggacactatcaagagaatggaggatttgggtacaagcggttgaaagatggtttggctgctctggtcggattctgccgtcccagtgaggctggaaaatagggtctagaggcaggaacataaggctgattcacacttcagctatgacaggaaatatcctctcatagagcataggccaagtaaatgattttgtaactttacttcatcctctccttttacatagggtgtactccaagtagagggtatttaaactcaaaaaaactctgtaagagggccttttgagcccctgtgctcaggcctgctcccatactgtggagtgtactttcattttcaacaaatccctccattccttccttgctttgtttgtgcgttttgtccaattctttgtttaagacgccaagaacctggacaccctccactgttaacaccagcccttccctgtggctgaccctgaggtgttatgagtttcttcacagccctacttcctctctcttctccctcattttcagacccttcttcagcatcttccctgggcattgctgtgagtttaggccggcccgttttgagcaggagcagcagcggaacagtagacctgctggaggaagtggggctgcagatcagagacacagcattttcgtcaaccaaacttcttgaagccatatctacagtatcagctcaagtggaagagcttgccgtcaaatgtacggaaaatgcacgtttccttaaaacatgacgggacctcttgaaagaatgctgtgattcttggaaacctgacaattgatttggcatacttagctctttgatagtgactgtgtaataattcatacttcctcatatttgatcatttcacatgtgccacatatataggataatatctagcagttctctatatcttcagaatgaagtttttcttggttttcttgacctttgtaaaagcagaatactgattctatttttgatgttgatcagtacttgtttattcttacactttctgcccttcaaactttcataaaatcctttacaaaatttaattttatcagtagatagttaatattaattgtgccacagtgctaccagtagcaaactaagtggaccattatttgttttgcagtaagatgccaagcatggcagaattagaagttgagcttcatcttatggaccaagggagataactttaaggttccagctccattaggctgagttctctaggcaaatgattgtcttacttacttcgatatccccagcacctaaaacagtgtcacatagcattcactaaatgtttattgaaaagaagagttgattaacataatacaaagctattttttcttcctgtatttagcaggaagactataattgtttctctaaaaatgtatgaatcaggactttgttgacttgaaggaaaatgttatctttttcacagagattttaactttgatgatagcttttaaaaacatgataaatacttttgtcctcaaatgattattttaaaaagtcttttttttttgagacagagtctcattctgtctcccaggctggagtgcagtggtgcgatcttggctcactgcaatctctgcctcctgggttcaagtgattctcctgcctcagcctccctagtagctgggattacaggcgtgtgccaccatacccggctaattttttgtatttttagtagagacaaggtttcaccatattgaccaggctggtctcgaactcctgacctcaagtgatccacccgcctcggcctcccaaagtgctgggattacaggcgtgagccactgcacccagctaagaagtctttatttcagaaaatgaaagactgtctagaaagaacgaattttttttcctatttatttctatggttactrcttttacacttaatattttttgttttcggtatttttatatgtttgattgctgtctttaaagtgccttatcagatttatggctctgtactatgaattttggagctttacaagttatttacataactctaagttactttgcttccaatacatcaaatttaaataacatgattgtttttatattatttgaccttagtgacaatgtcctattttatttgttctgtatcttatgtcgctttttggtagtttgtattatgtgtgaatgattaagccaactaattctgtaccatatataacttctggatatctttgatatgacatcttaattctttgtagatatggtgatgtgtacagaatgatattctgaagctccacaatggtgcattgaaaggctgcagatggatggccaaagaatagttttgtttagcatattaggtctagttctggacttttttttttatactttaagttctggggtacatgtgcagaacatgcagttttgttacataggtatacacgtgccatggtggtttgctgcacccatcaacccatcacctacattaggtatttctcctaatgttatccctcgcctaatccccaccccccgacaggccccagtgtgtgatgcttccctccttatgtctgtgtgttctcattgttcaaatcccacttacgagtgagaacatgcagtgtttggttttctgttcatgtgatagtttgctgagaattattgtttccagcttcatccatgtccctgcaaaggacatgaactcatccttttttatggctgcggagtattccatggtgtatatgtgccacattttctttatccagtctgttattgatggacatttaggttggttccaagtctttgctattgtgaatagtgcctcaataaacatacatgtgcatgtgtctttatagtagaatgatttataatccttcgggtatatatcctgtaatgggattactgggtcaaatggtatttctagttctagatccttgaggaatcatcacactgtcttccacaatggttgaactaatttacactcccgccaacaatgtaaaagcactggacttttttttttttaagttaaaagatcacacacagggtgtgatttctataccaaagatatgcttatttcagtatgaggaaaaatatttttcttacatgtcctgaaaattgcaattttaaaaatgtacaaaataaatttttattaaaagcaaattttatttcaaaaaaaaagagtgaaagacaaccaactggataggagaaagtatttgaaagtcatatatctgataagggattaatatccaagaatataaagaactcttacaactcaacaacaacaacaaaataaccttattaaaaattgggtagagtgcttgaatagacatttcttcgaagatatacaaatacccaataagcacatgaaaagatgcttgacatcatcagtaatcagagaaatgtgaatcaaaaccacaatgagataccacttcacacctgctaggatgggtagaataaaaaagataataggtatcggaggtggaacaattggggcccttatatactgctcatgggagtataaatggtacagtcactttggaaaacagtctggcagatcctcaaacaattaaacatagagttattatatgacccagcaagtctactcttaggtattaccaaagagaaatgaaaacacaaaagtttgtacatgaatgtttatagcagcattattcataatagccaaaagatggaaacaacccaaatgttcatcaactgacaaatagataaattatggtgtatctatgcagtggaatattattcagccataaaagggaatgatgtactgatatgtgctgtaacatggatgaacactgaaaacatgctacatgaaagaagtcagtcacaaaagaccacatattacatgatttnnnnnnnnnnnnnnnnnnnnnnnnnnnnnnnnnnnnnnnnngacagaaggcttaggaggtgatgactgataggtaaggggtatgttttgttgttgttgttgttgtttttaggtgatgaaaatgttctgaaattgcctgtggtgatggttgcacatgtctgtgaatatgctaacaactattgaattctacactttaaatgtgcgaattatataatacgtgaactacatctcaagaatgttttaaaactggtgttgggaaaacaggacatccacatgtaaaacaatgtatgtcagatccttaccatacaccatgtacaacaattaactcaaaatggattaaagacctaaatataagagccaaaactacaaaaactcttagaagaaaacatagcagtaaatattcgtaagtttgaatgtggcaatggtttcttagatatgacacaaaaaacacaaaagaaaaaagataaattggacttcacaaattaaaagcttttgtgattcaatggacaccatcaagaaagtgaaaagaatggaataccgatacattttacacatcaatgtaccttgaaaacattatgctaagtgaaagaatccagacacacaaggacacatattgaatgaatcaatttatatgaaatggccgtataggcaaatccgtagagataggaaataaaattagtgtttgccaggggctgtgagtagagaggaaatggggagtgttgctaatggacatgggatttctttttggagtaatgaaaatgttttgcaactacatagtcattatggttgcacatccttgtgaatgtactaaaaagtactgaactggataccttaaaaggctgaatttttttcatttcttctaaaaaaaaccaggatagatgtgcagaacgtgcaggtttgttacgtaggtacatgtgtgctatggtggtttgctgcatctattgacccatcctttaagtttcctcccctcacccctcaccccccagcaggctccggtgtgtgatgttcccctccctgtgtccatgtgttctcattgttcaactcccatttatgaacaagaacatgcagcatttggttctctgttcctgtgttagtctgctgaggatgatggtttccagcttcattcatatccctgcaaaggacatgatctcattcctttgtatggctgcatagtattccatggtgtatatgtaccacattttctttctccagtctatcattgatgggcatttgggttggttccaagtctttgctattgtaaatagtgctgcagtaaacatacgtgtgcatgtgtctttatagtagaatgatttatattcctctgggtatgtacccagtaatggggttgctgggtcaaatggtatttctggttctagatcctcgaggaatcgccatactgtcttccacaatagttgaactaattcacattcccaccaacagtgtaaaagcgttcctatttccccacagcctcaccagcatctattgtttcctgagtttttaataattgctattctgactggtgtgagatggtatctcattgtggttttgatttgcatttctctgatgatctgtgatgttgagctttttttcatatgtttgttggccgcataaatgtcttcttttgagaaatgtctattcatatcctttgcccactttttgatggggttgtttttttcttgtaaattgtttaagttccttgtagattctggatattagacctttgtcagatgggtagattgcaaaatgttttctcccattctgtaggttaaaaggctgaattttatagcatgtgaattatatcccaatttaaaaaagaatgcatatgtcttagttcaggcttccataacataataccatagactgggtggtctaattgttcaaagctccacagaaattagttggagaagttacaagagtccattaatcatcttgctttgttagtagcagcgggcatggttcagcattttctgcttaagtttctctgagctcaccaaaactaaaatgatgttgtaatactttttttttttaattgcacatcactcctttattatactgatctggtaaaaggatttagtacagttatgctcagatgaacactgggcccatgtggcagggtcaagcaactagaacatgattcagaaatcagtgaaagacacacttggacaggaccaagaggcatttcactgccatgaaacaaggcaggaagggattctaatacacacaccaggaagcactcctgcccctcagaggtcaaggagctgatcctatattggtatgaggaatggcttattttctgatgaccacatgtgggactatttcaaccgccacaagaaaccccagaagggttattgttttgtattattaatatatactatacttttttaataaaagtaaatataacacataacgaaattcaggattgatcccaacctagagccagatcctctggggtcaaggaggaaacagttgtcacatcaccatgcagattacattcatcttccactggaatgactagagcccccaggcagtggcctgactgcagaagagcagaggacagactctgctcatggggacagacaggctctgttgcttctcctcattggtcgtggcttagcatgttcctccccaaagtccttagtaaacaaagcactcacaaaaacccaagtcactacttttaaactctgttggataaggggagcttttccacagcttagactgagaacctgtgctctagaactgctattctgactagattgtatgaagggagtgggtgcaggcgacaaaatggctaaaatgaaaatgggagccactggtccccatctgcagctacaactcaagatgtctacagatgtggtcagtgtgacatgtgcaggtgggaggggcagagggacaagaccagcagggagggtgctcctggggacagtatcctccccgctggccttcacttcttggccttgccctgggcagccacagcttctatggctttgcacaccgtctcttcatcccccagaaactgcatgggcttgataggcttcaagttcttgtccaattcatagacgatgggaataccagtcggcaggttcagctccatgatagcctcttcagagagaccctccacatgcttggcaatgccctggaggctgttgccatgggctgcaatcagtacacgtttcccctccttgatctggggaactatttcttcattccagaagggcagagctctggcaatagtatccttcggactctcataggagggtagctgatcttctgtgaggtctgcatacctgcgatccttactgatgttgctgtagaaaggatggtcgggctccatcggaggtggtgggacatcataggagcgcctccagatcttcacctgggcctcaccatgctttgcagcagtttctgctttattgagaccggttagacccccatagtgcygctcattgaggygccaagtcctcaccactggcagccacatctgatcaatggcatctagcactgtccagagggtccggatcactctcttctgcactgaggtgaggcagatgtcaaactcatagccagcatctcgtagcgcctgcccgccgcgcttcgcctcctcgtggcccgccgggctcagatcggcgtcgtaccagcagctgaagcggttctccaggttccatgtgctctygccgtgccggatcagcaccagtttgtaggcggccatggcggtgggctgcaatactttttataccatttgaagtaaaaggtacaaaaggttatacgctgaaaattctttttcccacccttattccctaaccactcatttcccctcaccagaggaaccactgtttccatggsatatattagattgatttatatgaaattgccggtgtttgactatgatgatttcatgtggttcagcctaatatcagtgaaaaaacagagtcctatcttcatggagtttttattctagtgggaagtgtattacttaattattgcagtgtaacaaataaccccaaaatttagtggcttaaagcaacaaacatttattatctcacatttcctatgactcaataatttgggagcagcttagatgggtagttctggctcagggtgtctcatgaagttgtagtcaatatggtgtctggggatgtagtagtttaaaggcttaacttaggtctgaaggagcagtttccaaggtggttcacttacctggctattggcgggaggccttaggtctttgctggtttttgacatgaggcctcagttcctcaccatatgaacctctccataaggctgcttgtatgtcttcatacttggtaggtggcttcccccagattgcgtgattcaggagagaggacaacaaggaaaacacaatgcttttttctcctcttgcaatgttttttatgacctagtcttggaagtcacaccttgtcgcttctaccgtagtctattcattagaaacaagtcattaggccaggtgtggtggctcatgcctgtaatcccagcactttgggagggcgaggcgggtggatcacttgaggtcaggtgttcgagaccagcctagtcaacatggtgaaaccttgtctctacttaaaatacaaaaaattagccgggtgtggtggcatgcgcccgtaatctcaggtactggggaggctgatgcaggagaatcacttcaacccgggaggcggaagttgcagtgaactgagatcgtgccacagcactccagcctgcgagacagaattgagtctcaaaaacaaaaacaaaaacaaaaaccaaaacaacaacaacaacaaaaaacaagaaacaagtcattaagttcaggccacaccgaaggggaaaggattaaattccacctcttgaaggaaggagtagcaaagaatttgtgggcgtattttaaaaccaccacaggaaggcagacaataagcaataaacagaataaatcagcaagttatggagtatgttagaaggtggtacgttctatgaaaacaaaagaaaaagcagaggtaaggggaatcagagtatgtttgtgtggaagggatgtaggttgcagttttaaatagggtggtcagcatagtcctcattaaggttagatttgaacaaagacttggagacaaagaagttagccaagcagttatctggaagaagaaagtcccaaagcaagagaatagctaaaataaggccttgaagtaggagtcatccttgcatgcgtaacagccaggaggccagtatgactggcacagagaagggtttggtgagtggtagaagaggaggccaggtaaacttgagggggacaggcatgggaaatcatgtgggaccttgttggctgttgtaaggatttgaggcatttttgrttagttcttaattcgtacttacaaatgttaaatgagattatgtatgggaaacattagtaatcaggaaagcactctatgaaagctagttacttgtattaaagtattgaaatttttatttttagttagcatatccatagaaacaactttcctttacttcatctaaggtgataagaattttttttctaagcaggaagaatgcttaccatattttattactagcacattttaattttttaaacatgacacttgagcatatataaaatgtagcatatttttaattggggaggtgggggaaaagttgaggaaagattatttgcatggctgaaattaatgaatttattgtttctaacaggaatgtaatgaggaaatcaaaatggatccaagtatgggtgtgaattctgttaccatttctgttgagggtatgacttgcaattcctgtgtttggaccattgagcagcagattggaaaagtgaatggtgtgcatcacattaaggtaagttactctttggaaactgaagtcaaatgccattgaagagaattctactagaaattacttctaacaatgagatagaagcagacacactgacacatttggcaataaaaactattgtacttcttatcttgaagctaaataagttttctttgacccattaattcctctcataaagaaaaaagatatattttcaatttaaaaacatctgaacatggaatcttgatattgtggttgtatatttatagatttatattttataagtatatgagtatttatatactgtttattactctgaatctcatactgaactaaaatgtatgttttcaggggatgggttagggttttctttttcttttataacatggtgattattttgcaattaaaacttgaagggaaaatgtctagagaattactagtatactttggtttttatttttagtttttttttcagacagggtcttgctctgtcacccaggctgcattgcagtggcaaaatcacagctcactgcagcctagatttcccaggctcaagcaatcctcccatctcggcctcccaagtacctaggaccacaggcgtgcaccaccatgctagctaattttttttttttaagatggagttttgctcttgctgcccaggctggagtgcagtggcacgatctcagctcaccacaacctccacctcccggttcaagcaattctcctgcctcagccttccgagtagctgggattacaggcatgcgccatcactcccagctaattttgtatttttagtagagacagggtttctccatgttggtcaggctggtcttgaactcctgacctcaggtgatctgcccacctcagccttccaaactgttgggattacaggcatgagccactgtgcccggctgcatgccagctaattttttaatttattttttgtagcgatgggggtctcactatgttgtccaggctgatctcaaactcctggactcaagtgatcctcccacctgggcctcccagagtgcggggattacaggtgtgagccaccatgcccagccaaaattactagtacaccttgtatgatatgcctaaggaagactctattattggttttttgtttgtttgtttttcagactctagggctttaagttgaagactctattgttgtttaacattacttgagcatcaacagcattctagatatactgtggttaaagatgtagttcaggttataaaaaagccttctgaatactgcatgaagtacctgtggttatcataagaaacttcatgcatatatggcagggattggaaaatggtgatctgcaggccaaacccagtttgccaactgctttcatatggctcataagctaagaatgccttttacatttttacaccattgaaaaaaattaaaaaaatatttaggaacttatgaaaagcacatgaaattcaaatttttgtgtctgtaagtaaagttttagtaatatacagttttattagaacacagccacactcattcatttacgtattgtgtacagcccttttttcactacaagagagttgaatagttgtgacagagcccatacgtggtgtcctcattggtaagtgatacactgccaaatgatttaccacagtggaaataccattttatcttcccaccagcagtgtttgtgttccactttgaaagtgttccattttctccacattccctccaacaatttgtattgtcagtcttttaaattatagacattctaatgggtgtgtaatattacatcactaattctcatttccttaatggctaatgatattgagcatcttttcatgtgtttattaggcatttgtataccttctttggtgaaatgtgtgttaaaccctttggccaaatttttagttgggttttttgttttgttgttattgaatttcttctttttcaaaattgttttggttagtctaggcccttttactttccatataaattttagaatcagtttataagtttctacaaaaatatctgctgggattttcgttgagattgtgttgattctacagatccatttggacagaagtaacatcttaccaatattgagttttccaatccatgcacatagtatatgtctatttatgttggtattctttgatttcttttatcaggaatcaatagttttcagcatgcagtttctgtacatattttgttagatttatatttaagtactttatgtttttgaatgctgttataaatggtactgtttttaaattttaaatttaagtttaatttcaggtgttcattatgaggtttttatatgttgactttgtatcctggaacgtagccaaactgacttatcaaacctattagcttttttgtacatttcttgggattttctatgtaattatgtcatcaaggtatatagtttttttttttttttaagatagtctcactctgtgacccaggctggagtacagtggcacaatgttggctcactgcaacgtccacctcctgggttcaagcaattctcatgcctcagtcacccaagtagctgggattacaggcacatgccaccacacctggctaatttttgtatttttagtagagttggggtttcgccgtgttggccagggtggtcttgaactccagaccttgagtgatccgtccacctcggcctcttaaagtgctgggattgcaggtgtgagccactgcacctggccacatagttttatttattcctttgtagtctgtatatcttttttttttcccttgtattatcaaaccttcattacaattttgattgggagtggtgagagtgaacgatggttgggggaaacattcagtcatttacagttagcattgtgttagttgtagagttttgtaaatactatttatcagattaattaagttatttctattactagtttgctgagggtttttttaaacatcatgaatggatgttgaattttgtcaagtgctttttctgcatatagagatgatcatatggtttttctcctttagtctgttaagatggtgaattacactgattgattttcaaatgttgagccagccatgcattcccagggtaagcctcacttggtccaagaagacttactttccattaaaaatttcaaacatacacaaaggtggagaaactatttttttttattatactttaagttttagggtacatgtgcacattgtgcaggttagttacatatgtatacatgtgccgtgctggtgcgctgcacccactaactcgtcatctagcaactattaatagtacaagaatctaccctatacccatcacctagaaaaatccttgctatttatttgcatgccattctcatcagttgaattttataatgtgttttgctgatgattctaagagttggtccaggccttcctgcctattgtattctgttaaggtagatgtctctgactagtggattggaacttcctagtatatctccataccagttgccatttctaagccttttggccaccccctgccaccacccctgcccgcccctttcccttgtcactcttcgcaattctcagcactaattgtagtgtatataatttcagtactctttcccatgctttatttagtttgtttttgaacatatttttttctcatttctctccaacttgtatctcaggatccaaagaattaacaatatctcatgccaaaagcttgaggattcctactgtattgacaataacatacagaagctttgcttaaatattatgcttactttttttttttttttttttttttttttagatggaatctcactctgtcgcccaggctggagtgcagtggtgccatctcagctcactgcaacctctggctcctgggttcaagcaattatcatgactcagcctcccaagtagctgggactacaggtgcacgtcaccattcctgggtaattttttgtacttttagtagaaacggggtttcaccatgttggccaggctggcctggaactcctgacctcaggtgatccgcccgcctcggcctcccacagtattgggattacaggcatgagccaccacgcccagcctgaattgcttacccttaaacatgtttatttttactgccaggccttaatgagtcagtaatggatatgtcattttagctgagttgtattctcatttgtgtaatatacttatcattttaatgttatcttatcattaaaacaaccttatattggtggtaattctatttgctggaggttctctgtaattttgcttttatgcaatgttcattacagtaatggcgggaagttaatgccactttggaatttgatcagcttgcatcactaccagaatggttttcctatgactagttgagatccacatgcaatacattttttgacatactaccaggagcagatgttaatatcataatgaaagctttgtccaactggacatcagatttagcacaaaattcaaaattagggacaagatggattctttctaattatcagaagctcatcatatttttaagggcgtgaatgattacattggaactagaatattttgtgtctccagatcagatacttgtgagagctctactttttaactattcttgatctaaacattaacttttaccatttatttttcagaggtttcaaaatggttttggctctttagtgaaatacagaatttatactttatctctgcagtattcttacctaaaattctgatttattataagatcttgagtagattggtttcagtttgccttgtttttattacccaaaattggctaattagcccatcattactctctatgaagtctgatacatttccttaattcaagagtcctatgaagtgtggtgctaatatgtggacaattcttctcttcctaatctgaaactgtaggtgattttttccatgtctaagttttatagtcatcttggccagagagtaaactttggatccatattactatttgtatgagggaaaaagcagtatttcttgtttgttgactctacactctgattagctaagactatgttgatagctgtggctagaaaagttttatttacatagcatatattccttctcctaagttttctgtactgttgacatccatgtgactacttagatatgaactttccattttcacatgctccaaaggtagattttttttttcttgtattcaccatctaccttggcgtaattccagtcttagaggctcccacattgcttcttcccggcaacatccccgaacagggatacggttgcctttaatgatctttggggaaagagccaagttggaaaagctgagagatgacaggtaattattttacgtatttatcttcaaaatattcaaatttatataaaaatattttcccctaatcatatctatgcaaaagttaggcatattttgcagtttgttgattagtaaagagaatagtaaaagtagctctgcaaactcaatgctaatgctttaaaaatgagttgcttaatttcactgagtaataagtatgacacatgaatttgatttatcctcagatgaaactaattaaacctcctccacttgatctgaggtggggctggtgttgagggccagaacagaagctgaaccttactaattatatagtagtgtctgtgctaattgcagtaaagctgttttaaccatttggaaactagttcatgtaattttttgccaaatgacttaggtacttattgtccactgacagctaaagtattttccaaaaccctcaactctctgtctagcaaactattgtaggtgaatatttgtctctgccaacatatccatgtataactataaaactagattctgctttgatgtttgcaaatacattcttgcttcccaaaacagcctgtttgcatcacactcatatgtaagatggctatttccgctgcatcttcccaaagttcaccactgcttaataaggtctgtttaaggtcaaacaaatgcaattgaattttgattacactgaaaatgaagaatagcagcaatataatgtgaaagcactttgtgttgtcaacagtgatttatacaaattccagtgacagatactcaagactactttccagggcacattcataatttgattgctaaaaataaaagaaaacacacttgttctgcctttttcagctctgcttctcctctttcagtcaaaagcccttatgttagtaacctttattcttttttaaaaaaatattttactaagtgtgaagtgttctggggccagagagagattttctgtgaagttaatgaagcttaagtttcagagctcctcatttgcagtgaccttcttctaagactctggaaggagtatcagcaatgtgtttatatggtcatgtgtttttgtacaatttgaaaaattaaaaaaaaatttaaccacaacccttcaaggccattgtccatttctacttcaatgactcttctgttagacctcccctttgtgttagtgtgatattggaatggccatgagctttttggggatgtgactaaggggaggttgagttggggatatgtttagtttggggttagtaggctatttggctataggtggttctttgtcacttctgtgtatagtggagtttttgctaggaattctgatatagggatggcttcttggaacacccctactactcatggggccaactcactaagcatcatgacatgaagatgcagggctcagtgtaaaactggtaaatgaatgttaccagttcaaagaatatgtaagattagtcacttcacaagtaaatttgaaatgccctgaaatcttacagctcatatatgaaagaaactcaacagttttctcaaatttgacagtagctttaaaaatgtatcaatgcctagttgttatgttgaaaggaacttttctaaactatcattaattttaaaaatttttatctagagaaaagactgaactatttttattttctttatatacaagtgattttataaagtcgtcaaatgaagcactaaagaatatacagccaaaaacataggaaaagaaactatcagagaggtatatcaggcattattaataaaaatgttattgttatggatttttatgatatttgttagctttaaaaatttataacttgtgatttaaatttttttaaattttattttgagacggaatcttgctctgtcatctgtactggaatgcgatggtgcgatctcggctcactgcaaccttcgcctcctgggttcaagtgattctcctgtctcagcctcccgagtagctggcattacaggcacgtggcatcatgcccggctaatttttgtatttttagtagagacagggtttcaccatgttggccaggctagtttcaaactcctgacctcagatgatccgccccccttcaccttccaaagtgctgggattacaggtgtgagccactgcacccggccatataacttatgatttttgttatgcgctcagaatattttcttttgtacaaaattttgtgtttatggttttttattcctttttttaaagaaggcccttcaaattgtttaagtttcagacaccacaaagtgtgaattcacctctttctagacatcatatagaaagctgtctttgcccaaacataatttatagtcagaatgtagttcaacatgatcatacataaatattgattactttttaaagaatgttaaagcttaaaatttctgcaaataattaatgggaactaggcttaatacctgggtgacagaataatctgtacaacaaacccctatgacacaagtttacctatatcacaaacctgcacatatacccctgaacttaaaagaaaagttaaaaaagaaatgtacacaaaaaagaatatttctgaatcataacttctaggattataattaagcctcaggtgcagttaatttagaaatcagatttggggagaagagtgtttcaactaagtcaaggagctcttggtagtgtttggaatgaagtaatataattgtgatattaaattgagtaaagttgttttattggaaaatgcaacagcagaacagattaattaacagaattcaaaaagagtgaatagtcaggaaatctctaattttggaataaatagaatatgactatttgcctttgcaactttagaatttaaatgcattttgggaattgtgtcctaagttatacagtaaataaatgtaattttcttgtttgtactgccagtgttaagactgtagactttaaagggattaacctgaagtttaatttaatcaccctggtggtctgttcaaaggaaaagtaaaataggcagataatgtgaagatctttctccggggttgtttggcctttttgaaagtggaagtataaaaacaaatttaattagatataagtactgaatgattccaaaggttaatgccttattaacaaattagtttgtccctgaaacttacaacactaactttttgagtgcttttcctttttaattagataaaggctatagtccattctcttaatagagactatcctttagaaaaatgaccacctcacggatcacgaggtcaggagttcgagaccagcctgaccaacatggtgaaaccctgtctgtacttgaaatacaaaaattagttgggcgtggtgtcgcgcacctgtaatcccagctactcaagaggccaaggcagaattgcttgaaccctggaggtggaggttgcagtgagccgagttcatgccactgcactccagcctgggcaacagagcgagactccaactcaaaaagtaaataaataaaataaaataaaaatgaccacatcaatgctagcagttactaaattcctcctttggatcaataaatacattccttactccccttacaattaattggtgtttttattattgaaaaagtaacacatacacagagtaaaattcctctcccaaggaaaaccagttgtcctatgtatatgtatccttccagaaagactattaatataaaacttttttttaaattattttttgagatggagtctcgctcttgtcacccaggctggagtgcagtggtgcgatctcggctcactgcaacctccgccacccgggttcaactgattctcctgcctcagcctcctgagtagctgggattacaggtgcctgtcaccatgcctggctaatttttgtacttttagtagagacgagttttgccatgttggccaggctggtctcgaactcctgaactcaggtgatccgcctgcctcggccttccaaagtgctgggcttacaggcatgagccaccgtgcccagccaaagctatttacatgtacataagtatatatacttgatgtgtgtgtgtccactttttctaaaaatggaagcatactatgcacatcattctgcaccttgcttttttttaaattagcaaatatatcttagatattgttccacatcaatatacagagccccatctaatatttttctttctatatgggactctttttttggcttcttagctttttctggcaaatgacagtgcattgaatattctgtttttcaaactggtgctctgtcaccaatactatattagagtaacataggcatttttattattataaattagtaggtaataatcatttatccatgaagatgtcgagtcagcttcaaagaggattaggtttctgatttagctgaactctattctgaggaccaaaggaaggtcaaatccaagataaaaaatttagcagtgaaggaatggtgtaaagagggactttcactatttcttttgtatatttttgtgtttaaatttttatagcgaacaatcatacatttgtcatataatgtttgaagcaaagtgaaaatacattagaaatggccaggcatagtggttcatgctgtaatcccagtactttgggaggccaaggtgggaggattgcttgagaccaggagtttgagaacagcttgggcaacatagcaagaccttgtcttttaaaaagaaagagagaaagagagagagagaatgagaatatattagaaatgagaattctgacaaagtactcagtttaaagatggtttagttcatgaaaaacaatgctacaatgtaataaaaactaacagaatgtctgcatctttttcatcttaaaacatttgatttttgaatttttagattgattttggactattatttagtgtctaaggattgtctttttctagtttataatctgatataatagttttaaagtgataacctttatttaggttactcaaataggataaatgttcatggagcttgatggcttcctcttacaatattttaattttcaatattctatattgaagcatcaaatagagtgttaccctattaatgtaaatacattatatttttcagcaaaccataatggaatttgtattgagactgtatgtattataagtgatgatctttttgtatattataaataatttttagttgattcaaaaatatattatgggtggtgaatcaaacatattagaaattcaggataattgattaatcatgtcacttttctgacttcagtctccacatctgtaaaataacagaatcctttcaagctgtgaaaaatctcttataacctttatgttgagttgttatatgaaaatgtaagaaagtaagctttaaactgtctgaagattcccacactgagcagcatgctaacctgaatttattatgatcatatataaattgattcctgggggataaaaaggaatttcaatgtgctaaaacttgagctaagttattttcccatagtgacttttaaaaatgtggaaatattagaatgttctgattgtcagttctgttaaaaactcaaatgtgttttaaaatcatttcaaatttaaactagcatgggagaatatgtgaaatgtgagaggaaaaaacaaacaattaaaatttggttcaaacactagaaatattgtatacttttcagattatttataagccataaattgctcaaatcataggcatagaattttagttttccaaggaaattgtagattatttagcataatcatttatagatgtaaagagtgtagactttggagttacatacacctgcatttgaatcctagctctttcattttcttgttgggttccttgggcaatttattcaatttcctggccttcatataggaacctggatcacctttgtcttagtctgttcaggcagctataagaaaataccataaagtgggtggcttataaacaacagaaatgtatttctcacaattctggaagctgggaagtccaaaatcaaggtgctggcaaatttgatgtctggtgaggattgacttcctggttcatgtattgcgccttctccctgtgtcctcacatggtggaagggacagggtagctctctgggacctcttttataagggcacaaatcccaatcttgaggactctgtcttcattacctaatcacctctcaaaggccccctgccaatattattaccttgggaattagcatttcagcacatgaatttttgagggacctttccctatcaaataagaaagaatacagaagagaaaacatgtactgatgacaacctaagaagtggtagtaacatagttttttagcttatatagaaagttagaactgaaaagattattttatctagtctctcaggaaactgaagccctcagaggtagggtaatttgtttaaggttctagctttcatattgcctaagaatagaagatgcagtctttgtgggtttatgcaaattatacagaaatcatatgcaaataaagtatactgtgcctgaatttcatgtttgacatttcaagagacacagaacaccacaaaaattaaaagaatcgatctttacaatctctgtgacagtcagcactctacaccaccattaatactatgaaggccacagagtacgtttggtatattttccttttttctctcccactactgccttcatcaaaatacagtgaatagtcctccatcttcagtctttcctatgagctatatttataatttgtaggctgttacatttattttcagaggaacttttttttttttccgagacggagtttcactctcttgtccaggctggagtgcagtggcacgacctccgcctcccgggttcaagcgattcttgtgcctcagcctcttgagtagctgggattacaggcgcccgccaccatgcccagataatttttacatttttagtagagacggggtttcaccatgttggccaggctggtctcgaactcctggccttaagtgatacacccacctcggcctcccaaagtgctgggattacaggcatgagccaccactccggcccagaggaacgattgatataatggaaaaatagttcctctgaaaataaaaataacaacattggttcctaataaaagattaagagaaaaagacaagctgtcgaaatattggagcaatgtggggaatgaggaaggtggggtagggcagagaagggaagttatttttggagcaggggttggggttagaggacatatgaaaggagagcagcacagacccggaatcagactgccgccagcactttccagctctatggagtctgcctggttttgctcatcactgtatctctagcagctagcatagtgccgggcacataatggacattcaataaatatttgttgaatacataagtacctttttttttttttgaggcgaagtcttgttttgccgcccagcctggagtgcagtggtgcaatgtcggctcactgcaacctccacctcccgaggttcttcaagtgattcttcaagtggttcttcaagtggttcttcaagtgattctcctgcctcagcctcccgagtagctgggattacaggcacccaccaccacggccagctaatttttgtatttttggtagagacgggttttcctgcattggctaggctggcctcaaactgtgacctcaagtgatccgcacacctcagcctcccaaagtgctgggattacaggtgtgagccaccacgcccagccaataagtaccattttgacttcctgcccaaagatttagcacccagagctgtactgtgaatttgtttcctttgagaccttaggtttgaaaagtctctttgctatctaacattcagaggcaaagttgagtgctgttaccccaaagagggatacttttgtttgtgctgagtgtggttggtcagcttttaaaacagaaatagaatttactaaaggaagtgttttctcatctgcagcatgcaaatagcgtagggtactttgacttctcttttgtgtagtattttatgcatagttttcttatgccttttataaataaaagataggctaaagcagttagaaagtatagcaaaccatccagtgacaaagtgatttttttttttgagacagtgtcactctgtcacccaggctggagtgcagtggcacgactttggctcactgcagccttgaccttcaggctcaggcaatcctcccacctcagccccttgagcagctgggactacaggagtgtgtcaccatgcctgggtaatttttgtattttttgtggagacagggttccaccatgttgcccagactggtctggaattcctgagctcaagctatctgcccaaccacctcagcatcccaaagtgctaggattacaggcgtgtgccacctggcctgaggaagtgatttttgcttttaaaatgagaacaatttctgattggctatgttggtaaattgacatttttggggggggtgggtgcgggggaaccaggtcttgtttaagatgtaccggatacaacgtatttaaagggcaagaatcctttacgttggtactttatcagaaaaagtatagtagtacctagagcaataccacccaagaatggtctgtgatgatggaaatactgtgtatccgccctgtctggtaggactaaccacattggccaatgaacacttgaaatgtggctagtgcaaccgaggaactgaatttttaatcttatttaatagttttttttgttttaaaaaataatcatctagtaaaatagactttttttgggtatatagttctatgaaatttttttttagttttgtgaatgttaacacatgtatagatttgtttaacaccaacacaaccaggacatagcgcagccctgttacccctaaaaaactccctcttgctaccattttccctacctctaacccctggaaaccactgttctgttctccatcttcccctttagttggaaagtttaaattatttacagtcattttcttaaccctaaaatcacctcaggggagggaaattaaagtttaaaagaggccttctttaaaaacacaaggacacaaaagccttcatttgatggtggctactcttatattgcatgtctttcaatactatatgtctcaactatacgtggtttgactattctgcatttttttttcatggaaaatgttatatagtattatccaaaaccaaatataatttatttccccacttctgttttggatcatttatgctagtgatttcctccatccctaagaaccagctagccaactagaattatcagagtcttagaaactttccatgccatgggtacatttcacattttcacccaaatacacagtcatcaattatcaagctaaaggaagaaataaaaatatgttcattaaaataagtgaaagatttaactattgtagacaatttaaagagagattttctatgctgaattacttttaattataattttgagtttttattttatagagcaaagcttttcactagaaattaataacacctatatttaactgcttttttgaatattaatatcctatggccatctcaaaaatcaataggtccagcactgaatttatcatctctcctttccctccactttaacctcttaatttcctcctgatttcctcctctctttctgatatcagttaatgacgccaccatctatctatccactggcccaagccagatacctttaagtcatcctagtcgtctcctttatcctatacatcttgttaggaggccctaccctcctgaatgtatcttggagctgcctcttttatctttgcccccagtattcatgtcttaattcagaccctctattgcactacttttgcaattgcagtagcctcctagctgatagtcctccctcctgtatcactccaccctactacactatcatcttccacactgcctccagaatgatccttctctaaaatgaaaatctaatcacataattctctgcttaacttttccatggcttcctattacctataggataaatcacaaccattattggcatatagaaccccataatagagcagttgcctaattttcaagcctcttatctttctctacttttttgtttccattcatctggaattctctgcctcatatatccttgctgattcctgtttgtcctttaacattcaggtattatctctcctaagaatacttttctgacccatattcccagggatgaatgggtatcccttttctgtattctctgtcctattgttcctgtgacatgttcagctttgtatcctgagaatcccagttcctgacgcacataataagtgctcaataaatattagttgctcaatgtttaattttatataattcactgctgttacgaagaactttcctatttactcgtatgatccttgtaatagccctggaagataatagggcatattttctcatttttcagatggtagaactaatgggtgtggttagctaataagtggagaattgatgctggaacttaaatcttctgactcccaacccagtatttgtgtgtgtgtgtgtgtgtgtgtgtgtgtgtgtgtgtgtgtgtcttcatcatgaatctttgtaagatgtcagccaaagagatgcaatcatgacagtagttaaattatatgcagtaactaagctacaagaatataatcattgttttataatctaattgggcaaaacaataaagatgttcttattttgaacaaaattaatagtatgctctagtgacttagggggatataggagtatatgctataaaatcctatgaatactgccttcactcataaaccggcaggcttatacttttcttgccaacaaagttatcctaattgaacattatttttatttttttaaattgacatataatagttatacatatttttaggaaattggacattttaaaatattaaacttcatattaccttttatttttctgtagctgatcctgtttcatgtataaccttttcagttggtagagtgtgaagtgttggagtaatttatgaaaggaatggaaggaaagagtagtttgtactctgttgtgaaattcttgggtgtgtttgtcaatatacatgtttcaaatgcctgataggtaccacagtcacatatgtctgcatatataactttaccattcttgtaggtacacaagacattttatgtttctttctaacaagaagagtaaaaatgaaaactaatagggaaactccattagattgagttgtctcactcttcttgaatgtggtgtgatgattattattttaaatcctgtgtgatagaatttaattaaactgacttttggaatttccttccaaaaggtatcactggaagaaaaaaatgcaactattatttatgaccctaaactacagactccaaagaccctacaggaagctattgatgacatgggctttgatgctgttatccataatcctgaccctctccctgttttaactgacaccttgtttctgactgttacggcgtcactgactttgccatgggaccatatccaaagcacattgctgaaraccaagggtgtgacagacattaaaatttaccctcagaaaagaactgtagcagtgacaataatcccttctatagtgaatgccaatcagataaaagagstggttccagaactcagtttagatactgggacactggagaaaaagtcaggagcttgtgaagatcatagtatggctyaagctggtgaagtcgtgctgaagatgaaagtggaagggatgacctgccattcatgtactagcactattgaaggaaaaattgggaaactgcaaggtgttcagcgaattaaaggtaatgtgtctggtgttgattgttttgtaaggcttaggtgtctgttttgatcttttaactttttgctttcttcttaagcatgagttttgaatccatgagactagagtgcttgctgtatcattgaggtacagcatattcccaggattaaaagttaatgattataattaaaggttacataaaccttgaactgaagaaaaggcagctgggttggcaattcatggaattcaaggttcttaacacaacatgactagggtactctttacctctaatatattttacttaggcatggagaaacttggagaccatagctacagtggtcatatctcttacttgtttctagtctatgccaataacattttctgaaaagaaaaaaaattaagaaaatatgatgacaagaatgagagagaaacaattatttgtggttattgatttagaaaacagaatgttttctgaagtagcccaggaataactgaattaattatatttctttttattaactagtctccctggacaatcaagaagctactattgtttatcaacctcatcttatctcagtagaggaaatgaaaaagcagattgaagctatgggctttccagcatttgtcaaaaagcagcccaagtacctcaaattgggagctattgatgtagaacgtctaaagaacacaccagttaaatcctcagaagggtcacagcaaaggagtccatcatataccaatgattcaacagccactttcatcattgatggcatgcattgtaaatcatgtgtgtcaaatattgaaagtactttatctgcactccaatatgtaagcagcatagtagtttctttagagaataggtctgccattgtgaagtataatgcaagctcagtcactccagaatccctgagaaaagcaatagaggctgtatcaccggggctatatagagttagtatcacaagtgaagttgagagtacctcaaactctccctccagctcatctcttcagaagattcctttgaatgtagttagccagcctctgacacaagaaactgtgataaacattgatggcatgacttgtaattcctgtgtgcagtctattgagggtgtcatatcaaaaaagccaggtgtaaaatccataygagtctcccttgcaaatagcaatgggactgttgagtatgatcctctactaacctctccagaaacgttgagaggagcaatagaagacatgggatttgatgctaccttgtcaggtaattatcattttttctttgattaccctaatgttcttttacttccattttgctgcttcttttggcatttatcaatgagaaatgattcataggcactgtaattccacttttgcaaatatgtcctatggaggtagccagcagtatatacaaagatgcataaggatgtttgtataattgcttatgatatttaaaaactggaaacaataactcgtggtgcaacaataaataactcatgatgaaatgctatgaagtcataaaacattatggtattaaagataattaatgccacaggaaggtgtctgaggtattttgttaaatgaaaaaaagctgaaaagctatatatacaatgtgatcaaaattttataaagaaatgtatctgaatttacgccatgtatatattgtttatgtatatgaataagattcctggtaggatatgaaccaaaattttaacagtgattatctttgggtggtaggataaatgtgatttttgtttccattgtgtttcctggttttataagttgtttttacaataagaatgtatgtatgtagctatgtatttatataatgggggaagccagtgctcttttaaaaacaaaagtagttgaaataaataataggattttaactataattttatatttaggcattcaaattaaactgactccagagctgtcccaaagttttcgtatttcctgacagctcttacctttgaactgaaacaaaaaatgtatattcaatggaatttaattatgtgaaattgttcttttgaaccagaattgaacctggccttgaattaaactggaaaatgcccaaatgaaattttttgcttgaaataacaattgaaacgttttacaaccaatttctggacaatataattaatctttgctatcctgattagaatgaaagatatcaaatagtagtattccctttttaggctcactaaatctgagtaaaaaattttactaaacacatgtctaaattgttatggtagattaatgtcagtgagagaggacttagagacataccattattaatttttagttcttaatttttctgttggtgacaaatggtagaaattatagaattctcactttttaaaattgacacatagttcacataccataaaatttgcccatttaaggtacacaacccagtggttgttagtatacttacagagttttccagccatcatcactatataattttagaactttttatcactcccaaaagaaatcacatatccattagcagtcattgcccatttctccttcccctccccaagctcctgataacaactgttctactttctgtctctgaatttgactattctagggacatcatttaagtggaatcatacaacatttgtccttttgtgcctgaattattttatttagcataatgttttcaaggtccatccatgttgtagtatgtattagaacatcattcctttttattgctgaatattattccattgtatggatatatcacatttttgttttttcattcaacagttgatgggaatttggattgtctccactctcttgcctattatgtataacactgctatgaacaatttgagttcaaatttttgtatgaacatatgtttttatttctcctgggtatatatctaggagtggaattgctgggtcacatggcagctaaactttttgagggactgccagactgtttttcaaagtagctgttccattttacattaccatctcaaattctcactctaatgtagaaaatctcaattttttgagatttttaaattagaatctggcctggtacggtagctcacaactgtaatcctagcacttttggaggctgaggcaggcagaccacttgaccccagaagttcgagaccagccttggtaacatgatgaaaccccgtccctacaaaaaatacaaaacatcagctgggcatggtgacacacacctgtagtcccagctactcagcgggctaaggtgggaggattgcttaagcccggaagtcaaggctgcagtgagccgtgatcgtgtcactgtactccagcctgggtaacagaacaagaccctgtctttaaaaaaatagattttagattagaatctaatctaaaaaattagattcttttttttttttttgagacggaatcttgttctgtcacccaggctagagtgcagtggcatgatctcagctcactgcaaccttggcctcccaggttcagacaattctcctgcctcagcctcctgagtagctgggattacaggcgcctgacaccatgcctggctaatttttgtatttttagtagagatggggtttcaccattttggtcaggctggtcttgaactcctgacctcgtgatccaccggcctttgcttcccaaagtgttgggattacaggcgtgagccaccatgcctggcctttagattcttttgctctaaaaaagagatacatagttctctattagaaaattcatacagaacactaaaatgttaaagggactctagtaccaaaagtctgaacgaagtgtaggaaatccataattgctgaaggaaataattatgaaaccagaagaaaaatttaagttggaaataagtgcagttatatcagggagccataaaaatgactaaaattggtttcagcaaaatttcattttacctatcaccacttaattttttttttctttttgagatggagtcttgctctttcacccaggctgaagtgcaatggcatgatctcggctcactgcaacctctgtgccccgggttcaagcaattctcctgcctcagcctcctgagtagctgggattacaggtgcacgccaccatgcccagctaatttttttgtatttttagtagagacagggtttcaccatgttggtcacgctggtcttgaactcctgacctcaggtgatctgcccgcctcggcctcccagaatgctgggattacaggcgtgagccactgtacctggcccacttacatttttttaaatttttgaaaatgacagtgtttgaaattatattgattcacatttcactacttcataatgttggattatttctcagagcttctattaaattaaaatactttgatatgcataatggattatgttgtcaataatgagcaccacataaattagttatatcagtatcaccaaaacaagttacttacattataatattcctatgcctcttacatataggaacacaattataatcatcttacatcacatatggtataaaactgaaatatttttcatgttcaaatgtggtatctgtcattacagtaagcaagggcatcataaactttcagattggattcaaaaacagaatttttttctattcacttgggtttatatttttgcaactcacatttttgcaagtgtggttcacagaccagcagcacctaggaccttgttagaaatcagactctggcccactgcagacccagtaaatcaaattctacattttaattttaatgagctctccaggtaatccatttgcacattaaagtttgagaacactgatctacataatgtgattcattgacctttaaattctaaattaaatctacattaactttgtttacataaacaagtccagaaatttgattgaaggcaataatatcagtcataacaacatttcgatcaacaatggaccacatagacgatggtggtcccgtaagattataatggagcatatatagaaacctcatataaggcatttgatattggcatagcagatcaagtaggagaaatgattgatattcattaatggtgctaggacatttggtgttccatctgaaaaaatatatataaatacaaatataaagagcatctagttttgtgtaagtacactctatgatgttcacacaatgatgaaattgcctaaagcatttttcagaacatatttccatcgtttaagtgactcatgactgtataatattaaatattataatttaaaatagctagcatttttttaggagaaaagccatataaatttatttgatcatagttttacatgacatgggagccttcagaatgaagacccaaagatacaggagaaactgcccatttttgtgcttagatttagcacaatatggatagctaaaatagctagcattttattattattattattattggagacagagttgcactctgttgcccaggctggagtgcaatggcgcaatctcggctcactgtaacctctgcctcccgggttcaagcaattctcctgcatcagcctcctgagttgctaggattacaggcgcatgccaccatgcccggctaatttttgtatttttagtagagacagggtttcgccttgttggccaggctggtcttgaactcctgacctcaggtgatctgcctgcctcagccttccaaaatgctaggattacaggtgtgagccacagtgcccagccaaaaaagctagcattttatgaaggtttatataacaaatgtgagcagagtaaaagcaacttttcaattaccttagctgatcaaactagtaaatggaattcaagagtacttgatcagtctctggcaccatgtatagcatctacctagtccttaggaactatgactgcagcaagttcagtaacttttttttttttgagacacaatctcgctctgttgcccaggccggagtgcagtggcacgatcacagctcactgcagccttaatttccggggcttaagcgatcttcccacctcagcctcctgagtggctgggactataggcgtgtaccaccacacccggctaatttttttctattttttgtagagatggagtctcagtttgttgcctaggctggtctcaaactcctgggctcaagcagtccacccaccttggcctcccaaagtgctgggattacatgtttgagccaccatgcctggcctcagtaacttttaacaatgtcttttacctcaacctactattgttaagggccccgggaatcaattattcaacaaatgattatcaggagccagttatatgccctgcatctgttagggcttataacatacatactaatggccatgatgggtaggtaaaaaaccttggcatagtgaatgtcaccataaaagaattgatagagcttaactacagtgacccatattatcgggacatgaagtgactgcattctgtgattctgctagagattagagtttaagatttcaccagaattgtaactacccattttttaagtgtaagtgtcagtgctgatccaggtctcacagcctacttctgccacccattctcagacagaaggattgacacattttgcctttgtatcatactagtcctaggtgagctataaatcttaaaagaggtagtgagaagccagacgcagtggcttacgcctgtaatcccacgactttgggaggccgaggcaggtggatcacctgaggtcaggagttcgagaccagcctggccaacatggtgaaaccctgtctctattaaatatacaaaaaaaattagccgggcgtggtggtgggcgcctgtaatcccagctactcggaaggctgaggcaggagaaacgcttgaacgtgggaggcgaaggttgcagtgagccgagattgcgccactgcactgcagctgggtgacaagagcgagactccatctcaaaaaaaaaaaaaaaaaaaaagaggtagtgagaaaaatgggagatgccttttatcctgactatctgtattatcgtttccttaaagtaaaaaggcatgatatatgaagtaatcactaaccaattaaagcaatctaaatacttgattaaattccttccattttgtgactttttatttttgtttgtttgtttgttttgcgaaggagtcttgctctgtcgcccaggctggagtgcagtggcacaatcttggctcactgcaacctccgcctcccgggttcaagcgattctcctgtctcagcctcccaagtagctgggataacaggctcacgccaccatgcccggctaatttttgtattttttttagtagagacggggtttcaccatgttggccaggctggtctccatctcctgatcttgtgatccacccgcctcggcctccccaagtgctgggattacaggcgtgagccaccgygcccagccgtgactttttatttttaactaatttcaagcttacaaaaaaactgcaagaaatagtagagaattcctgtttaccaatttcatgcaggttccacagttaatattttacatcgtttatcattctctcttaatagatagatatacatttatatatatatatacacacacacatacatacatttttttctgaactatttgagagtaagctgcagacatgatgtttatgattattttaaagccatttttagattatttatgtattcttcacactacaccagaggctgaacttcacatcggttttgagtatcagactggaaattctttcttgaaatatttggaatcatttgtagttgttgcctcaagtgcaggaaaatcaattttcctttgaatttatttaaaagtttaagtagtgttgttacagcctgtagaaaaattaaaattaaaattaaaaaattaaaattcattgtgaccttttcacacccttactgtctctgtggaggatgaagaaggctttgctcttttgcttgccacactcacagagctaaaggatacaattttatggatctttatttagaggtcatgctaaggtagctaaaagggactacctcttatgacttattttaatataatactgtatttccagagtgtgaaaattacagatggtattccaggttacctctggtacctaaaataacgaaattgctctggaacaacaggtaaagtgatgaacagaaaaaactttttttttcattgtccaagttcataattaagtctcaatagtaattatgagagaatgaaggaaccttctggttggattaaaatggtggttttattcaaaaccaaagtgattttttttttggctactcagcctcctttttgtttttctttggtttttaaaaaagcataacagcagtactatttggtaaatttcacagtctgtgttctaaataaagttctcacaatctgaatcagtatctttctgaagtgattcaattaagaccagagacaggctaattaaggaacactttactattcaaagtgtcctttgctggaatcatccaaaatccaaacctcagtgtcatgtggtgttcccatgtgacagacttgtacacgtacctcctgaatctaaaataaaagttgaaattatttttttaaagtgtcctttgctatactcagacctaggctggcagcactgccatcaactcagagcttggtggaaatgcagaatctcagaccctaccttagatgtattgagtcagaacctgcattttaacaagctcccccaggtgattgtgtatgcattcagatttaagaggcattaatatacttatttgagaagtctacattattctgtagggaagtggtcaggcttttgttaaagtttcttccaaacttgctcatcttcaacatcctgaaaaccagctcttctgtgcaggggttcctttgtctgctagctaaatagacatgagctggtattttgtccaaggacaagaatgaacaaattagatagactagtggaaatttgctcttttcttccttttctctacaggggaggagaaaatctttggcttttttttttttcaggtgcagggatgtgttagaataatttctcctttcttgggaggtaactaatactgcagtggataaactaaaacaaaatagcagaatttcagagacttcaggggagcttctgggatgatatgagcttccacagtccataaagattctctgaatactccattgtgcaaaatagactttttgctgacttattccttgcctcttcttccactgtccacagacatattaaaatttaaaaatattatatatgtatgttaaaaattcaaacaatatagaagtatagatagaggaaatttattcatctgtctgtcattctattcctgccttaaccctattccccagaagtagccactgttaatagtttggtatgtaacccccccgcccagctttcttatgcatgttctcatctatgcatacactaaaattaaaaaaaaaaatcagcacactgcaatgctgttttgcaaattgctttttgttccacttaatatactgtgaattgctttgatgccagtatgccaatcatcaacatgatggtaaaatttcattataaaaataagaactatccattaacaaactactctgtctctcagattgggagtagagataatggctagaagaaaaaaagttttgtttattcaggtagctcagattttcctgggaattgggatgggaagtattgaaattggaagtcactgcggaggaaagtgtagagataacttaatgctaacggatagtaggaacttgctcgttttaaaggaatagattgtcagtgcctggaggtatggattgtgatgcaaggcaaggatgcaattgaatgatcaatactgcaaatgaaaagaatctttccctttctaccagacacgaatgagccgttggtagtaatagctcagccttcatcggaaatgccgcttytgacttcaactaatgaattttatactaaagggatgacaccagttcaagacaaggaggaaggaaagaattmatctaagtgttacatacaggtcactggcatgacttgcgcttcctgtgtagcaaacattgaacggaatttaaggcgggaagaaggtgagacactcttgaagcttgttattttatgtgctagtttgggagctccatcttttttgttctcttacatgttttgtaactatgttatgattcttggtaaggcctcataaagattttcagtaatgtgtgggacaaccccgatgtcctggaagccttagtgttttgctgccttagataaagttcctctcttgtttacctcatgatcacatttgtatatctatgaaattcgttaaaaaaaaatagcagaaagaaatacacgagattactattttttatagatcaatcatggttgtgttggattttaaggaacataattttttttttttttttgagaccgagtcttgctctgtcgcccaggctggagtggagtggcgcgatctcggctcactgcaacctctgcctcctgggttcaagcgatccttctgcctcagcctcccaagtagatgggactacaggcatgcaccaccacgcccagctaatttttgtatttttagtagagatggggtttcaccatgttggccaggctgatctcaaactcctggcatcaggtgatccacccaccttggcctcccaaagtgccaggattacaggcgtgagccaccacacacggcccataaattttcttctaaagctatgcctaaaactgacaaatagaatatttaagaatttcattattactatacccagaccaagcaccagaccaaaaacaagtttgtttagaattatatttttctctttgcttgtggtaaaaatgttcacaagttacttaatattgtatacaagtgttaattttaggttacacaatcttagaaaatgtataccacagttttttaaattcagtcacactcagatgttttagcttattaatttgcactcatatttatagacttcccagtatagcacagtagatttgttaaccataaagatatgtgatgatggccaggcacggtgactcacacctgtaatcccagcactttgggaggccgaggtgggcggatcgcctgaggtcaggagttcaagaccagccgggccaacatggtgaaaccccatctctactaaaaatacaaaaattagctgggtgtagtggcgcatgcctggagtcccagctacttgggaggctgaggcaggagaatctcttgaacctgagaggcggaggttgcagtgagctgagatcgtgccagccactgcactccagcctgtgcaacagggcaagactccatctccaaaaaaaaaaaaaaaaagatatgtgatgaggtttcatgagatcaaagtcataaatttggtactttggctgccctacccctaggtgtcttaatgatacatatggttagtcacagagctaaataaagaagtatggactagtataagcttatccccaccattgagaaaattactcaaaatgtatgtagtaatcacctcacctcatatattaagggcagaacattattataataaaatgtatggtatacggagtcatcttcagttcaatattaccttgtctgcattctatgatttctgcttcagtttagcctccattatttctaactggaatgcactcaaggctaaagcttctattattctttttttagattaattaaaaaagaaaaggagggaggttgccaagcaaatgaaaatgaaaagaagcattcaaggtttctatttaatttaagaaccaactattttggggcaattcagaaatagctttcttcatgagacaagcaatgcctatgccagttacaattttttttaagtctgttaagctgatttttccaattacttccatattatcccctttacaacctcttagcccagttagaaataactttagcctagctggagtcactacattcattttgtttttaactaagtagcattggtcttctctcaatttagtctgcaacatacatatatatttatatatattttataatatatgttatatataaatatataaatgtatattaatataatatataaatatatatgtaatttatattttgagacaaatcgcactctgttgcccaggctggagtgcagtaggaccatctcagctcactgcagcgtctacctcctgggttcaagcgattttcctgccttagcctccctagtagctgggactacaggtgtatgccaccatgcctggctaatttttgtatttttagtagagacagagtttcaccatgttggccaggctggtcttgaactcctgacctcaagtgatccacccatctgagcctcccaaagtgctaggattacaggcatgggccaccacacctggccctgcgttatatttttaaaaaatgaacagaaagagttcttattatagtttgaagagtttttttaaattatctgcaatttacataagtattgaacttatgtttttgacatttgaaaaatcaaattttcccttctatttctgtttgcccatagattacattcagctgaagcaaaaagattttttcctactttctctatacctttcctatattactgacactttcccattaactgatcacctgaattgtttgataccaacaaagcccaaaatgtaagcactttatatagaaaaattagattatattaggtattttttctttttttcactgtgtatacgtttatctacttttttaatttttaatttttgtgagtatataataggtatatatatttataggttacatgagatgttttgatacaaacatgcaatgcataataatcacatcatggaaaatggggtatccatctcttcaagcatttatccttgtgttataaacaattcaattatattctgttacttttaaatgtacaattaaattatgattgactatagtcacactgttgtgccatcaaatactaggtcctattcattctttttatttgtacccattaaccatccccacttccccttacaacccccactatcctgtttacttatttaaagctattaaattaatatttaatcattttttctttttttatcaaacctcagacttgacctatggactgttgatccccattccctgtcaggtagccatcaaatgccacagaatcctagaaagaacttctatttttgctatgtagaattaattttcttcctggcaatgacagcaatagctggcctagaaaagtggaatggttgttaaaaaaaaaaaggtttgcactagtgaacagcatgactgccataaaatgaactcctttttttggttaacaagttgcgtgggactttttttctaggaataagagctttttagattactgtgtgccagacactaaaacctgataatttaaataaatgactattatttgataatattataatgtgtatgttggtatattattggattctttgctacaattatgatttcataagtgcatgagttcctttctctatttttttttttttgagacaggatcctactctgtcacacatggtgcattgcagtggcatgaacactgcttactgcagcctccacctcccagggtcaagtgatcttcccacctcagcttcctgagtaactgagaccacaggcatgcaccaccatgcccagctaatttttgtattttttttttttttttttgtagagacagggttttgccatattgcccaggctggtgtcgaactcctggactcaagcgatctgccctcctcggcctcccgaagttctgggattgcaggcatgagccgtcatgcccagccgagtccctttctctagtactctgtcttattaatttctaaaaatgctttatatttacaagatacagtctcaagcaatttcaattcataggcctaatttgcatccaagtcaaacaaaaaactgttgaactagtaaacagttataagacaattttaaaaatgtgaatactgcctggatatttgatgatattgaagaattattttaggtgtgaaaatggtattatggttttttaaaaagagtctattttttagagatacatatttaaatatttacacatgaaatgatgtgatgtctgggacttgcttcagcataatccaggtagagagcagcgagtggagggtgtaggaatgtatatgaaataagattagccaagtattatgaagcaaggtgataggtacgtcaagtttattatgttcttatacacacacacacacacacacacacacacacacacacacacacacataattgaaaatttccataataaaaagtttaagaaaaatcaggctatgttttggaatagttctaattgtttggggtcaagactggtataaaagttaaatttctccagattcaaatcctttaatacttaagagaaatcctttcatacttgataatactaagaagtaattataacattactctttttaaaaagaatgttatctgtattgtttttcttatcaatgctcttaggaatatattctatacttgtggccctgatggctggcaaggcakaagtaaggtataatcctgctgttatacaacccccaatgatagcagagttcatccgagaacttggatttggagccactgtgatagaaaatgctgatgaaggagatggtgttttggaacttgttgtaagtaagattttttgtgtgattaataaaacttccagaaaaaaaacttggtaaggttcagagaagagttgtgaagataattaaaggtggggaaaatattatgaaaattaaggaaactggaaaatggaaggataaggtatgatctaatggtactcttcaagcatggaatttaaaaagataattgtcgtatctctgttaaccaaaaaagaattgggtatgaatgaataaatgaaaattaacatttaaaatataatatgattcctatctagtagcatgtaattgaataaattccagtgcattaaagactcaaattttataaagtcataaaacctgtgtaaggcatattgatttaaagtgatcactttctccaacccagcaaatcagctgctaggattctttcctgtggaaatatgatcatatagggctgggcatggtggctcacacctgtaaatcccagcactttgggaggctgaggtgggtggattagttgaggtcaggagttcgagaccagcccagccaacatggtgaaaccccatctctatgaaaaatacaaaaattagccaggtgtgatggtgtgctcctgtagtcccagctacttgggaggctgaggcatgagaatcacttaaacccaggcggcggaggttgcagtgagctgagatcacaccactgcactccagcctgggtgacagaatgagactttgtttttttaaaaaaaggaatgtgaacattcataagattatatttattatataattttaagagcaaaaatttagaaccaatctatattaaatgtcctttaatagggaatgtttaaataaattctgtatagacatattatagaatacaatacagatgttaaaagagtaaaatagatcaatattaactgacaagtaaagatttccaggatgtattatttacttaagcaaaacaagttgcagtgtaatacttatggcataatctcatttagtaaaaaatgcaaaactacatgtatgtgtacttacatatgtatataaacacctagagaaaggactagtatatacacatgattaacactgtttatctcaggaagagagcgggattgagggagaagatcaaagagaaacttgcatcttttcaacattgaaatttttacagctagaatgtatttaaatttatttgtataacttaaaaaattaaaacaaaaaatcttgtaccaaaataagttccagtttaagcaaaaattcaaatgtaggctgggtgtggtggctcacgcctgtaatctcagcattttgggaggccgaggtgggaggatcacttgagcccaggagttcacgaccagcccaggcaacaggtgaaaccccgcctctacaaaaagtaaaaatttaggccagtcatggtggctcacgcctgtaatcccagcactttgggaggccgaggtgggtagatcacttgaggtcaggagttcaagaccagcctgaccaacatggtgaaaccccgtgtctactaaaaatacaaaaattagctgggtgtggtggcatgcgcctgtaatcccagctactcgggaggctgaggcatgagaattgtttgaacctgggaggcagaggttgcactgagccaagactgcgccactgcactccagcctgggcgacacagtgagattccatctcaaaaaataaaaaaataaaaataaaaataaaaaatttaaaaagtaaatatttagccaggtgtggtggtgtgcatctgtagtcccagctacttgggaggctgaggtgggaggattgcttgagcctgggaggttgaggctgcagtgagctgtgttcatgccactgcattccagcctaggtgacagagtgagacattgcctgcctcccaaaattgaatgtaaacaatgaaaccatgaaattactagaagaaatatttggagcattttttttcaatattatgaaactttcggacatacagaaaagtcagaagaattgtacagtagatatcctatatacaccagctagattctacaattaatactttactatatttgctttatcatacatcaatccatcaatacatcactgaaataattttagactcacaagtaagtaaaaaaaagtacagaaaatttccatgtagccttcatctagcttttcccaatgataacatctaattcatttataaaacaatattggaggctgggtgcggtggctcatgcctgtaatcccagcactttgggaggctgaggtgggtggatcacctgaagtcaggagttcaagaccaccctcgccaacatggtgaaaccccgtctctactaaaaatacaaaaaattagccgggcgtggtggcacgcgcctgtaatcccagatactcgggaagctgaggcaggagaatcacttgaacccgggaggtggaggttgtagtgagccaagatcacgccattgcactccaacctgggcaacaacagtgaaactccatctcaaaaaaaaaaaaaaaaaaaaaaagaaaaaaaaagaagaaaaaaacaatattggatttggaagcgtttttctaaaatatgatacaaaaccaataaaagaaaagattaatagattgatgaattcagatacctaaacatttcttcttgggatgaagacaccaaatggaaagtcaaaaggcaattaaaataattataattcatatcatagatgaaggttaattttttcatatacgaagaacttttatacatcaataagacaagcgtcagcaccccaaaatttcttttctatgataaaggatatgaactgacagttcacagaaaagcaaaaacaatacctcttaaacatgaaaagatgttcaacttcattcgtaatgagtaaagcaaattaaaatggcactgaaataccattttcacttattggattggtaaagttaacaattttgttaacactatgtttctgatctctcatgtattgctggtggtgtgtacattgatacaagatgccaacagaggaatttggcaatatctgtcaaaggtgaaattgcacatagcctttgcctcagaagttccacttgtaggaatttatccaacagacatttttgcatatgtatgaaatgacatgtatgcaaagatgttcattatagtattgtttacaatagcaaaatatgaggaaaaactaaatttcagtcattagggactaaaattatgatacaatcatatcatgggatactgagtagctattaaaaacaatgaaaaagaatgagtaggtttttatatgtttttaaggattaaaaaataatagcttttttgaaataccataaaactcacctttttaaagtgtacaacccagtggtttttagtatattcacagacttgtgcaactatcactactatctgatttcaaaacattttcatccccattaaaataaaactcattagtagtcattctttagtcctaatctcttacctgtactggttctactctctctaccctaggcaaccactaatctactttgtatttgtatagatttgcctattctggacatttcatataaatggaataatataatatgtggtcctttgtaaccggcttcttttatttaccatagtgtattcatggttgatccatgttgtagcatgtatcattactgcattcctttttattgccaaataatattccaatgtatgaatatactacattttgttgatttagtcatcagttgatggacaattgggttgtttccactttatgaatattgctgctattataaataatgctgctatgaacattcatatacaagtttttgtgtgaacttatgtttttaattcccttggggatatacctagaagtggaattactaagtcatctagtaactctatatttaaccttttaagggactgccagactgttttctaaagcagctgtaccatttcatatccccaccaacattgtattgacgttccaattgttccatatgcatgtcaacacttgctattacctttttattatagctatcccagtggaagtgaactggtatctcattttggtttgatttgcatttccctgatgactaataatgttgagtatcttttcttgtgcttattggcctttcataaatgttctttggagaaacaattcgaatttttaccttttttttttttgagacggagtctcgctctgtcgcccaggctggagtgcagtggcgcgatcttggctcactgcaagccccgcctcccaggttcacaccattctcctgcctcagcctaccgagtagctgggactacaggcgtctgccaccatgcccggctaattttttgtatttgtagtagagatggggttttactgtgttagccaggatggtctcgatctcctgacctcgtgatccgcccacctcggcctcccaaagtgctgggattacaggcgtgagccaccgcgcccgaccatttttgcccatttttaattggattgtttgtctttttattactgagttgtaagaattctttatatattctagatacaagtcccttatctgatatatgattttaaaatattttctcccattctggtattgcctcttcgttggcggtgttgtttagagcacagaagttttctgggtacagcataggtgcatgtgcctgtatttatgaggtatatgagacgttttgatacaggcatgcaatgagtaacaaacacatcatataacatggggtatccatcccctcaagcatttatactttgtgttacagataatccatttatactcttttagttatttttaaatgtatgattaagttattattgactatagtcatcctgttctgctatgaaatactatgtcttattcattctattttttgtactccatgttgttttcttgaataaatgcttcctagattgctgcaagcttttgtttgatttccagatttctggaaaaagatggttcttacaatttctgccagttttctcattgcttttacagaggagagaattttagaggtcttactgcaccatttgcactgatataccttcagcagatattcttgaataaatccttcttaatttgtggtatgccctttggtcaatttccagagtatttcaatggctgttttttgatacttttgtcagttttatcattgctttttgaggaaaggatttgctgagctcctcacgcagtcattctagaagtcatgcccatccattttataatttaacgcccagctaaactataaccccactcaagatatagggaaagatacatttttagacatacaaagtcaaaacacttttgccatccattaatttcactgaaagctatactagtgattatatacttcagcaggatgaaaaaaaaatccagcgggaagcaagactggatacaagaaacaataataaatgtcaaatcctctatcactgagtagtagtgacaggaatttggagacttttaatgagatcctcttctatctgggaccatatatttgttcaatgtggtataaaaatggtatcctaatgatcatatctaaagcatactagtagtgcaattaagatcttgtgtggcaaacccatgagtccttttagtaaaaagtggtaactcgggctgggcatggtggatcacttgaggtcaggagttcgagaccagcctggccaacatggtgaaamcccctgtctctacaaaaaagataaaaaattagccaggcatggtagaacatgcctgtaaccccagctacttgagaggctgaggcagaagaatcacttgaacctggaaggcggaggttgcagtgagccgagatcgcaccactgcattccagcctgggcgacagagcgagagactctgtctcaaaaaaaaaaaaaaaaaagtggtaactcatgtttaatggtggaaaaagtatattcctgaagaacaaatgctttgtctttaacaggtgaggggaatgacgtgtgcctcctgcgtacataaaatagagtctagtctcacaaaacacagagggatcctatactgctccgtggccctggcaaccaacaaagcacatattaaatrtgacccagaaattattggtcctagagatattatccatacaattgaagtaagtgccaagaatttatgtttctgtgttcttacctatttaatcagcactcccgtgaatcatttctggtttgcatcagatagaggcaatgaaaaaaaatctaactcctttgaacacttcaaacaagatctgtctcaaaatttaatgtaaacgtgtctgcatttttttttttggtctttttcaggaaaagttaggcaaaggtacatttacactattaatcaggagcaaacaagttagaaccacaaaacacttaaaatatttagaaaatggaaataaagtataatttgttataaataagattcatattagttactaagaaagtgaaggatcctgcttgatggctttttgtttgttaggtcaaaacaaaagacctatttttaagttaaagtaagaaatttaaaagactaaacccagctggacatagtggctcatgcctataatctcagcattttgagaggcctagagggcacaatcacttgaggccaggagttcaagaccatcctgggcaatgtagcgagaccctgtctctgcaacaaaaattaaaataactagccaggtgtggtgccacgcacccatagtattaatcacacgagaagcagaggtaggaggattgcttaagtccaggagttgaaggttactgtgagagagaccttgtctctaaaacaaacaaacaaacaaacacaatcctttctttgtgacagattcatcctgtgttcttcaataagtcttaagtggtaatacatgtgaatgtattttaaaagtttcagtatgctatagaattggtgttcaagtgatttaaagcattttattagttcagttmagatcctatttgtatagatgacattatcattaccatttttgtgaaactagttttactgagtacctgctatgtgccagttaccaagattgcaaagcttcaacccttaattcccacagcaatgtggtcatattcattttggaggtgaggaaacccaggttaagagaagttaagttacttatccaaagtcacatagctaataactgtcataactgggatttgagcctaattactctgactccaaaagctcatgcttgttctrttcactgtgcactgccaacaaatgtaagatggcagcatttcccctagcagttggaaatgtaatgtgtattactatctatggtcagataagtcttgcttaggggtagtttcctttttatactttgttttattggggaaaatgatttttgttcatgttctttttctgataaaacaagactaaatactgcatatgcaaggccttgaataatatgtttagtatggtgctagcttttttttttttttttttttttttttggagacagagtctcactctgtcgcctgggctggagtgcagtggtgcgatctcagctcactgcaacctccgcctcctgggttcaagcgattctcctgtctcagcttcccgagcagctgggattacaggcacctgccactatttccagctaattttttgtatttttagtagagacggggtttcaccgtgttggccatactgctctcgaactcctgactttgtgatttgcccaccttggcctcccaaagtgctgggattacaggcatgagccaccgtgcccggcctggtgctagcttttatggcctattaatgagaacctctactgaggacagttgtacttgagttaaactcttatatataggatacatattaactagcattaaggaaatatttatttgtttgatgaaagattggaaacaaatgcaatcaagagcaggaagcacatcttcatctttgtattccccagagtgacttgccctcagtaattgaactgttcttaatgacaataccatggcttagaatttctctatacaatatttatatgttcagtgaaataatttttttctcatgaatttccttagagcttaggttttgaascttctttggtcaagaaggatcggtcagcaagtcacttagatcataaaygakaaataagacagtaagtactttggagtgtcagtaaaaaacagattttgactccttattacaaatttttttttgcatgtcagtttttataatatcatccttatactggatgaartggtcacaatgtatatctctctgtagtatrtagaatctttacccattagctatttatgaccatgatttttctttttttattttttccatataagatggagacggtcttttcttgtgagtctgtttttctgtattcctgtaatggggctgatgayatatatgatggttatggaccaccactttgcaactcttcaccataatcaaaacatgagtaaakaagaaatgatcaaccttcattcttctatgttcctggagcrccagattcktccaggattgtctgttatgaatttgctgtccttttwattgtgtgtacctgtacaggcaagtgaattgttagcaaatatatttgttaataataaaaaataagcaaaatttggcaggcaaggtttattttcagctacaaaactgatgttagctagaagtctgatcattttatgccatatgctttacaaaaataatcttcaactgggtagttatttaagttgataatagatgccatttaacccctaagaaagagttcaagttttttgggtttggtatttatatctgctactgtatataactttattttatttttaaatttttatttatctatttttttttttttagagatggggttttgctctgtcacccaggctggaatgcagtggtgtaagcacagctcactgtggtcttgaactcctgggctcaagcattccttctgcctcagcattctgagtagctgggacttccaggcactagccactgcacccagctcaatgactttatttttgttatttcttcctggcacttcagttcattactttctgtatgttttaaactcttttttcgagataaacttttactttggaatagaatacttctatcaaataaatcttttcctttatctgatccttataaaaggcaataatgattttaaaaaacatcttagtttctctgttttaatgaaataagctttccagttatatttaccaacaaaaacggccaacagatttcgtagcttgtgatataccagttagtttgagttttggaaagatgggtgagttttatacaaaaaaatccttgagaaaatgtaattcctttcttagttcttgtttttgctagcctcagaaagaaaaatctgcttggtgtgatggctcatgcctataatcccagctacttgggaggctgaggcaggaggattgcttgaggccaggagtttgagaccagcctgggcaacatatcaagactgtctcttaaaaaaaaaaaaaaaaaaaaggaagaaatatctgattttccttgtattatggaatatccattggatcatagatgatagccccacaggcttgtgcagcaatttgaatacctccctctgcatgtacatctattgaaatacaaacacgattgttttggcttaatctccctttagtgtttatggattagctaaaagccaaagaaagtgactattgatactttaagttattgagatatatatgtgaatttcagcattttttaaaattcaatgattatcattcctatattgcagtttttcrgaggctggtacttctacattcaggcttataaagcactgaagcataagacagcaaatatggacgtactgattgtgctggcaaccaccattgcatttgcctactctttgattattcttctasttgcaatgtatgagagagccaaagtgaaccctattactttctttgacacaccccctatgctgtttgtgtttattgcactaggccgatggctggaacatatagcaaaggtaaagtaagaaagggtgacatttgttaaaatgttgggtggataaatgaccttagtattttttaggccaatcattggaaatacatgcttttatgtagttaaccatttactgaaagacgtattttcattttggcaatattttaagttaaatatcagtttagaagatttaccaaatatggaattaatactgtagatagtacagtatgtctgtttattttaagagagacaaatgagaaatacttatcacttatttacttacattattaattgaaaaattgacatgaccacatggtttaaaataatgatagaaaaaattcacccatattcccttgctataatgtaaatcattttctaattccattctacatacctttctacttaacagagttgcaaatgtagtattcatactactttgtacccttaacactataaagtttttcaccatttttgcagtctagattattatctaatatttctgactaagtctgtcacatcagtttgctttaatttaataaaccattcaggtgtttttcaccattagattgtttctaattttttatttttagataatcctgcattgaacatactcatgtctaatagtcatttccattgagctaatatcttagaagacattacaaaggatgtgtttactgggttaaagggcataaatatttctctggttcatggtacaagttgtaacagtttttgccagcaggggtatgtcagtgaagtatttttactacaacttcaccagcattgcatcccccccacaaattctttctaagttaatagacattaaatggtattacagggtaactttagtttgtgtttcttccattaatggtggggataaacattttttcatcatcggatgtttatatttccttttgaatgatttgcttatatatgtcctttgcctgtgtgtttattgggttcatgtttttcttattaatttatataatttcttcataaattatacctaataatacttttaaaatattttgtgtacttttaggctgggcgcggtggctcatgcctgtaatcccagcgctttgggaggccgaggtgggtggatcacgaggtcaggagtttgagaccggcctggccaacatggtgaaccccatctctactaaaaatacaaaaattagccaggcatggtggcgcgcgtctgtaatcccagctactcgggaggctgaggcaggagaattgcttgaacccaggaggcaggggttgcagtgagccgagatcatgctactgcactccagcctgggtaacagagtgagactctgtctcaaaataaataaataaataaataaataataaaatattttgtgtacttcgtctttctgaagtgaaacattttctagtgaaacattttgaagtgaaacattcaaacattttgaagtgaaacattttcatattaatttttaaacaaattaatattcctaaagctgtcttttgggtaaatgctaaagattgtatttttattttagttaagacctgaactttttcttccttagcattttcaatgtgtttgttttaatttatagggcaaaacatcagaggctcttgcaaagttaatttcactacaagctacagaagcaactattgtaactcttgattctgataatatcctcctcaggtatttatcttcactcttccctcttctctttttttaacttcttaagaaaaatttcaaatatatacagaagtagaaaaaggactatcatgaattcacataatctgtctcccagatataaaaattatccacattttgccatacttcatctatccattttgtctgtctttcttgttgcagtagtattaaaccaaatttcagtcatattgttttacggctaaatattctgtgttatctctaaaaaaggatatattctgatataactatactaccgtactgtacctaacaaaatgaacattaattccttaatgtcacctaagacccaattcatattcacatttctcctgttgtctccaaaatgttttaagtctctttgcctgaaatagaattcaaacaagatccatgcatcatagcatttgactatcatatggcttatgttcttttaatctaaaacagcgcctctcttctttctcctcattgtccttccttccctcctccccacaaaacaattgacttgaagaaatagccatcagttgttctgtagaatatcccacaatgtgaatttatcctttgtttccttttggtttcatttaacttgttctataactcctatgttacttgtaaattggaagataaagctaaagacttgattatatttcattcttttgtatttctcatttttatactaataaaattgtttaggcaaagttacataataaagaaatttttagttaaatgaaacccattacattattttttaaaactttcatttttaatttaatgactgttcaaaaaaatagagtgcctactttgtgctagctactgtgctgttcactaacagtaagcaagactgacatactagttcctagtttaaatgttggttctagcttccattggcagtaattatggagccacaagcttgacgtgaactaaagagcttacatggagaggtcagggtaggaagcatattatcatggtgctttttatgttaacttatatccagtgaagaacaagtggatgtggaacttgtacaacgtggagatatcattaaagtagttccaggaggcaaatttccagtggatggtcgtgttattgaaggacattctatggtrgatgagtccckcatcacaggtatgttctttcaaaggatcatgaccaaaatgttaagaaaaatagacatgaaagatgaagcactttttgtagaagctatgaataactaaattatgaacagagagaataagttcttttaagactgtattaaatcaatttcctcagatttactttgtggctttagttatgctattagtccattttcacattgctataaagaaatacctgaaactgggtaatttataaagccaagagatttaattgactcacagttctgcatgtctggggaggcctcaggaaacttgtaatcatggtggaggagaaggggaagcaaggaccttcttcacaaggcagcaggagagagaagtgctagcaggggaaataccagatgcttataaaaccataaggtctcatgagaactcactcactatcatgacaacagcataggggaaaccgcccccatgattcaatcacctcccctcctcgacatgtggggattacaatttgagatgagatttgggtggggacacagagccaaaccatatcatcccacccttgacccctcccaaatgtcatgtcttttcacatttcaacaccaatcatgccttcccaacagtcccccaaagtcttatttcagcattaactcaaaagtccacaatctaaagtctcatctgagacaagacaagtcccttccacctatgaggctgtaaaatcaaaaacgagttccttccaagatacagtgggggtgcaggcattggataaatgctcccattccaaatgggagaaattggccaaaacaaagggactacaggccccatgcaagtccaaaatccgttggggcagtcattaaatcttaaagctccaaaatgatttcctttgacttcatgtctcacatccaggtcatgctgatgcaagaagtgggctcccaaggtcttgggcagatccacccctgtggctttgcagggtacagcccctgccactggctgctttcactggctggtgttgagtgtctgtggcttttctaggtatacagtacaagctgttggtggatctctaccattctgtggtctggaggatagtggccctcttctcacagctccactaggcagtgccccattggggactctgtgtgggggctctaaacttatatttcccttctgcactgccctagcagaggttttccatgatggcttctcccctgcagcagacttctgcctgggcatccaggcatttccatacatcctctgaaatctaggcagaggttcccaaacctccgttcttgacttctgtgcacctgcaggcccaacaccacgtggaagctgccaaggcttggggcttgcaccctctgaagcaatggcctgagttgtaccttgaccccttttagccatgactggagctgaagctgctgggatgcaggatacgatgccactgaggctgcaaagagcatcagaggccctggttcccagcccacaaaatcattttttctcctaggcctcagggcctttgatgggaggggctgctgccaagatctctgacatgtcctggagatgttttccccattgtcttggcgattaacatttggctcctcgttacttatgcaaatttctgcagcccgcttgaatttctccccagaaaatgggtttttcttttctattgcattgtcaggctgtgaattttccaagcctttatgctctgcttcctttttaaacataagttccaatttcaaaccatctctttgtgaacacataaaactgaatgctttcagaataatgtaggtcatgtcttgaatgctttgctgcttaaaaaatttcttctgccaggtatcataaatcatctctctcaagctcactattccacagatctctagggtgggggaaaaatgccatccgtctcttttcttgtttctttttttttttttttttttttttttttttgagacggagtctcgctctgtcgcccaggctggagtgcagtggcacaatctcggctcactgcaagctctgcctcccggttcaccccattctcctgcctcagccgctggagtagctgggactacaggcacccgccaccacgcctggctaattttttgtattttttattagagacggggtttcaccatgttagccaggatggtctcaatctcctgacctcgtgatcagccggcctcggcctcccaaagtgctgggattacaggcgtgagccaccgcgcccggccaccacccatctcttttctaaagcatagcatgagggacctttactccagttccccataagttcctcatctccatctgagaccacctcagcttggacttcattgttcacatcactgtcagcattttgatcaaaaccattcaacaagtttggctgggcgcagtggctcatgcctgtaatcccagcactttgggaggctgaggctggtggatcgcttaaggtctggagtttgagaccagcctgaccaacatggtgaaaccccgtctctactaaaaatataaaattagccaggtgtggtggagcatgcctgtaatcctagctacttgggaggctgaggcagaagaatcacttgaactcaagaagcagaggttgcagtgagccgagattgcaccattgcactccagcctgggcaagaagtgcgaaactctgttacaaaaacaaaaaacaaaaaaacctaacaccattcaacagatttctatgaagttccaaactttcccacattttcctgtctttttctgagccctccaaactgttccagcctctgcccattacccagttccaaagtcgcttccgcattttcaagtatctttatagcagtgtcctactccctgtggtaacaacttactcaatttactacattagtcagttttcacactgctctaaagacatacccaacgctgggtaatttatgaaggaaggagatttaattgattcacagttctgcatgactgggaaggcctcaggaaacttaaaatcttggcagaaggtgaagggggcaaggaccttcttcataaggcaacagtagagagaagtgccagcaggggaaatgccagacacttataaaaccatcagatctcgtgaaaactcactcatcacaagaacagcataggggaaatgcccccacatgactcaatcacctccctcccttggcatgtggggattataggtccctccctcaacatgtggggattacaattagagatgaaacttgggtggggacacagagccaaaccgtatcaactattgaagacttttatcactggagattattagctgctagaatgcataaccaaaggaagttgtctcagtttcctgtagacttgatggactttggcaaattttcctgggcaaatacctattctgcccttcctgctgtaaagactggtctaatctgagctatgacacgagtccaggttttccacatcagggtctactctaagggaataggcctggcatagttttagaaattttaggtaactaaggccaatctgaggcagaatcaaaatgatacctttccaatctcaactctctgatagtcctagaagaagctcagtttatgaaccatgtggaaataatttaggactgtgtgtttctttctttctttcttttttgtttttttgttgttgttgttgttgagacaaggtcttaccctgtcacccaagctggagtgcaatggcacaatcttgactcatggcaacctctgcctcccaggctcaaacaatcctcccacctcagcctcccacgtacctgggactacaggcgcatgccaccatgcctggctaacttttgtatttttttgtagagatcgagttttgccatgttgcccagtctcgaactcctgagctcaagccatctgtctgcctcagcctcccaaagtgctaggattacaggcatgagccgctgtgcccaacaagactgtgtgtttctcaataggggtgctattgccagtttggatggggcaattcttagttctcggggactctcttacatactgtagtacaattcagtgcccctgaccctggcactggcacactaaatcgaagtagtagcacccccttccccatcccgtgcagtcattattacaaacgaaaactccctcccacatttctaaatgttccttgagaacaggttaagaaccaatgttctaggactagggtgaaactctaaaagtatctgccaacaagagctaccatacaggtttttccagttcaaggtttatattcctggcattggcctagaactgatataaggaaaaagggaaagcaactttcacctaggcatttgttcagattctattttatatctagatatttttgacaagtaacaaataatgatatgtttcatgatagtgatcatttatgctccttaaatctatctttactctccatacaggggaggcaatgcctgtggctaagaaacctggcagcacagtgattgctggttccattaacyagaacgggtcactgcttatctgcgcaacacatgttggagcagacacaaccctttctcaaattgtcaaacttgtggaagaggcayaaacatcaaaggtaacttaactccctaggagaaacacaaactattttctttaaagccttctcagtataaatcttcacctagtttttacgttttccaataaaaattttagttgcattaatatggagttcgtttgtttttgttttgagatagggtctcactctgttgcacaggctggagtgcagtggcaccatcatggctcactgcacccttgacctcctaagttcaagcgatccttctgcctcagcctcccgagtagctgggactgtgtgtgggcacatgccaccacacccagctaattaaaaaaatttttttttatagaaacagggtctccctaagttgcccaggatggtctcgaactcctggactcaagctatcatcctgccttagtctctcaaagtgttgggattacaggtgtgagccaccacacctggccattaacatgaagtttgttaaaatatttctatttgtgctaactactaaatatactctgcattcagtatcagaaaagactttgatatgcttcttcttcttattattgttgttatttttaattctaggctcctatccagcagtttgcagacaaactcagtggctattttgttccttttattgtttttgtttccattgccaccctcttggtatrgattgtaattggatttctgaattttgaaattgtggaaacctactttcctgtaagtgacttgtaataactcgttactatatgcagaacaatttgtgagtcttttgcattagtaattcattggaaataactttaataattaccaggatctttaaaggtttggagtgggagagtgataagaataatatttgcatttttataaatataaaaaatttccttttggaaaaaaaattttattatgactggtgattttccaaaagcaaataccaaacttttacatgttatgcttagtctcatttctgacatggttttgctttcacagaggactatagatatattgaggaaaacctcaggatttcagctctgtcatttactgtcaatatgatcttagactacttaattgctctctgagcttcagtttcctcaactataaagtgaggttttaataatacccattttgtgtaacttaaggttgttgtgaaggttaaataatatattagaaataatttgtaacttattaaatgctttacaaatataagatattattagtgtctactcatctagttctctgatgctgtctatggtgttgtaaagtggtaaagcagaactggactgtgcctcaaattagatatataaactttaagtcatgtaagttttactatcctcagttctcttatctgtaaaatagggaaaatagtacctaagatacaggattggaattagtataggtgaaagcatctaacatattgacagatgcaggtgacagccaagggtccccctgcgaaacccctgaaggttgaaaactttcaagcctaaaacatcctgaaggttgaaaaaccggactgctggtcccagatgaagcctgccctactcccctacccccgactgattctttctaaataatgtccacctacgcactgggaggatggggtggggcccctggaagttcaccccgtttgtatagggaaggagtctggactgacctgttcctgggtggtacctggggttcagtcggtgaggtggagagcctgttaacaggactcaatctcattttgttgagttgtttttcctttttcctttttggccaataaattcctttcccctcgcccttcaaagtgtctgcagacctaatcttttcctggtcgtgtgacaagaatctgttctttttctataacaacatgtatacatatgtgaagtttatggaagcataagcctagaaatctatgaaagccccttccagctgtgtttctatatagatctrtaattcttggatgaatatttaagtatttgagaacttaacctaacactgtaaaactgttactgataagagctgcagtgagccatgatggcactaatgtactccagcctgggcaacagagcgagactcctactcaaagtaaataaagtcttactttgttgtatttatttattttattttttattcaggaggtacatgtgcatgtttgtttgtttgtttgtttatttatttatttatttatttatttattgcgacagagtcttgctctgttgcccaggctggagtgcagtggcacgatctcggctcactgcaacttccacctcccaggttcaagtgattctcatgcctcagcctcctgagtagcggggattacaggcttatgtcaccatgcccggctaatttttgtatttttagtagagatggggtttcgccatgttggtcaggctggtctcaaattcctgacctcaggtgatccacctgcctcggcctcccaaagtgctgggataacaggcatgagccactgtgcccggcccgtggatatattgtttattacatgggtatattgggtgatgctggggtttaggcttatagtgaccccatctcccaaacagtgaacatagtactcaataagtagtttttcatcccttgcccccctcccttcttctcaccttttggaggccccactgctcattgatttcatctttatgtccatgtgtagccattgtttagctcctgcttataagtgagaacatgtagtatttgattttctgtccctacgttaactcacttaggataatggcctccagcttcacctatgctactcaaaggacatgatttctttttttatggctgcatagtattccatggtgtatatgtactacatttcctttatccagtccaccattgatgggcacctgggtgactccatgtctttgctattgtgaagagtgctgtgataaacacacacatgcagttgtcttttgataaaacaatttaaaataaatataagaaaatcctttgggtagatatccagtagtgggattgctgggttaaatggtagttatattttaagttcttggagaaatctccagactgttttccgtagaggttgaactgatttacattcccaccaacagtatataagtgttcccttttctctgcatcgttgccaacatctgttattttttgatttttttaattatagccattctgactggtgtgaaggggtatttcattgtggttttaagttgcatttccctgatgattagtgatgttgagtattttttcatgtgtttttttttatcacttgtatgtcttcttttgagaggtgtctatttatgccctttgcccacttttaaatagggttgttttatccttgttgatttaagtttcatatagagtctagatattagtcctttgttggatgcatactttgcaaatattttctcccattctgtaggttctgtgtttattctgttgattgtttcttttgttgtgcagaagctctttcgtttaattaaatctcctttattaatttttggttttgttgcaattgtttttgaggtcttagtcataaattctttccctaggataatgtctagaagagtttttcccaggttttcttggggtttttatagtttgaggttttacatctaagtcttcaatctatcctgagttaatttttttatatggtgagagatatgagtccagtttcattcttctgcatatggctagctagttttcccagcaccatatattgaatagggtgtcctttccccattgtttgtttttgtcaactttgttgaagaccagttggttgtaggtgtgggctttatttctgggttctctattttgttcagttgatctacgtgtctatttttgtatcaataccacgctgttttgattactatagtcttttagtataatttgaagtcgggtaatgtgatgcctctagttttattctttttgcttaggattgcttcggctatttaggttctttttccatatgaaatttaggattgctttttaaattctgtgacagagaacattagtagttttataggaattgtgttgaatctatagattgctttggacagtatggtagataggattagggttagacatggagagaagatcatctcctgccacacccttcccccacacctacagtgctgcggatgcagcagtgctatttcccaccaggggccagctagcgcacacttggacaaagcatatttcatgcttttcatggtggctccacccctactgcaagtgagtcacgtgccgcttgggttttttccaagggcgaggctcaactccctctcccgacagagtggcactgtcccagcaaggagggacagacaaatcactgagttgcctgctttggtctgggggaaaagactaacccaaacccattttagtggtagctatcagaggggcatactcatgggaaccaaaggacaaagtccttatgaaatgaaggtcaggagccctataacaagggcacaaaagagaagctgatcatgttcttgctggcacaggatcaggagtgcgagtgcaccctaatataatctcttcccaccacccctgcatcagggcaggtgcttctacctggcaccaacctacctgctgtctcttactcttgagtgccatctactggtgtgtatcctgaactgcatcataaaatttaaaatctgctaacagaagggcttagttctagcccttaagataagtccacagggacctctgcaccctaaaccctataggagattgttagctctaatggctaatacctcactacaaaaagcagcatctgagaaagctatggcatagaagctatccacaaccaagtaatctgtacagcaccttggacccctgaaagcaccaaaaacaaagctaaatgatcacacacaacatgcaccacagtaaagcacccaagggaaaaaaaagaaggaaagaaaacgtcccttggaaatgatagcaaattcaaaaacaggaagcaaaagttcccttggatgggaaagaatcagtgcaagaactctagcagtacaaaaagtgttttcacaccgccaaacgattgtaatagctctctagcaacggatcctaagcagacagataagtaatttaaaatatggattgcaaggaaacctcaatgagatccaaatgaaagttggaatccaatgtaaagaaaccagaaaaacgattcaggatatgcaagacgaggtagccatattaagaaaaaaaacaaatggaactgctggaactgaaaaattcagtaaagaaatttcaaatccagagaactcctgcaagacactatacaagatgaccatcctcagggcacacaggcattagaatatccaaagtcaatgcaaaagaaaaatatcttaaaggcagctacagaaaagggccaaattacctacagagcaaaacccatcaggctaacagcagacttctcagtggaaatgttacaagctggaagtgattgagagcctatttttagtttccctaaagaaaaaaaaaactggcaaccaggaatttcatatcctgccaaattaagcttcatacatgaagtagaaacaaagtcttcctcagacaagcaaacagtaaggaaattcatcaccaccagaccagagctataagaaatgttcagagaagttctgaacatggaaacaaaagaatgatacttgctaccacaaaaacatatataaatacaaagctcacagaccctataaagcaattacacaattgagactacaaagaaactagcaaacactaccataaggaacaaaaactcatatatcaatattaaacttgaatgtaaatggcctaaatactccacttaaaagacatagagtggcaaattggaataaaaaaacaagatccatccttttgctgtcatcaagagacccatctcaaaggtaataactcataggttgaaggtgaagggatggagaaagatctatcatgcaaatggaaaacaaagagcaggggttgctattcttgtattacataaaacagagtttaaatcaacaatagttttaaaaaaaggcaaagaagggcactacaaaatgataaagatctcaattcaacaagaagatttaactatcttaaatacatatgcacccaacattggagcatccagatttataaaacaaatactgctagacctacaaaaagaggtagactgccatacaataatagtggaggacttcagtaccccactgacagcactagagagatcatcaaggacaaaaattagcaaagaaactctgcacttaaattggattctcaaccaaatggccctaatagatatctacggaatactccactcaataaccacagagtatatattcttctcatatgaacatggtacattccctaacattgatcatcggcttgatcataaagcaagtctcaataaattaaaaaacaactagatcagatcaagcgtcttcctagactccagtggaataaaattagaaatcaataccaagaggaactctaaaagccacacaagtacagggagactaaacaaccaactcctgaataacttttgggtaaacaatgaagttaatgcatttcggccgggcgcggtggctcatgcctgtaatcccagcactttgggaggccgaggcgggtggatcccctgaggttgggagttcaagaccagcctggccaacatggtgaaaccctatctctactaaaaaatacaaaaattagccaggcatggtggcacgcacctgtaatcccagctacttgcgagactgagggaagagaattgctcgaacccaggaggtgtaggtttcactgagcctagatcacgccattgaactgccgcctgggcaacaagaacaaaactccgtctcaaaaaaaaaaaaaaaatctctgttcctgatgacatgattctatacctagaaaaccataaagatttctccaaaagactcccagaccagataaactacttcagtaaagtttcagggtataaaatcaacatgcaaaaattattagcatttctatacaccagcaacgtccaactcgagaactaaatcaagaactcaatcccatttacaataatcacacacaaaacatacctaggaatacatttaaccaaggaggtgaaagatctctacagagagaagcataaaacactgatgaaagaaactgaagaagacacaaacaaatggaaaaacattccatgcccatggattggaagcattaatattaaaactaccatactgtccaaagcaatctatagattcaacacaattcctataaaactaatgtcctctgtcacagaattaaaaaagcaatcctaaaattcatatggaaaaagaacctaaatagccaaagccatcctaagcaaaaagaataaaactagaggcatcacattacctgacttcaaattatactgcaaggctatagtaatcaaaagcatggtattgatacaaaaatagacatgtagatcaattgaacaaaatagagaacccagaaataaaaccacacacctacaaccaactgatcttcaacaaagttgaccaaaacaagcaatggggaaaggacaccctattcaatatatgatattattatatgggattacagacatgagccactgtgtccagcccactactgtaatattaaaaagtttctttaagtgattcatgtctgtttagtacacactgaacaaaaggattgttgggaagtttttttggtatttatttatttatttatttatttatttatttatttatttatttttgagacagggtctcgctctgttgcccaggcaggaatgcagtggtgcaatcatggctcactgcagcctcaaacttctgggcttaagcgattctcttaccttagcctcccgagtagctgcaactgcaggcatgcaccaccatccctggctaattttttttttttttttgagaccgagtttcgctcttgtcacccaggctggagtgcaatggcatgatctcggctcactgcaacctctgccttccaggttcaagcaattcttgtgcctcagcctcccaagtagctgggattacaggcatgtgccaccatgcccagctaatttttgcatttttaatagagacggggtttcaccatgttggccaggcaggtctcggactcctgacctcaggtgatccacctgccttggcctcccaaagtgctgggattacaggcgtgagccactgtgcccggccatacctggctaatttttcacaaattttttttgtagagatgaggtcttaccatgttgcccagggtggtctcaaactcctggcctcaaatgatcctcctgccttagcctccaaaagtactgggattacagatgtgagcccgtgcacagaccagcaagtagcttggaatgtgtttccttcaggaatttttctcatgagttcaggatgtcttagatttcttctaaaactaccaattatatttttcccacatgagcaaacactgaacgtcactaagagcttaattagcagatatacttggttcacattgttatgtccaaaaggattttgttgaaatatgactaaggtccctttgcatgccatgtgattctttttcattgtctttcaagaatagtgtgaaaggcagaattatggttttactctacagagattgagaattctgtttattcagtatcaaattttttgaaaattatgtctcacatttgcagctatttctgaaaatttctaataaaaacattcattctcaatatggagcacttatattcagtccatagtttgtaattctggaatctcagtatgtcccaatttcttatattcataaaagaaagaaagtgttttcttacctgtaactaaaaaatatatgtaggtagctaggtaggatatgtcactttttaaattgtggttttatttaaatagtgttaagttttgtgtcttttgttttgtacagctctaaatcaataaccaaaatttatgcctttcttctaaagggctacaatagaagtatctcccgaacagaaacgataatacgatttgctttccaagcctctatcacagttctgtgtattgcatgtccctgttcactgggacyggccactccaactgctgtgatggtgggtacaggagtagrtgctcaaaatggcatactaataaaaggtggagagccattggagatggctcataaggtaagacagtccccagaactaaaacctgtaccaccaaactatcaatagcacccctcacatgtgagaaacacatactcctaaattatttctctgtggtccatgagctgagctgcttctaggactatccagagatttgaggtaggaaaggtgttattttggttctgcttcagattggcctttgttacctaagattcctaaaactactccaggcctatttattagagcagaccctaatgtggaaaacctggactcctatcctagctcagactagactagtctttgtggcagaaagacagaataggtgtttgcccaggaaaatttgccaaactccagcagccttctaacctatttgtgtgtgacttgttttcttcactgggaccttcaattgcagtgccgtttctttgcctttgctgccaccagccgacagtttgcagctatgactttaggaatataatcctatctctgatctcatattaggatttccataatcatctcaaagctacttgacttcaactaaaaccatgtttctactagtatgttcttattatgaggatgtaagctatgtacagaggtatatagtaaacatagaacatatcttagaacaaatctggaaactcacctcgccagagaatacaggctagtaatttttatagacattttaaactttgatataatttcaaacttaaaagtcgcaagactagcctggcacagtggctcacgcctgtaatcccagcactttgggaggctgaggcaggcggaccacgaggtcaggagtttgagaccagcctgaccaacatggtgaaaccccgtctctactaaaaatacaaaaattagctgggcgagttggcacacctgtaatcccaactactcaggagactgaggcaggagaatcgcttgagcccggagggcaggggttgcagtgagctgggatcgcgccactgcactccagcttgggcgactgagcaagactccatctcaaaaaaaaaaaaaaatgttgcaagactagtacaaagaactcctatatgccctttactgcagtcgttgggctcttttcctaagaataaggacattctcttatgtaaactgtagtacaactatcaaaatcaataaattaatattgatatgttgttatctgatctgtagtccatgttccagtttcctcagttgtctcaataatgtgctttatagctatttttcccctgtccagaatcatactttgttggtttatttttcttttctttctttctttctttttttttttttttgagatgaagtctcgctctatggcccaggctggagtgcagtggtgcgatctcggctcactgcaacctccacccaccaagttccagcgattctcctgcctcagcctcccgagtagctgggattacaggcatgcaccaccatgcccagctaactttttattattagtagagacggggtttcaccatgttggccaggctggtctcgatctcctgacctcaggtgatccatacacctcagtctctgaaagtgctgggattataggcttgagccaccgcacctggccatttacctttattcttataatcatttccctactgcttagatttcctcatcagatctataattcattatattgaaagcctttcttttttaccttgaggcactagaggcgtctcttaattacctattaacagtcaacccttaaaaattagctctagttgtttaacatatattcacagttatttagcatgaacaaacagttcagcattggcagaggagagctgttgtgtataactaagagtatttcttcttttattttcccgaagaccatcagttttttaagtcaaattaagtcaaaggtcagtttactaagaaactaaatagtcatctctttgtcaaaacagacctttttcttatttctggaaaggtgatgtggaggatcatcaagtcattgtatcttaatttttttacaggtaaaggtagtggtatttgataagactggaaccattactcacggaaccccagtggtgaatcaagtaaaggttctaactgaaagtaacagaatatcacaccataaaatcttggccattgtgggaactgctkaaagtaacagtgaacaccctctaggaacagccataaccaaatattgcaaacaggtacatttttttcctcttgtttattagtgtagtcatctcctgtaggaattccccggatcaaatctagtctggtgtttgactgtgatttgcatatatagttggtatgaggctaaaaagacttgtattttctcatttaattgtatgtaacttatttcttcatacagacaagtatacagatgaaaacaaatgaactataatcctatcacacagataactcctgttgacataaaaaattaaaatagaagttatacatatttgtggtaggacaattcagatagttcagagaattacataatgaaaattgtaaacctcattccctgcccccttccataattcctctctccaaagtttaacaactgttaacctattaacagtcttttaaaatgacagctttattgagatataattcatatactataaagttcacctttttaaagtgtacaattcaataattttagtatagtcataaaggtgtgcatctgttaaccgtttttaatgcatatagccacatatacgtatttatcatcttttaaactttatacagaaaggtcatacaatgatcaatctttgttaccttgcttttttattttattaagtgaattttcctgtcaggaaatgcagatctgcctcattgtttttaatggctgtattatactctatagtgtgagtgtttgtttttttttgacttttgcagtatatactcaacatccttatcagtttttgcaagtctgtctctacattaaatgcctatcaatgcaattgctaagtcaaaggatgcatgcagttaaattttgatgaatgctaccaatacccatatgatgaatattaccaatatacatgaggggttataccaatttatacctgcaccaaaagttatgagtgctcatttccccacattcttaccaacgctttatttttattttctcaatttaataggtgaaaaaatatttacttgatggtttgctttgcatttccttaattatgaataaggttgagcatctttttatatatgtattgaccatttgaatttcttttcctctaacctgtttgtatctatgacctatttttccacagagttgtttgtctttttcttattcatttgcatgagttctttatgaattgtctcacattaattttacacttaaaacgtggcagtttctaccattggtgttgccatttatttatttgttctttctcttttacctattacctattactgacctggcttccttacacccaaatcaaacagcagagaggatgaagctataaaaagctaggaaacaatgagggcccccagaacttttcggcttgctaaagatgtagactatagagcagatggagagcctccggtaactaaaggccctatactttgttactctttgccctgtactgagtagaaaacctgacttgactatggagttaaaaatttaatttgtaattatctactggaaagagcagagaatactgataagctttccatgttttctataaattttagagagtgggattaaaacaaagatttttttttattattgtttttgagacagagtctcactctgtcacccaggctggagtgcaatagcgcaatctcaactcactgcaacttccgtctcctgagttcaagtgattctcctacctcagcctccctagtagctgagattacaggtgtgcaccaccacacctggctaaatttttttgcacttttagtagagacagggtttcaccattttggccagcctggtccctctgcccacctcggcttcccagccggcttcttcagctgggattacaggcatgagccactgtgcctggtcaaaacaaagactttgaggctcttctgtaactttgaatgttatgtttgatgctctattcctttgtccttatcaaaatccactgtcaagtaggcaatatgtgacaattttattataaacatttagaattaactaggggtttttatcttgctaatgaatgaccttgcattatcagaacagtagaggaaatccttttgtttctgtttgttaggagctggacactgaaaccttgggtacctgcatagatttccaggttgtgccaggctgtgrtattagctgtaaagtcaccaatattgaaggcttgctacataagaataactggaatatagaggacaataatattaaaaatgcatccctggttcaaattgatgccagtaatgaacagtcatcaacttcgtcttccatgattattgatgcccagatctcaagtaagctaattttctttgtagtaccaattatggggcagttatgaacagatggctaactttataaccctgaactgttatagaagaaacaaaaattggcatcataatttcatttcctcaagtcaataccctatgccttctgatcatttaaattagtcaagaatatttcccaactgtggtcattgacaccaccatagggtgatgaggtctagccttagctgatcatccatgatcattcttttgtcactacaactactccaaaccttttctatctttcacaagatcctgtgactctctcctttgtccctctgcaaattatcttattttttatatagaaaattatggttcttgggcatgtgttcttacatatttttgcccagaatcattccttttttcagggaaagcagtatccttcatcttgcctaatgaatcccttcatctagatcccaccctctcttgattcatcagggacctccctctttctgttaggtccccttgctgctttatttttcatctctttctgttttagcttcttttcttaaacatataaacatttcttccatcaaaatcactatattcccatctagattttgtcctttcccatctatattcccatatagattctgtctttttcttttatatccaagttctagaaatggtaatctaggtttgttgaattcacttactccacagtcatgcctcagttcattgcagtctggcttctcccccatccatactactgaatccgttctttctaagttaactgatgaccattgacctcactgctctctccagtggtcacttttcagtcctcatcctgcaagacctcattaagatatttgacaatgttgaccatcccttccttcctaaaggatgattccatgaccctgctttgtctagattctcctctcacctccctggctgttcctttttttttttttttgagaaggagtcttgctctgtcacccaggctggagtgcagtggtgcaatctcagctcactgcaacctctgcctcctgggttcaagcaattctcctgcctcagcccccaggaagctgggattacaggtgtgcgcagccatgcctggctaattttttgtatttttagtagagatggggtttcaccatgttagccaggatggtctcaaactcctgacctcaagtgatccacccacctcagcctctcaaagtgctgggattacaggtgtgagccactgcacccctggctgttccttttaattgtcctttggttcctcatttctcttgctttcaaatgtcgtatgtcgtcagggttttgttctttgtctttttctcattttataatacatactctctctgtacaatcttattcatgctcatcacttagtctaccacccacagacttccactaccgctctaaaatccatatctttagcyaagtcctgtttccttggctccatgccgatctatctatctgcccccaaaacatgatctacccacctaagtgttccaacacctccctcccgatttgtgcctgagtgattttgctaacatggaaatctagtcgtgtcactctctaaccagtaccttttattacagtgttttataagctgtttttgagccatagacctttggaggaatatgatgaaagctatgggcccacccctcagaaaatttttgtttcaagagatgcacatgtatcctgaaacccatccacgggtctctgttaaggatcccagctttaatgggtctctctctcctatgggacaaagtccagtctctctggactttgttttagatctgttccccatgatatgtctcctgcctccctgcatcactcatcttctttttccactaccgcatatgtactccatgttccatccctacctaactacttacagttcttccttacggtgtgtcatttccttattagatcatttcatttaccattttctctatgtaatgttcttgttcacaaatggcatctatctcgtgaacttacgcttatctttcaagacccagcttatatctctctcttcagtgacaccctcattgactgacatatattgacagaggtatttgctcttcttcctgaatcataactgtacttaatctctgttactgtactaggacagtgtatgataattatatatttacctgcctgtttctactagtctgtgacttctttattatttgtctatgaacttctagtatcaagcacagtgacaaataggaaattcatttgacagcttttattgagcacctactgtgtgtcatgcactgttcaaggcactaaagaatcggcagtaaacaagataaactaagttcttatttcatggagcttacattcttggtggaagaacacaagagagtgagcaaataagaaaatacaataattccaatggagatagtgctgtggaggaaaattaagtggggcaaggggcataggggtgctgggagtagtgggttctgtttcatatagggtgatcagggtaggcctcactgagaaggtagtgtttgaacgaagatctgaggggatgagagaaaaagctatgtggatttctgtggcaaacacgttctaggcaggagaaatagtaagtaccaaagcctttagtcaggagtgtgcttgacttgtttgaggaatggcaaggagaacagtgtggcaagcgcagagtaaatggatgggcaaggggtataagacaaggtcagagaggtggtttgggactagatatgtaaggacaaaaccaatatgacagttttgagtagaggagggacaaaatctgacttaacattttaaaagtaaaccgggcgcggtgactcacgcctgtaatcccagcactttgggaggctgaggcgggtggatcacttcaggtcaggagttcgagaccagcctggccaacatggtgaaaccctgtgtctactaaaaatacagaaattagtcgggcgtggtagcaggcacctgtaatcccagctactcgggaggctgaggcaggagagaatcttgcggggattcggggcaagggcagaagcagggagatgagttggtggacattgtcataatcgaggtgaaacataatggtagcttggaccagtatagcagaggttgtaagaaatgatagaattctagatgtgtcttaaaaggagagtcacagatttttctcatgggttggatatatatggcgtatgagacaaacaggagtcaagaattatgccaaggtttgtggcctaagcagttagaaggatggagttatcatttaaataagatgggggatcccacaggagggacggtattgggaaaaagatcaggagttcagttttgtacatgttaagtttgagtacctattagagatatcccaagtggtgatatcatataaatggaaatatgaagtaagcagttggctacataagtttggaattccaggaaacagactgaatcagagagatggatttgggagtcctctgcttatagatctgtggtgtctaggaaaatagccactaattatatgtgactctttaaattagttaatttacatttaatttaatttaaaattcatctttcagtcatactagccacatttcagtgctcaatagccacatctgtgtgttagtggctattgtattaaacatagcagatatagaacatttctaatatcacagaaagttctcttggactgcagtggtatagatggtatttaaagccatgagactggataagaaccccaaggagtgagagtagataaagggaaagagagagttaagtactgaatcctgcagcactataaattaagaagttagggagatgaggagggatgggcaaagaaggccaagaagtggccaattaggaggtaacccctaagaatgtggtatcctagaagccaaatgaagaacgtatttccaggagggagtgaacagctgtgttaaattctgctaataggacaagtaagatgaggaatgagaattaactattaggattattaaagtaaaggtcactggctgtaataattcactggagtattagagtcaaaagcataaagcttttgactaccccaataaatggggtaggttcacaagaacatgggaagatatgaattggagacagccaatagagatacttttggaaagttttgctatgtacagaagcagataaatgtggtagctagagaggtgggtgagatcaagaaaggttttttttttttttttttttttttttaagataggacaatgtacagcagagaaaagttgtgcaggagtgggcggggagaattgttgggttggagagatgttctagaataggcaaaggagcgggggtgtctagtgcacaagtagaaaggttggccttaaattaggagcagaatcagtttataataacagaagggaagctagatacacagacacaggaggcacaggtagttgagtggatgcggcaatgagagctgtggaagttcttttctgattgcttctattttctttctgaagtaggaagcagagtcatcatatggtattaggatggggcaggagaagttggagatttgaagggagatgagaaggtatgaaatagccacctagaagaaatggagaatgaatggactagggaaatatagttaagttgccagatagcactaagagcccacttaaagaaaatgagatgtcagcatgattgtacatgttcatctagccacattcagctactgatgcacagtaagtatttttaaatttgattgaatttttatggaaggtcaaagggaaagcctcaccaagaaagtaatatttgaactggctcttgaagaatgtgattgagtttgctgtctggagaggagggataaggacatttcagatgaaggcagcaatgtgtgcaaaggcccagaggcatggaagaacagagtatgttcttagaaaatttgaacatcactgttggaggctatgttctaggagcaatacaatgtagtgactgtgcaaggttagacaggaagaacttgcttcatggggttttataaagattaattgaacttactaaatgttatttctgtgcctactttcagatgctcttaatgctcagcagtataaagtcctcattggtaaccgggagtggatgattagaaatggtcttgtcattaataacgatgtaaatgatttcatgactgaacatgagagaaaaggtcggactgctgtattagtagcagttgatggtaaggttttccataagtatgctataactcaatgttttgttattgttttattaatttatttatttttgagagacctctgaactatgagggttattcaaaagcatcttgaatgcaaaatgaaaatgtcaacaacacatgattattactgattaatttaaaattctctcgcatttgcctgcctttgttactttcttccctagcctatgttttaaatgaaggctaatcaaggattttttaaaacctaaaaatagcaacagtaaaataatagcaaagtaaaataatattcgtaatcccatcatcctaacacaatgtcaggttttttttgtttgtttctttgttttgtttttgttcttgtttttgttttttttgagacggagtttctctcttgttgcccaaactggagtgcaatgatgtgattcggctcactgcaacctccgcctcctgggttcaagcgattctcctgcctcagcctcccaagtagctgggattacaggcgcgcaccaccatgcccggctaattgtttgtatttttagtggaaatggggtttcaccatcttggccaggctggtcttgaactcctgacctcaggtgatccacccacttcggcctcccaaagtgctgggattacaggcgtgagccaccatgcccagcccacaacgtcagttttaattttgtatattccattcctagttttcttgaaatgtgtgtgtgtttgcagaattacagtattagtacatataccattttttactgggtacattttatcgtaagtaaattttacctcaataaagttaaaatcacttgtacacatactattttattatgctttattttacttaatgctttctaatgttgctatataattttactataatactgcataatttatcaatcttacacactataatcattcccctcttgttggaaatttaggctattcctaatatttcactattgtaaatgacactacaataaatatctttgaggttgtatgtgctttattttgttatttcttagggtaaatttctagttgtgagattaattccactctacatttataatgtctgctaagtatgaaggcagtcttttactatggcctttttaggtctgggaagaagcagagaataccattttacttttgttttgtaaatagaataaaataataagatttatggtaatatttttcccactataaagtgcccattttgtctctctctgcccccccccccttaccttaaaaagaaaaaaagtattaatcttcagtttcatttgcctataaattagataaagtgtttgaggctgttggcaaatacctttctgaggaacaaaaagggtcttctaatatccagtaaggtctctctttttattttcctgtgattactttattagtaacccctacctcactctgaaattttcataaccaaatatggaggcttgttacagagtttgtagtataaagtctgtgtgggcttagagatattttaagttaagccatgccctgaacaactttacttgagaaaattcatttcattctgaaatttcaagtcaaaatgttattctcctttcactatattccaagttcttttattttgtgctgcccctatattagatgagctgtgtggcttgatagccattgcagacacagtgaagcctgaagcagaactggctatccatattctgaaatctatgggcttagaagtagttctgatgactggagacaacagtaaaacagctagatctattgcttctcaggtaattgataggggtatgtgataacttctaattattgatatacattttatatcttgccttcaaatgctaagaaatttacattacctactattttcattatcactgagtagtcctatctggttccttcaagaaaatttaccatgctttgctggaaagactttgggctttgtgtgttgctgttatacgtaaaaaggtatttgcttagttcatgggatgcttgcgtgacactgtacaccaatttctgttgatgtgccctttgaaatgttgctcatattctttaccagtgctgccaacctaagctgggctctcctgatctcatgcctgaaacacagcaatagctccacacacatccctctctagtccatcctaaataccaccaccaatggaactattttcctaatgcaccactttgacataccatttttctgctcctgactcccacatctgccttatctctaaaatttttcaatctttttaactttggaatgccttctcccctcttctaataaataatgcaagtaatcttttaatacattcttttgtttcttttttttttcttgggacggagtttcgctcttgttgcccaggctgaagtgcagtggcgcgatctcggctcatcgcaacctccacctcctgggttcaagcgattctcttgcctcagcctcccgagtagctaggattacatgcatacaccaccacgcccggctaattttgtatttttagtagagacagggtttctccatgttggtcaagctggtcgtgaacttcggacctcaggtgatccgcccgcctcggcctcccaaagtgctgggattacacgtgtgagccaccgcacccggcctattaacaccttcttatgtaaaaaatacagaaggatataaagtaaaaatgtcctcttttccccatgctccccattcagtcctactgcccctcacactgccactttttcatatgcatatatgtgcatatacagagtacatatacagtataattctggtcttttcaacatcagatcattttgaacagattgttcagtagtttgctttttttacgtaacagtatactttggagcttcatccatatctgaacataaagttattttggccgggtttgttggctcacgcctgtaatcccagcactttgggaggctgaagtgggcagatcacatgaggtcgggagtttgagaccagcctggccagcatggtgaaaccttgtctctactaaaaatacaaaaattagccgggtgtggtggcgcatgcctgtaatcccagctactcaggaggctgaggcaggagaatcgcttgaaccaggaggcggaggttgcagtgagccgagatggtaccattgcactccagcctgggtgacagagcaagactctgtctcaaaaaaaaaaaaaaaaaaaagttacaaagttactttattctttctatactgaattccatggtatggatgtatcataatttatttaaccatttccctaatgatggacatttgggtggttttgaaaattttctttttgcaaacaaggcaataataaacatctttggacatgtatctttctgtacatgtgcaagcctgtccaagatagagctagacatggaattgctagaccaaatgatgctcacattttgatagatgctgccagatgccctccaaaaagagttacaatttacacaccagccactggtgtataagagagctcatttctccacatccttgctatcactagatattatcagtcttttaaaatgtggacatcttgtgggtgaaaactgatggcttgttattgctcagttatgtttcacgtactcattattttttaaatgaattgagtttattttcatcacataggttggcattactaaggtgtttgctgaagttctaccttctcacaaggttgctaaagtgaagyaacttcaagaggaggggaaacgggtagcaatggtgggagatrgaatcaatgactccccagctctggcaatggctaatgtgggaattgctattggcacaggcacagatgtagccattgaagcagctgatgtggttttgataagggtaagtgccatggcttgacctttgaggagtatgagactgccctatgtggtcaatgataatgtcataaagtatattgagcataacaattctgtcttaagttccatgctatcagccattaagagtttaagaatatggagtgggattatgggaagtcatgctaatttaccccctgactttctcaacccagctcataagcaagtgagaattataagtttctgaagtgaagaagaagatttaagaatggattcggaataaaatgatcttcaacaaatagttgctgagattattttaagtagatttaatcatagtaccagcatacacccctaaaagtgttttcagaaccctgaggaaaatttttgaaaaacaccttcggaagctgagtctaagttttagcattatctgagatttgtaattaattcacatattaccctaaggtagacgtaatcttcaacatacacagtatcaaatgtaaaagttactggttaagttagagtctcttactaatatcacaaatatttctgttcttagaatgatcttctggatgtagtggcaagtattgacttatcaagaragacagtcaagaggattcggataaattttgtctttgctctaatttataatctggttggaattcccatagctgctggtatgtgactcttaactagtactgctttttccactaaagttattagagacctaacatattggaagcctgtcttcttactattagttttgagcttagtttttgtttgtagcctactggtatggtgagaggtaatgttaaaatcaatcattttaattttcagtaatgtttgttatagcttaagaatatataagcattctgacagatttatttttttccctccaacttttttttttttttttttgagacagagtctcactctgttgcccaggctggagtgcagtcatacaatctcggctcactgcagcctccatctcctgggttcaagcagttctcctgcctcagcctcctgagtaactgggactataggtgcccgccacaacgcccaactaatttttgtatttttagtatagacggggttcactatgttggccaggctggtctcgaactcctgacttcaggtaatccacccacctcggcctcccaaagtgttgggattacagctgtgagccaccactcccagccttcaactttgtattttgaaaaatttcaaacttgacacctgtaatcccagcactttgggaggctgaggtgggcggatcacctgaggttgggagttcaagaccagcctgaccaacatggagaaaccccgtctctactaaaaatacaaaattagccgggcgtggtggcacatgcatgtaatcccagctactcgggagacggaggcagtagactcgcttgaacccaagaggtggaggttgtggtgagccaagatcgcgccatcgcacttcagcctgggcaacaagagcgaaactccgtctccaaaaaaaaaaaaaaaaaaaattcatacctccaaaaacattgaaaaaaatggtacaataaaaatctgtatgcctttcacctaaactcaccaactgatggtattttgccacattgcttcatctctttctgcatatatttgcacagagatatgtatttgtttgcttattaatttttttctaaatagatttacctttaatctgactacccaaacccaacactgtttgcaagattaattcatggagcaaatgatttttaaagaattatacaagtattttcctctagtcttttttttactctacatcagtttttgtcttgttacatagttgtgattgtagcttatggagaattttctgctcttcacttaatattctattatagtcagctggtattttttttaggttgagagaccagatgacagagagagtgaacaaagcaatataactgagaaaaaagaatttagagttatttaataagcatctgagaatctcctaaacttagggacctggtaggagttagtaatgatgacataaaagaaataagtattgttttcttcttgttctctctggtttgagggccaaggaaagacaagaaatgacatgagaacaattacaaaactgtttatcagcaaggacacacaaatactgagagaacaaagaacaaaagaacaatctaagtccagtaagattaattcatggagcaagtgatttttaaataattatacaagtaatatatgatcaccatagaaaaagtagaaaaatataaagaagcacataaaaagttaaaagtatgagtctatttcatcctcatcatgtgagcaaacattcttatgtctgtgaaaaccaagtgtggatgagtttgtagaacatgaactcccatacgctattggttggattttgaatcactacagccactttggagaacagctgaggaatatccacgtaaagttgaagatgtgcccatgttatgacccagtagtttcacccctaggtatataccccacagaaactctcaaacatggacacggggagacatgtacaagaatgttaacagcaacactctgttagtgaaaaaaatggcaacaacaaaaatctctaccaccaagaggataaatgctgaagaagtatcaaacaaagaaatgatttgtatgtatgttagaaacacattaataatctgtttagtattatctactctaactaatccatacttgtttcttaggagtttttatgcccattggtttggttttgcagccctggatgggatctgcagcaatggctgcttcatctgtttctgtagtactttcttctctcttccttaaactgtaagtatgatagcttgctcacatttgtattttgtattcctgttatcrtctagtcattcttggtaggttttattcttgtattgatcaatgataagcccaaaccattcttaatgagaattattattagcggccgggcgtggtggctcacacctgtaatcccagcactttgggaggccgaggtgggcagatcacctgaggtcagtaatttgagaccagtctggccaatatggtgaaaccctatgtctactagaaatacaaaaattagctgggcatggtggtagacacctgtaatctcagctactcgggaggctgaggcaggagaatcacttgaacctgggaggtggaggttgcagtgagctgagatcgtgccactgcactccagcctaggcaacagagtgagattccatctcaaaaaaagaaaagaattattattagctaacagtaataattagctatgtaattgttacttcgtgtactttatgcatagcaaccacaagcactgagtgggataaaatatagtgcactaattctgagaagtagggtttctgatgatataactccacacaattcgtttcaagctattttcctaccagtgatcacctttatacatttcataccaaaactaagtgtggatgagcaaatcttctttcttttctgcatgtagcgagcatctcatttacttttggttatttgaaactagcatacttttgcatatgtccagttacaggaaaccaacttacgagagttatgaactgcctgcccggagccagataggacagaagagtccttcagaaatcagcgttcatgttggaatagatgatacctcaaggaattctcctaaactgggtttgctggaccggattgttaattatagcagagcctctrtaaactcactactgtctgataaacgctccctaaacagtgttgttaccagtgaacctgacaagcactcactcctggtgggagacttcagggaagatgatgacactgcattataaaaggccatggagagtgctgccagtttaacttgtcatgcastgacacagcattcatgatgttaccttcacttttcaaaatattgtagaaggatttttctcatgctcttatattagggattctatttgagttgcgtttatctgttggcaaaaatatctttttcaaggcatcagctctgaacctagctttatttaaactgaatttccagtatatttttgttttcactaacaacagataaggtagagcagtgaggtttacaacaagccctacaattagagattgctgaactgctgctaaagtgattttttttttatttgaccaaaaaaaaaaaggcccaagaagaagaaaatgaaaaatttgaagatttgagagcatgaagatattcatgcttttgaactcaaaatattgaagatactctcaagcctgtatccctgccccactggggagcaatgactttcaaagcactgtgtataaaacatctagttttagaagggaaacagttgaaactgtttaaaaatagatgtgccttatttattgcaggctttctttcccccattctccctgcatccttgtccttgcaggtgcttttttagatgctccaatatgtcttcttttgttattttctttcgagctaaccaagtttaggtggtttttcattgattaaaaataactgacaactgttctaatattttgctcctttttaaattttgtagctcaaaagaccttaaaggtctgtagggttccctgcctcccatctttccactgttgtaaaaagtatatcaaattattccttcaagtttcctagctctgtgctcagtttcagttcactcctgccaagttggactctaagttattcttcatgtagtctgctgatctcagtctggaaacttaacattatgagccttttctgctcaaaaaattttcaaagattaaaactattatacatatacaggtcatataaaattacctggattcactaaatttgtttgttgttgttgttgttgttgttgttgttgttgagacagagtcttgttttgcagcccaggctggagtgcagtggcaccatcttggctcactgcaacctctgcctaccggattcaaggaattctccctgcctcagcctcctgagtagctaggattacaggtgcctgccaccacacccggctaattttcatatttttcagtagagacggggtttcgccatgttggctagcctggtcttaaactcctaacctcaggtgatccacccgccttggcctcccaaagtgctgggattacaggtgtgagcctccatgcccagcctaaatttgtattttttgaattgagtataatcactttgctagtatatataatttaatagattttatttatcttttagtgtttcagataacctctcaaaaagactttaaaataatgctattacacaaagctgcatttaccaaaaaatacagtaaaatcataatacagaaactaaaatttccctaggttatgacgctttttagctaaatatatactcttctctagtttaaaacatttgaacttgcctagttagtgtggttggcaaatttaggagcttgttcccattgccaaatggatttagaaattcccttgtgagtgcctggtagctaatacactggtcagagatctggtacttgtaagactatttaaatttctttgttagttgcaagatggatttcatatgcagaatatgtaaatgaagaggactcataagtaaattcctaacattttgttcccattaccagaagcaaagctgctgctaacccaacatctggcacataggatttgtactcggtaaatgtyagttcttttctccccttgaggtcagtaataaatacaaaaaaatcatttttctagagcagagtcttaaaatcaggtgggggtaggggatggasttcttcctttcctaccccttttctcttttatcctttcatatatacacaygcaaagtttacaaccttattccatgctgtctttcagatttagaaaagatctaatttctgtctcagctgtcttaaagagagaactgaagcttttgatgaaggtgctattaatctagaaaggcaaacccatttcactgaaatatcaatgggtttgcatatctaggccctttttttagaccaatgcctatgccatcctccatgctttcagtttgagttttattatttattattttaattccagtggcccatcttataatacaacttgtttcttctagaagacagagctgatagggtaaatgttgaaaaaagaagcatgcctccttctccctcccacccacctcaagcagttgaacacagccagttattcttccattattatgtgtaccttggagtcatcctcttggtcttgtattcatattgtgggacagtgggaatagcagcttgtagtattgaaataatcaaagagataatttcagctcttacaacaagaacagaaaacatgctaattagaaaaagtcctgctttaagtaatatgtagccacatttgaatcctctaccacaagtctttttkgcaatcttgaactttcattagcttcaaagagaagctgtmtttacaggagaaagaggtgattatggagggaatcaaaawtactgctttcagytagtagctagctttwagtcaggagttagtaatgagaaattttataaatgtgtatttctgtgtattcacatacatatatatatacacacatatatatgtacatacacatacatacatattaccatactgaagggaaatggatttatatttgaatttgatatttgaatatttgaagttctctatttatatttcatttatcactcttctgtattcactcagcaaccatgcccttagtctgaagataacaaggatactttaatatccagtgccggttcagactcacctatgtggcaccttaaacttaaatatccaaagatgccttttgaatttcaaagattaaaacacagctagagtagtagtattgtagtctcaagatgtatggtgtgtcatttgtgaaaatagaaacgttatttttcctagtttagtatcaacattttagaatgtcaaatttgatgccttgtgaacaagtaattttatattgtgctttaattttttaaaaagtattctttattcatatgtatagaatgcttaaaatagcactgtagacaagatgtttccaaaactttaagtgcgcatatcttttctgtatacagcttaaaatcaaaaatgtatgttaagagaattttttctattacttatggatcatgctttaaaatgatttttcttgatatttattttactccattttgtttttttctctgggtgaggcatctggttactggttattttaaaaagaataaagacattcctggaatcactccttttgggtttttgtttgttttgtttcttttctacatttttaagtattattttacaaaatagaaaaaatatagattcatgccaaattattacctatttttacactaactttctgcagtccctccatctggtatgagtaaccagatagagcacaaagcatgagttcttgttcttcagttaaaagagcttctttcacagtgttgataacaaatgccttttgtagccaaaaccaggcgtctcaaccttacgtttttagttaaagaaatgtttagctaaacgytgttgaacattgattgtttggtaccgaaaacagcagtggacgatgttgtgcaatatccatctactgtagttaagatattcagtagtttgtttttcataagcatgtaattgatcatatttctgccaaggatgtgccttcaactttataattatagtgttgtaaaatatttttgtctgtctcttttgttaaatcatccaaccccctctatcagcagttctgaactacctttgttatatttttatttttttcaacttttcatctatgatggaggtggattataggcatcactacactttcggttaggatgggagggaagaaatctattttccttcggactccactacacctgccatatcattcagtgaggatgagaaataaaggaaggaatattattgttctgctttcctttgtagtctctaatacattcttgatagaatgtctactccaaatgagctaaacagagaaaagagattttcttgccattggggagccctatacagagtgtttgaagttcccacccaagatacattcccatacccgaacactcctttttgagttaaggaaaccattgtaaacttgtgaggaaaaactaattttcatttccccccaaatccttggggttactcagggtgaggagataggatgggaaatggcaaaataagagtaaaatccccaaggcatccactcagcttgccagcctccctttcttattggtatcctgacctcagagaaggatgtgtactgatggctacctcccaggtgaaccttcaaaaccttccagatcaataaaacaaaacaaaaacctttctgttggagaatccttgctagattaaggcatcaaagtccctgctcaaattaaaaggaaatagagctgcatctttcacaaatttgactagggccagccagccctacttctttaacagcttcaccatcctagatgtgacccctggttgtacaaatgaagtgagagacaaaaggcaaggcttttgaaggtgaggtttaagtgaagttgctagtataaagagggtcttgtgcagtttaagaaatctgaaaacatctatacggtcagtcaccctctggaaagtttgaaataggttgagtagtctttggcatactgtacctattgccctcaatggccccaagctttccattgacatcaccttctctgcccactaaggcctgcctataaactgaagtgctgccaatacttcaaaattatttgcttcacctcacccaatcaaaactccaatttctttttaaaaaaatcttaattgtacatattatggggtacaattcagtgttctgatacatgtatacattgcataatgatcaaatcagggcagttagcatatctgtcacctcatgcatttattatttctttgtggtgagaacattcaaaagccccccttctagctattttgtaatatacaattaccttactgttaaccatagtcaccctactgtgcaatagaacaccagaacttattcctcctatctaattgtatctttgtacctgttgaccagcctctctccatcatcccctcttttcacccctacccaacctctggtaaccactgttttactttctgcttctatgagatcaacttttttttagcttctgcaaatgagtgagatcatgtagtatttgtctttctgtgtctggcttatttcacttaatgacatcctccaggatcatccatctttctcaaatgacaggatgtcattctttttattgctgaatagtattccattgtgtagatataccactttttcttcaaccattcaactgttgtcaggcatttaggttgatttcaagtcttggctattgtgaatagtgctgtagtaaacatggaagtgcagatatctgtgatgtactgattttgtttcctttggaaatacacagagtagtggggcttctggatcatatggtagttctatttttaattttttcagggacatctgtactgttttctgtagtggctgtattatattcccaccagcagtgcgtaagcatttccccttcttgccacatccttgccaacacttgtttttttaataatagccattctaaattaacagagtgaagtgacaacctacatagtggtagaaaatattcacaaactatacatctaacaaggggttaatattcagaatatataagaaattaaccacaaaaaaaccctattaaaaatgggcaaaagatgttaacagacatttctcaaaagaaaacatacaaatggccaataggtatatgaaaaaatgctcaacatcactaatcatcaggaaaatacaaatcaaaatgacattgagataccatctcattccagttaggatgactattatcaaaactccaatttcttcattgaagttattattaccgagtataggagaaaaactgagattaactcaatacatcctaaagtgccactgacctttggatcttgctagtagtatttgcaataatttgaaaagactgcttttgaacccaaatgacttcataattattgaaatgaaaaacatcaggccatatggaagaagttatttgaaggcaagtagaccccattatcagcactccaatgctcttcttgctttttacagctcattgccttccacttttgaatccacagtttctttaaaatcaccacatccccatagtgacggaaagagtgctgattttggaatccatcacacctatttgcaagataccaattctgctacttaccagctgggtgactgactatgttagtttcttattgctattgtaacaaattacaacaaatgtagtgtgttaaaaccaacttattatcttacagttttgaaggtgaagtctgaaatgggccgagatgggaggattgcttgtggccagaagttcaagaccagcctgggaaacatagtgagactctataaaaaatttaaaaaattagctgcatgtggtagtgcatgctgtattcctagcaacttgggaggctgaggtgggagaatcacttgagcccagaagttcaagattgcagtgagctatgattgcaccactgcaccactgcactccagcctgggtggcagagcaagacactatctctgaaaaagaaaaggaaaaaaaaaaaaaagaaagtgtattagtccattcttccattgctataaagaactgcctgagactgggtaatttgtgaagaaaagaggtttaattgactcacagttctgcagactgtacaggaagtgtggctggagaggcctcaggaaacttacaatcatgatggaaggcaaagaggaagcaggcacatcttacatggcataagcaggtgaaagagagtgaaaggggatgtgctacacatttttaaacaaccagatctcatgagaacacactatcatgaaaacagcaaggggaaagtctgtccccatgatccaatcacctcctccaacattggagattacaattcatatgtgagatttgggtggggatgcaaatccaaaccatatcattccacccttgccccctcccaagtctcatgttcttctcacgttgcaaaatacaatcatcccttctccacagtctcccaaaatctgaattcatttcagcattaactcaaaagtccacagtccaaagtctcatctgagacaagtcccttccatctatgagcctgtaaaatcaaaaccaagttagttacttccaagatacaacgggggtacaggcattgggtaaatacatctgttcctgaagggagaaattggccaaaacaaagaggctacaagccccatgcaaatccaaaactcagcaggccagtcattaaatcttaaagctcctaaataatctcctttgagtccatgtgtcacatccaggcaacactgatgcaagtgggatcccaaggccttgggcatctctgcccctgtggctctttagggtacagtccccagagctgctttcacaggctggcattgagtgcctgcagctttttgaggtacacagtgcaagctgtcagtgaatctaccattctagggtctgaggatggtgaccttcttctcatagttccactaggcagcaccccaatggggactctatgtgggggctccaaccccacatttcccctttgcactgccctagtagaggttctccatgagggttccacccctggagcagacttctggctggacatccaggcatttccatacatcctctgaaatctaggcagaggctgccaagcctcaactctttcccactatgcatctgcaagcataacaccacatagaagtgactaaggcttgaggcttgtaccctctgaagcaatggcctgagctgcaccttggcaccttttagctatggctggtgctagaatgaccacaatgcagggtgccatgtcctgagtttgcatgcacagtgcagtgaggccctgggcctggctcacaaaaccatttttccctcctaggcctccaggtttgtgaggggaggggctgctgcaaaggtctctgaaatgtcttcaaggcgttttccccattgtcttggatattaacattcagcttctctttacttatgcaaatttctgcagctggcttgaattcctccccagaaaatgggtttttcttttctaccacatggtcaggctgcaaattttccaaacatttatgctctgctttctttttaaatatgttccagtttcagattatctctttggtcatgcatatgaccatatgctgttagaaggagccaggccaaattaatatggtttagctgtgtccccacccaaatctcatcttgaattataatccccttaatccccacatgtcatgagagggacctggtgggaggtaattgaatcatggggcagttcccccatgctgttctcatgatagtgagtgagttctcatgagatctgatggttttataaatgtttggcattttccctgctggcactcattctttttcctgctgccttgtgaataggtgcctcccactatgattgtaagtttcctgagggctccctagccatgcaaaactgtgaatcaattaaacctcttgtctttataagttacccagtctcaggtatttattcatagcagcatgagggtggactaatacacacatcttgaacattttgctgcttagaagtttctcctgccagacaccttaaatcatcactctcaaggtcaaagttccacagattcctagagcagggacacaatatcaacagtctctttgctaaagcatagcaggagtgacctttattccagttcccaataagttcctcttctccatctgagaccaactcagcctgaacttcattatccatatcactatcagcagtttggtcacaacaatttaacaagtctctgggaagttccaaactttccctcatcattctctcttcttctgagtcctccaaactgttccaacctctgcccattatccagctccaaaaccacttccacattttcaggtatctttatagcaatgccccactcctgggtaccaatttttttgtattagtccgttttcacattgctataaagaactacttgagactgggtaatttgtaaagaagacaggtttaattgactcaaagttccacaggctgtacaggaagcatggttggggaagcctcaggaaacttaaaattatgttggaaggtgaagagaaagcaagcatgtcttacatggtgggaacatgagaaagagagtaaagagggaggcgctacacacttttaaagaactgcatctcattagaactcactatcacgagaacagcaagggggaggtccgttcctatgatccaataacctctcaccatgttcctcctccaacactggagattacaatctggacatgagatttgggtggggacacaaatccaagcatatcagaaagcaaaagagccttacttctgatatggagtaaatttgaatattttagttgtctggatagaagatcaaactagccacaacatccccttaagccaaagcctaatccacagcaagaccctaagtcactttgatttcatgaaggctgagagaggtgagggacctgctcaaaaaaaatgggaagctatccaaggttgattcatgaggtttgaggaaagaagtcatctttataacataaaagtgcaaggtgaggcagcaagtgctgatgaagaagctgcagtaagttgtccagaagatgatgaaagtgaatacactaaac

SEQ ID NO: 94515 - DNA, 28466 bp, Homo sapiens
  misc_feature (1)...(28466): n = A,T,C or G
tgataggagatcatggggcacaggggacagtttggtgagtaggcttcacactgtgctgtgtttttcccagaaggtttggtttatcattaagaagcagggaaatgtggcagaaaaacaaaaacaaaaacaaaaacaaaaacaaaacaaaaaccatggccttgattatatgacactttttttctttttctttttctttctttttttgagacggagtctctctctgtcccccgggctggagtgcagtggcgcgatctcgactcactgcaagctccgcctctcgggttcacgccattctcctgcctcaacctcccgagtagctgggactacaggtgcccatcaccacgcccagctatttttttgcatttttagtagaaatggagtttcactgtgttagccaggatggtctcgatctcctgacctcgtgatccacccgcctcagcctcccaaagtgctgggattacagacgtgagccaccgcgcctggcccgaatacgtttgttcttaatcattgccataatctccaatttctgccttccttaccattataagcataatcatgataaaatattatcttttcctagaccaatagygtccttctgacttcttttcctttctccagagtccagataaactgcctcggttcccttgtcttcttaccctctgcctaaggcatcctaggaatgtttatcttggctctacctttatcctgtacttctgctttcctgtaaggagactagtcctacctgtgaagcaccatttttcattctcagtacattgttgactatgcatatcaaagaactatatgataaagtacaccatgattttattactagtatggtttctgattgtgttctagccacacatcattagtcctgctattaagaaaactagtaccattcatttccaagacaaataggtgtccctacctaaggcattgagagataaggccatgcatattcataaggaaaattttctgctcccaaagatttaactgatttttctctttaagcttctatagtaaaaataaccagaagttcagggaataagatcaagcccagaatcacatcattcctgactgtgaaaaacagatctttggtatctatataacccaagaacatggcttggtttcatacgtgaactgagaatattaatatttatatagtagtcataaaaacaaaatgatatcacttgcatataattcgatgatgttcaacactgtgtcttgcatatggtaggtgcttagggcacagttttctttcccctaagatagtgcatctcaagtgatgtttgtttcataaaattggagaagggaatttaagtcattttattgtttcatatatgaagtatttaagctttgtgttccaaatacgtcattggtaagacctatcctttgtgcaaggaaccctgaaagattaacttaagaggaccttactttagcaatgaattcccatagacagatggcacctctgatggatcactgtatatgccactaagtcccactttggtcaggagagttcattacagaaggctcactctcacccattctgctgtttgctgcacattcagacttctaagattattcaatgctttctcattttaattaaagtaatttcatccaaatgaagccatatagtatgtccaattttacaatgtgctgatattttgcaactacatgcaacatttgtgtttatattacatttgtacacctatttctttgtgttttgattgcaaattaaaaggtgagcttggaaagatgacattaaattttggtaatgaatatatgcagttatatcaagttcagctagttcatcttataaataaagtacttttaagcagaaatccagacaatctttcatgggagcatttcagaggtaaatgttagtccctctctgcacctctgcctccttccgtctccagcatgcagcccccaggcagctgtcctgacagatgtctactccacaagggctaggctggactttgggcataaaataacttaaaagagggtacagctagaccctagctgttctccaaatcaaagtttcaccaaaagcaggtattggattaggagatatgagaactattttccacccctaagccaaaactgcccattttagaatgttatcacttctgtatataagtcgctatagacttttctagctagcactttctgtggctacttaatgaaaacacccaagggacccagaaagttattctttattgttccttaaaactaggggatgatgggaagggtatttaagctcctcagagaaaacaaatggacagtgctgctgtctctccttcccacccccacccccaaatccctttaatttttttctttctgtgaaccaggtcacatgatgatcaactctgtggttggaagtcaggaatcttcaaaggagtgggatgattctgcaagaactcccacattcttagtgattgcacagtacagtctgatcaaccctcctgaaaaggacagctgcttcatctcgataaacccatcgtcataaatcacacgatggaatattacacagcaatgacaaggaatgaacaacgggccataaaaccacatgagtaaagttcaaaaacattctgtggagttgaaaagtacgtggtgtaggagtcaatttatgaaattcaagaacatgtagagcatggtatgacagaagtcagcataatgaatacttctgctgtgaagattgactggggaaaaggatggaaaggctttctgagtgacagaaatagtttgtatctttatctcattgacagtcaagtagctaaaaattgacctggatgcacacttcagatttccacattgcactgtatttacattacacttcaatttttaaaggcaaaggaaagaagatggtgacccctgtggtagtagtggatgtttctcagtggtccgaattctagagattttcctggcattaggaaaaaaatgcaggatttttaacatatatagccaagagaagttgaaaaacatagctaaaatgcgcttaaaaacaaaacaacacaaaacattagcatagttcctctccctctcctctttctctcttttgttcaaatgctggaagtgaacaacaattgttttgataataaaataactacacagtgtcaacaatgtttccttcattgagttttgaggctacagcaatgacaagaaaaaatggattttcatgttaagaatctcaccatctaaaagggagttatagcatcttttataatattaagttgcatttgctgactgctacctatttacactcaactatacacttacaaggttctacctgcttttttgtattaactattttaacactcacaaccaacattgaaggaatgaaatatcttgcctcaaatcaaagaattaataaatggtaaaggcaatatttgaagcagacagtgtatttctggagactattctctcacccactacatgctattaacatttaaccatgctatgagataaacaaagaagttctctcctagtttgacttctgtggcatctgtttcttttctttttttttttttttaacctttccccttctcttctctactttttactttcctctcctgattcactttcatctgcctgcctgttgaatatcaatgttccacagtttatttcctcggccttagtttcttcaaattctggaattccatccagaaagaaacatcatttattgccagtttcagtcaccatatgtctttctttctggggaactcatctacctgcatttccagaggcaatttcaacttatctggtctgtcatttaactctatatctttcttccaaagcttgtttctcctaccatgaaagttggaccttccactcaacttgaagtcttgtcagcacctttgaccagctttacacccttatcctccacaacaaatgcacagtgacctcctgtctctcatacccttcccctccactccactaacattaccttggctcagctctcatctcttacctgaattgtaacatcccccagtttcacccatccaaatacatttccacactgtggagaacacacaggaagctttctaaatttcaaatgtgttcactctactcccttgctttgaaacctacatttcccacaggataaagtccacattttatggcatgaaaacctttgccatcgtgcccagatgttaatggtggaagtgccagcctaggcaaacctaggcaggtgcactaggttggaaaccgtgtcagaagcaatgtaggaatgaggattaaagccacaggtaaagtcaggtcagaggtctttggaaagtctttatgaaaatggatgaggtgtgggcttggtactgatactttgaaatgtttacttgcatcgttcgttcatcattctcaggaaaagcagcaacctgcagctgggttctaaataagatttccagttttgtccagtccatcccagatgcacccaggtgctctcttccttcagaggaaagaaatatctagtccatcaatcactgccccccttccaatattttagggtatgccctattttcccattagttcttggtttaggctacttctttcccctgcccttggcttcctttctgtcgggagaattggctcaccaaattccacttttcctactgtgattttattataaagatagaaaaagctaagtgttcatgttcccagccttcagtgtagcttctgacggtcacgtaacataaatgtgctcagtccagcattcacagaactctgctgctgcctctctttctattccttcttcctgcttggaatgcagatgtgatgttagaattggatcagagaaactgtgactctggggccatgaacccacccacttcactcagagttatgggaagcttaatgtgaatgtgctacatcgaccctggctcagctgcctctgggctccctgggaagtgagggaaatacagccatatttgttaaggggaaagttggagtcgctctcggctccacacagctgaaagcattattaactgatacagcctttttcattcataaattataaggaaggcataattgtccttacttcacagacatctcatagaatagaaaagctaactaagctggtttatcttggaacaagattggaaacttgttatctgaaactaaagaggtcattttccactctaaggtcagtcccagtgcaaagaccagcagttgtttttgttctctcttttggagataaggaaattgtggcacacagaagctttgagtcttgcaagtaccataaaccatgttctttctctgcctctcttctgaatctacttccttgccgtaccattctactcaacacagccaatcagaataaagtctttgtcactcttttaagtcaagaatctaccttagatatcagtgggaatattttattaaaaatacagcactaacagttacagattttatctatctttgaggattcttttgtgtattatttctaaggtatcaaagaataatgggccatttccctaaaggatatttagtatttattctactgtaaaaattgctaacactgttattaaatatatcagaaaatgtttccctgtttgaccactgtttttgaattgtggccatagaatcattaattagtttttaggtactcaatattttataatctgttcactgagcatgataaagtaattaaaatgaattagactgagaagctacagagcaacagatgttaataccgattgtaaatgactgaaagaagctgaggagcaagctgaggaattaaagatgattctttgatatgcatttaggatatgacacttctataacctcattgaaggggattccactcctttatgcaaacgtgtcattaagaagagaccccctggtctctggaagcctccaagatctcaatacttctctgcatccacatttattttcctttttttactctagtattcctgtctctgtgacatcctattgtttcccaatttaatttccatcttgaatactatttcctgatttgatctctcatctctgctgccaatcccctggattcatgactgcagctcatgcaaaagctctcatctcttacctggaattagaagaggcacccaagctcctgctgggatcagagggtgggccttctgttacatattggagactagaacaagcaaggatcttgccctatgctgacagagatcacatttatttttaaattttgtgtctgtatgtttgtgattccattttattcccatttcttttaggagatatctgctagccatgaattcacttagttttctttgactgagaaagccttcattatttctttttcacttttgcagaatatttttgctctatatatgacagatttttgtgtttatctttctgttttatctttctacactttaagtataccatgccattgtctctttgcttgcataatttatgatgagaagtctgctgtaattcttatccttgttcctctgtgaccagcatgatttttttttcccactttctttggagatttgctttttgccctggcttcaggggagtttgaataggatatggggtgtgtgtttgtgagtgtgagtgtgtgwgtgtgtgtgtgtgtgtgtgtgtgtgtgtgtgttttcagtattaattctgttttttttcctctaaactccttaggcctgtagttttgtttattggttttagaaaattctcagtcattatttcttcaattttttttatactcccttctccttttcttattctcagaatgcaactatgcatatgttacactatttgattgtgtcccacagtgttgggatgttctattagtgttctggttttgtttttcattttttttctctttgcttccagtttagtaagtttctataaacctatgtttaagtttactgattctttcctcagccatgtccagtctactaatgagtccatcaaaggaatttgtcatttccattgctatatttttatttccagtatttcaatttgattttttcttataatttccatctctctattcaaattatccacctggcactgagtgttgtcattttgtctagcatttccattgaagccgttaacatgttaagcagagttttctttttcaaattccttgtctgataattccagcctctgtgtcatggctctgtctagttctaacaattgctttgtcactttgaatgactttttttcttgctttttaatattccttataattttttggttatagctagacatgaaaagaacagcagatattagataaattttatatgttgggagaaaagcacaagtttccttgtgtgaggccttaaatgtggagatggatgttcatctggtcagaagacaagctgcatttgaaactgtttgtgccatgggcaccagcgctttctggccactccattggtgcccttttttggctcccacttgactgagtctccccatgtgcctcttcacagttgtattccactgctacttttactgctgttttttacagtggtggtggtcctggctaagaagaaggttatctgatgttcacatttagctaaagattttggcacgtatcaaaacctaagtcctggacatgtagccttcacagctattcctgtcccttttcctgggataaaaattcttcctcatcttattgctcctcttctttttcccaaattgcagtggttttgaagccttttctcctgcagattgagactttggttgcttaggggaaactgggattatgcttctggttggagatttggtggtgatctctatttccatctttcagtttaataaattaaaccagtgtctcagggttaactttgataattttccctccagattaagccttttatccatgaagtacatagttggaaatagtctgggtagatttggcagtggctgcttcttccaccaaccccagccagcactacagtgtgtgtggggaaaggagtgagggatgaactttttctaggttcttctttgttcccctttgtaaatgttgggtgagttcctggacaaaaagctcacaagagagtggaactctctcctaggaatacagcctttggaagcttcacattctcacactagcccacccgcagcctccaaaagttctatacaatttttaatttttgattggcttatataatatacagtggctcctgtttcagatgagaaaatgctggagccttctctccagatgtcgggatgtcacttttccctatgatatagtttggatgtttgaccccttaaattttcaagttgaaatgtgatctccagttttgaagtggggtttagtgaggacagtttgggtcatggaagcagatccttaatggatggcttggtgctgtcatcacaataatgagcgagttctcactttagtagttcatgtgagatctgtttgtttaaaagggactggaacctcccgtattctctctctctctctttttttttttttttttgttgttgttgttgagacagagttttgctcttgttgcccaggctggagtacaatggtatgatctcagctcactgcaacttctgtctccctggttcaagtgattctcctgcctcagtctcccaagtagctgagattacaggcatgcaccaccatgctaggcagggtggctcacgcctgtaatcccagcactttgggaggctgaggggggcagatcccttaggtcaggagtttgagaccagcctgacaaacatggtgaaaccttgcctctactaaaaacacaaaattagccccttctctcttgygccctctcttgacacatgacaatggctccccttcaccttctgycatgattgtaagcttcctgaggccctcatcagaagcagatcaccacacttcccatgcagcctgcagaagtatgagccaaaatataccaactaactttataaattactcagtctcaagtattccttcatagcaatgcagactaacaaatgctacaacctcagttttctgatgggtccaagaaaagtcattgattttcattttgctcagatytcttgttgctgtggggcagatataacgacttcccaggtctttacatgtctgagctgaaactggagtccttatatcagtggtaaaaataaatactctacttaatgttattccattttacattcaatgyaatcaaggaaattaaattcttatacaaggagcctgaccgtgttcccattggaaagagttttatctagtaatttcactctasgtaggtgattaaatcacatggggacaaagtgagtgggcttatgctgcacagtgaattagtaaaagagcttcagatgagctggatttacatggactattcctataacttacagcttggacacttttaggccgaacaaagactacaactcatattccgctttcaagttgttatattttccacaaatcatttaccatttaaataatcatctgcatataaaattgtttactttagccctctcaaaatagataatttgaagctaaaatacgaattgtcatcctctgtaatttagagagcattttatatgacaattaaatgctgagcatggttagatgcttttgagaatacactgtaccatcctggtggcttatgagctttaggggagaatgaygcataaatatgaragaatatcaagaactaagagattcatagaagtgctaagtgcaggcccattatggaacatatcagcttacaggccagacactgaaataatgggattatgataggtaagagtgtccagtccaggccaggttattttagaggaatcatgagaagagcccactctgtcctggagcctacatggatggaatttttctgaaacatttcaaataaaagtaaaataagcaatctatcaattgccattaagtaacagaaaatttctttatattattccaaaagtatatcattagagctggaatttagtaggtgacctataatactggtgtttctggtcagctatcctggccaacccscagtctgcttttctaacatgtaacattagcagagaccatcatttatccggatctgtgaagcctcccagaagagmctgcaaggtgaacagcagccaaaaatcagtgctgtggaaaaatgtgagcttctacctcacatgcctcctttcctgtttccygcagtgttcagagatggctactcaaggtcatggttaccctcacacacagattctgaaggctactcttggctacaattcaggtaatgtccaacagggcaaagtgagagactagtttcttgtcaataatgataatcttttttaatacctaacaccaaaacagcaatcaataccatattggacttactcactcgttgggaatgttcagctaactaaagaggggtctggaatgaagattcagaacagtttcaggaacatatttattggagtggcattcaaattataaaacattgtaagtatttggaggagaaaacttcaagttgtatgtgtgtgtgtgtgtgtgtgtgtgtgtgtgtgtgtgtgtgtgtgtattggaattgagggaacattagaaattcctaacttagtaattaagcttcttgttattttcactgaaaaaggaaatctcagccttataattttcagcagatctaacccctaatttaaattctttgtctacttttcttcatttttttttttttgatgaatgccagccaaatcaatagcacccaagccaatctcactggtaatgttcttaaaggaaatatatacccagaatacttgccaggcgtgrcctaaacagctactatatgcatattatttccagattcttaatgtgtccctagcccagagaaaggcctactttagccttgttacagcttatatcaaggcccagtctcagaaatatttcttcatctcagaaatactttcatgactctgattctatgaggaaagacatcatgcaacattcagccattgtyaatatcacttttttctctttttcttgaacttacgcaatgaygttcataaatatccattttcaatgtatctattgatccatgaatacatttctgaaaggtcatagaaacttgamactaacttctaaggctttagaactttcttctttgcaaagaaccaaatcttgtttatttttcattcacattagatagtataacacagtcacatgaaataaagcaaaatgagatgaaaaacagtgtgctagttactatcattctatcatttaatactcaacataactctagcaygtaggctatgctatttataatttcaaaatgaggagacaatttcaagtagatgtagtacattgaagtcacatggtaaagagcagaggatttgggatttatatgaagatctgttagccttagagcagggtattcaaattttgccttccctgggccacattataagaagaagaattgtcttgggccamatataaaatatattaatcatagctaatgagctttaaaaaaattgcaaaaaatgtcataatgttttaagaaatttaygaatctgtgttgggccgcattcaaagctgtcctggcccacatgyggcccgcgggttgtaggttggacaagcttgccttagagcctacgtatgtgaagtaaattatattccattaaaatcttaaaggagtttatcataactaccaggaaaaatatttctaaagaatcatattttcatagataaaacacttagtgccatagcaagacctgctcatgatgactggacacttcagaggcaaaggaaacaagccttggtktagccttgtgccctttcagagtgagcctttccaccctcttctgatggaaaaacttccactcaagcttaacatctcactaaagcattacctttcccctgaagacagacaggtggtggctctttcctccrtgtcctcaggattaggactgcttgtagaatatttctgcacccccaacacctagctcagayackagaacacaaaagaaatgtgataagtatgtgaaagaagaaaaaaggtgagatgctgatcactgcaagccttgacaacagtagccatatgccatgacatccatttgtcaacaatttattttcctattattttcttatttaaattccccctgtgttaatgagaagcacttcagttaagtgcttaataaacaagcaattacttaatagacattaatggcctgctgtattattgcctgtaacataaagggatagtgagaggtacaaataaaacccaacattyatacatcatcttaaggtattagagagtattttataatataggcattacttgttaagcaattgcgcactttgctaattgayttggggtgatggatgaaagattagcataaataacccctttttgaagtaaactaacattagcaaggaagccacatggcactggattttgactaatttgatcaagaaacggtcttcctttgttcatttatatataagtttgytaatttgcccaaactaagctcaagtctagaaaacagtacttcatagttgcaagtaaacctgagcggggccttcttatcgtaattgtttcattttgcttcacagctgagtgtcttttcttctactcaggtgaccagttaatcctgacagaagctcccagccctctgtaattcakccctgtcatccttgtgacgtggattacctttctggctacaaattgaatcatggtgcctcatcacagtgttgttctccaagcctggaaggtatcctctgaacagacagcatgccaacccatgtcacccttgccttcttccccccacctctcattamggtattgcacagagattggactggaagtcagacagatgtgggctgaagccctggctcccctaactgtggaatggtgctgttttctcagtctctctggtcctcaacttctctttataaaatcggtggacagtgggagcatataataatctcaagtacttaaaaaagttttaacttcttctaagctcctagtaattgcttttatttctcttayaacattttaattttttatcaaaataacacatgtatggaattcaaaatggaaacaaaactaaaaaagcaaaaagactttttccattccacttttcccactgccaaggacagactctgatcaatcytcagaaagtctcaaattagactgtaacttggatagcaaacaatgaagaagcttaaaagaaagagaaaagtaaaaatataaggtaagttggtaatttaagaaatgcatataggaagtaatttawctcaaaatatattccaccactcagaagcagataatatacattttatcctagaaatgtaacataggatattgctctaatccaaaactaccctgggaaaatgaaaggaggtggtgaktgtgtgtgtgttcaacaatggtatcctcattttgcatagcagcaagtcaacagacaattcttaaaactgaaaaacagggccaggcgcagtggttcatgcccgtaatccaagcactttgggaagctgaggtgggtggatcacctgaggtgaggagttcraraccagcctgaccaacatggcaaaaccctgtctctactaaaaatacaaacattaattgggcatggtggyaggtgccggtaatctcagctactcgggagcctgaggcaggagaattgcttgaamccaggaggcggaggttgcagtgagccgagatcatkccattgcactccagcctgagygacasagmragactgcatctcaaaaaaaaaacaaaacaaaaatctgaaaaacaagaaattatgacataagccaattgytttagaaatacaggtggacatcatactcaggagaaaaatgattaaagtgattgtccctagcaaactaatgtaaccacaaataaaaaagtaaaattacctagtttttcaaagctgtttatcacattacagcagctgtgcccaactggtctcctcttttctctcaaagtctttatgtttttgtgtctttgctgaattgtttaattctttgctgacgctttctagtttttgttttgttttgtttttttgctgtgtacagtcattcctctgtatccatgagtgattgattggttccaggacccctcttgaatatcaacatatgaggatgctcaagattctgataaaaaatagtgtagtatttgcatataacttatgcacatcttcctgtatactttaaatcatctctaggttacttagaatacctaatacaatgtaaatagttgttatactatactggtttcttatatgtattatttttatcgtattgctgtttattattttttaatatttnnnnnnnnnnnnnnnnnnnnnnnnnnnnnnnnnnnnnnnnnnnnnnnnnnnnnnnnnnnnnnnnnnnnnnnnnnnnnnnnnnnnnnnnnnnnnnnnnnnnnnnnnnnnnnnnnnnnnnnnnnnnnnnnnnnnnnnnnnnnnnnnnnnnnnnnnnnnnnnnnnnnnnnnnnnnnnnnnnnnnnnnnnnnnnnnnnnnnnnnnnnnnnnnnnnnnnnnnnnnnnnnnnnnnnnnnnnnnnnnnnnnnnnnnnnnnnnnnnnnnnnnnnnnnnnnnnnnnnnnnnnnnnnnnnnnnnnnnnnnnnnnnnnnnnnnnnnnnnnnnnnnnnnnnnnnnnnnnnnnnnnnnnnnnnnnnnnnnnnnnnnnnnnnnnnnnnnnnnnnnnnnnnnnnnnnnnnnnnnnnnnnnnnnnnnnnnnnnnnnnnnnnnnnnnnnnnnnnnnnnnnnnnnnnnnnnnnnnnnnnnnnnnnnnnnnnnnnnnnnnnnnnnnnnnnnnnnnnnnnnnnnnnnnnnnnnnnnnnnnnnnnnnnnnnnnnnnnnnnnnnnnnnnnnnnnnnnnnnnnnnnnnnnnnnnnnnnnnnnnnnnnnnnnnnnnnnnnnnnnnnnnnnnnnnnnnnnnnnnnnnnnnnnnnnnnnnnnnnnnnnnnnnnnnnnnnnnnnnnnnnnnnnnnnnnnnnnnnnnnnnnnnnnnnnnnnnnnnnnnnnnnnnnnnnnnnnnnnnnnnnnnnnnnnnnnnnnnnnnnnnnnnnnnnnnnnnnnnnnnnnnnnnnnnnnnnnnnnnnnnnnnnnnnnnnnnnnnnnnnnnnnnnnnnnnnnnnnnnnnnnnnnnnnnnnnnnnnnnnnnnnnnnnnnnnnnnnnnnnnnnnnnnnnnnnnnnnnnnnnnnnnnnnnnnnnnnnnnnnnnnnnnnnnnnnnnnnnnnnnnnnnnnnnnnnnnnnnnnnnnnnnnnnnnnnnnnnnnnnnnnnnnnnnnnnnnnnnnnnnnnnnnnnnnnnnnnnnnnnnnnnnnnnnnnnnnnnnnnnnnnnnnnnnnnnnnnnnnnnnnnnnnnnnnnnnnnnnnnnnnnnnnnnnnnnnnnnnnnnnnnnnnnnnnnnnnnnnnnnnnnnnnnnnnnnnnnnnnnnnnnnnnnnnnnnnnnnnnnnnnnnnnnnnnnnnnnnnnnnnnnnnnnnnnnnnnnnnnnnnnnnnnnnnnnnnnnnnnnnnnnnnnnnnnnnnnnnnnnnnnnnnnnnnnnnnnnnnnnnnnnnnnnnnnnnnnnnnnnnnnnnnnnnnnnnnnnnnnnnnnnnnnnnnnnnnnnnnnnnnnnnnnnnnnnnnnnnnnnnnnnnnnnnnnnnnnnnnnnnnnnnnnnnnnnnnnnnnnnnnnnnnnnnnnnnnnnnnnnnnnnnnnnnnnnnnnnnnnnnnnnnnnnnnnnnnnnnnnnnnnnnnnnnnnnnnnnnnnnnnnnnnnnnnnnnnnnnnnnnnnnnnnnnnnnnnnnnnnnnnnnnnnnnnnnnnnnnnnnnnnnnnnnnnnnnnnnnnnnnnnnnnnnnnnnnnnnnnnnnnnnnnnnnnnnnnnnnnnnnnnnnnnnnnnnnnnnnnnnnnnnnnnnnnnnnnnnnnnnnnnnnnnnnnnnnnnnnnnnnnnnnnnnnnnnnnnnnnnnnnnnnnnnnnnnnnnnnnnnnnnnnnnnnnnnnnnnnnnnnnnnnnnnnnnnnnnnnnnnnnnnnnnnnnnnnnnnnnnnnnnnnnnnnnnnnnnnnnnnnnnnnnnnnnnnnnnnnnnnnnnnnnnnnnnnnnnnnnnnnnnnnnnnnnnnnnnnnnnnnnnnnnnnnnnnnnnnnnnnnnnnnnnnnnnnnnnnnnnnnnnnnnnnnnnnnnnnnnnnnnnnnnnnnnnnnnnnnnnnnnnnnnnnnnnnnnnnnnnnnnnnnnnnnnnnnnnnnnnnnnnnnnnnnnnnnnnnnnnnnnnnnnnnnnnnnnnnnnnnnnnnnnnnnnnnnnnnnnnnnnnnnnnnnnnnnnnnnnnnnnnnnnnnnnnnnnnnnnnnnnnnnnnnnnnnnnnnnnnnnnnnnnnnnnnnnnnnnnnnnnnnnnnnnnnnnnnnnnnnnnnnnnnnnnnnnnnnnnnnnnnnnnnnnnnnnnnnnnnnnnnnnnnnnnnnnnnnnnnnnnnnnnnnnnnnnnnnnnnnnnnnnnnnnnnnnnnnnnnnnnnnnnnnnnnnnnnnnnnnnnnnnnnnnnnnnnnnnnnnnnnnnnnnnnnnnnnnnnnnnnnnnnnnnnnnnnnnnnnnnnnnnnnnnnnnnnnnnnnnnnnnnnnnnnnnnnnnnnnnnnnnnnnnnnnnnnnnnnnnnnnnnnnnnnnnnnnnnnnnnnnnnnnnnnnnnnnnnnnnnnnnnnnnnnnnnnnnnnnnnnnnnnnnnnnnnnnnnnnnnnnnnnnnnnnnnnnnnnnnnnnnnnnnnnnnnnnnnnnnnnnnnnnnnnnnnnnnnnnnnnnnnnnnnnnnnnnnnnnnnnnnnnnnnnnnnnnnnnnnnnnnnnnnnnnnnnnnnnnnnnnnnnnnnnnnnnnnnnnnnnnnnnnnnnnnnnnnnnnnnnnnnnnnnnnnnnnnnnnnnnnnnnnnnnnnnnnnnnnnnnnnnnnnnnnnnnnnnnnnnnnnnnnnnnnnnnnnnnnnnnnnnnnnnnnnnnnnnnnnnnnnnnnnnnnnnnnnnnnnnnnnnnnnnnnnnnnnnnnnnnnnnnnnnnnnnnnnnnnnnnnnnnnnnnnnnnnnnnnnnnnnnnnnnnnnnnnnnnnnnnnnnnnnnnnnnnnnnnnnnnnnnnnnnnnnnnnnnnnnnnnnnnnnnnnnnnnnnnnnnnnnnnnnnnnnnnnnnnnnnnnnnnnnnnnnnnnnnnnnnnnnnnnnnnnnnnnnnnnnnnnnnnnnnnnnnnnnnnnnnnnnnnnnnnnnnnnnnnnnnnnnnnnnnnnnnnnnnnnnnnnnnnnnnnnnnnnnnnnnnnnnnnnnnnnnnnnnnnnnnnnnnnnnnnnnnnnnnnnnnnnnnnnnnnnnnnnnnnnnnnnnnnnnnnnnnnnnnnnnnnnnnnnnnnnnnnnnnnnnnnnnnnnnnnnnnnnnnnnnnnnnnnnnnnnnnnnnnnnnnnnnnnnnnnnnnnnnnnnnnnnnnnnnnnnnnnnnnnnnnnnnnnnnnnnnnnnnnnnnnnnnnnnnnnnnnnnnnnnnnnnnnnnnnnnnnnnnnnnnnnnnnnnnnnnnnnnnnnnnnnnnnnnnnnnnnnnnnnnnnnnnnnnnnnnnnnnnnnnnnnnnnnnnnnnnnnnnnnnnnnnnnnnnnnnnnnnnnnnnnnnnnnnnnnnnnnnnnnnnnnnnnnnnnnnnnnnnnnnnnnnnnnnnnnnnnnnnnnnnnnnnnnnnnnnnnnnnnnnnnnnnnnnnnnnnnnnnnnnnnnnnnnnnnnnnnnnnnnnnnnnnnnnnnnnnnnnnnnnnnnnnnnnnnnnnnnnnnnnnnnnnnnnnnnnnnnnnnnnnnnnnnnnnnnnnnnnnnnnnnnnnnnnnnnnnnnnnnnnnnnnnnnnnnnnnnnnnnnnnnnnnnnnnnnnnnnnnnnnnnnnnnnnnnnnnnnnnnnnnnnnnnnnnnnnnnnnnnnnnnnnnnnnnnnnnnnnnnnnnnnnnnnnnnnnnnnnnnnnnnnnnnnnnnnnnnnnnnnnnnnnnnnnnnnnnnnnnnnnnnnnnnnnnnnnnnnnnnnnnnnnnnnnnnnnnnnnnnnnnnnnnnnnnnnnnnnnnnnnnnnnnnnnnnnnnnnnnnnnnnnnnnnnnnnnnnnnnnnnnnnnnnnnnnnnnnnnnnnnnnnnnnnnnnnnnnnnnnnnnnnnnnnnnnnnnnnnnnnnnnnnnnnnnnnnnnnnnnnnnnnnnnnnnnnnnnnnnnnnnnnnnnnnnnnnnnnnnnnnnnnnnnnnnnnnnnnnnnnnnnnnnnnnnnnnnnnnnnnnnnnnnnnnnnnnnnnnnnnnnnnnnnnnnnnnnnnnnnnnnnnnnnnnnnnnnnnnnnnnnnnnnnnnnnnnnnnnnnnnnnnnnnnnnnnnnnnnnnnnnnnnnnnnnnnnnnnnnnnnnnnnnnnnnnnnnnnnnnnnnnnnnnnnnnnnnnnnnnnnnnnnnnnnnnnnnnnnnnnnnnnnnnnnnnnnnnnnnnnnnnnnnnnnnnnnnnnnnnnnnnnnnnnnnnnnnnnnnnnnnnnnnnnnnnnnnnnnnnnnnnnnnnnnnnnnnnnnnnnnnnnnnnnnnnnnnnnnnnnnnnnnnnnnnnnnnnnnnnnnnnnnnnnnnnnnnnnnnnnnnnnnnnnnnnnnnnnnnnnnnnnnnnnnnnnnnnnnnnnnnnnnnnnnnnnnnnnnnnnnnnnnnnnnnnnnnnnnnnnnnnnnnnnnnnnnnnnnnnnnnnnnnnnnnnnnnnnnnnnnnnnnnnnnnnnnnnnnnnnnnnnnnnnnnnnnnnnnnnnnnnnnnnnnnnnnnnnnnnnnnnnnnnnnnnnnnnnnnnnnnnnnnnnnnnnnnnnnnnnnnnnnnnnnnnnnnnnnnnnnnnnnnnnnnnnnnnnnnnnnnnnnnnnnnnnnnnnnnnnnnnnnnnnnnnnnnnnnnnnnnnnnnnnnnnnnnnnnnnnnnnnnnnnnnnnnnnnnnnnnnnnnnnnnnnnnnnnnnnnnnnnnnnnnnnnnnnnnnnnnnnnnnnnnnnnnnnnnnnnnnnnnnnnnnnnnnnnnnnnnnnnnnnnnnnnnnnnnnnnnnnnnnnnnnnnnnnnnnnnnnnnnnnnnnnnnnnnnnnnnnnnnnnnnnnnnnnnnnnnnnnnnnnnnnnnnnnnnnnnnnnnnnnnnnnnnnnnnnnnnnnnnnnnnnnnnnnnnnnnnnnnnnnnnnnnnnnnnnnnnnnnnnnnnnnnnnnnnnnnnnnnnnnnnnnnnnnnnnnnnnnnnnnnnnnnnnnnnnnnnnnnnnnnnnnnnnnnnnnnnnnnnnnnnnnnnnnnnnnnnnnnnnnnnnnnnnnnnnnnnnnnnnnnnnnnnnnnnnnnnnnnnnnnnnnnnnnnnnnnnnnnnnnnnnnnnnnnnnnnnnnnnnnnnnnnnnnnnnnnnnnnnnnnnnnnnnnnnnnnnnntccccttcctgtgtcctgttttcatgcagtaaagaaggcaatgcagtatggcttccttaatttcaactcatttaaccttgatgaatatgaacactatgaaaaagcagaaaacggagatttaaattggctaataccagaccgatttattgccttctgtggacctcattcaagagccagacttgaaagtggttaccaccaacattctcccgagacttatattcaatattttaagaatcacaatgttactaccattattcgtctgaataaaaggatatatgatgccaaacgctttacggatgcrggcttcgatcaccatgatcttttctttgcrgatggcagcacccctactgatgccattgtcaaaagatttctggatatctgtgaaaatgctgagggtgccattgcagtacattgtaaagctggccttggtcgcacaggcactctgatagcctgctacatcatgaagcattacaggatgacagcagccgagaccattgcgtgggtaaggatctgcagacctggcttggtgatcgggcctcmgcagcagtttttggtgatgaagcaaacaagcctctggctggaaggggactattttcgtcagargttaaaggggcaggagaatggacaacacagagcagccttctccaaacttctctctggtgttgatgacatttccataaatggggtcgagaatcaagaccagcaagaacccaaaccttacrgtgatgaygacgaaatcaatggagtgacacaaggtgatagaagtcgggccctgaaaaggcraagacaatcaaaaacaaacgatattcttctcccatctcccctggctgtgctgacctttacactgtgtagtgttgtcatctggtggattgtttgtgactacattcttcccatcctgctatyctgactcraagatttcagaacatagtagccatcaggaccccctgacagatagctgcttctctccatttcaaggactaaaaykgttttgcattaagtaaaaacctgtgaccagaactgaaggaagactctaggaactgaaaactgcaacagaaattagcacaatttgaaaacaaaacaaaattgcaaaagacttagttgctttccacctaagaagctaatcaatggrgaaaatgtccactggggtttcagtaatgaacttttgagtttgggtgcaagcaaatgtaccaagaccagctcagtcagggagaccctaccccagtggtgctagaggaattaaagacacacacacagaaatacagaggtgtaaagtgggaaatcaggggtctcacagccttcagagctgagagccccgaacagagatttacccacatattgattaacagcaaacaagtcattagcattgtttctatagatattaaatwaactaaaagtatcccttatgggaaacgaagggatgggcctaattaaaggcataggttgggctagttaactgcggcaggagcacgtccttaaggcacagatsgctcatgctattgtttgtggcttaagaatgcctttaagcagttttccactctgggctgggtgggccaggtgttccttgccctcattccggtaaacccacacccttccagcgtgggcattagggccattatgaacatgwtacagtgctgcagagattttatttatggccagttttggggccagtttatggctggattttggggggcttgctcccaaaaagaatgactcaaagaaaggcccagctctcaagctgaatgacaaaaatgctgttgtaaatttagtctcaggtgtaaatacccaagccctctggtacycagggagctggctggtctgtggtgcatgtgtgtccttgtgatggcaagcattgtagttgmtggccttcagaagaattgaggatctgatggaggttttttaatgtatttattttctgttcagcttgygaccctgtgtcaaaatttgtaaagatacaaaaggcattactgaaatggtactttctgtaatttgatactatttggctttaycatcttcacttgactgtttgtaatactgtagtaatattaactctgataagtacccaagctgcttgtcttctaccaaagagtgctttattaacaagaatctgtgaaaaccacattttaaacactgttgcatgttgtaataycaggtgataccttggtaacctaaaacttgcaagagaatattartggtagctttagaagactcaggaggagaaactgacttcagagytggaagatgttgcaagtcattcctttttctgtcctttagggactgaagaactgggaggttgcccattgtttggttgccagtcatacaaattaaaatcatatttccttccatgcatggaaaaaacacactattggtttttcgccttggaaacagcaatcycaaataatgtcggctttaaaaaaaaaawgttaccgcttttttagagtccttctctgtaayattggatttttttttccttatgagatcagcctaagkccattgataaggcctgtgatctcagtaacaatgatctgcttctgaatctcactgytgcctttggctagggaacacaactagtaactctgcagagtgccttctcccgcaaccctactggaamacagcagagtctgtgccatgaagaaattagagaaacagaattgtttygctgctaaaaaaaaaaagggggggcccaaaataaaagaatatttagtactcacctcagttccttccataagaagtgggtggtttaatgattgttaacccatttttgcctgtgctgggagcatggagggctgagatgttgacaggcagtgggaaacaaatgccctcctaagtcacaaggcgtgcgccagatcaggaggcaactccattttaagaagctgcctttttcataaaactgtaagaaaccaaagcagttggaataaacaagttaaagtctttaatgcaaaaagtaattgaaaggcagtgcctccattttggtgtactttcttggaagaaagtacgaaattgaccggcatcakgagagacggaagatgccgtattctcagccaaacaagtgactctttccctgccaagcactayggggtggggtcaggctagcttttaaacactggggactggatcacagaaaaacagtggttttctgtccctggaaatgaataggcacaaagacccacttggctgtgggaagaccactcttcaataagattttggtgggaggaggaacattccttttgctattttaagctgagacaatacaaatatttaaactgtgccatgcataaagcattgaattctcagggcacttcttcttccccttaccctttttaaggccatccccttcataaataataatccaggtagttgtgaaaattgtgcttccatctgattccttcttagtttggcttttcatcccatcagaacaagtaaatgtgggtgccacagcttttgtgagtactgtctccctcacggtgaacaagcctcctggtgtttcgtccgagaaagggaagggtgttggtggaaccacagtcctttttcattttataaactgcctcttcatgttgcctgctcaagtttccacctagaattgctatcactgtgactctttctaaaaatccttctgtttaactggttcactgaaattagtcatagaaaatttgtgatttggtgaagaaacattccttgtaataatcaaatgacttgggatggtgtgcatagcaacagtgttacacttacggggaccgtctctagacttatggggaccatctctagaatccaagaagtctctgggtctgagggatggaaagttcttcctgctatgaatgagagtggactcttcccctcacccccaactaaaaccacaaacacccagaatcttctgggattagagtccttgttatagaagaccttgttgctatggaacatgaaactgtgtctgtcagatagattcccttaagagccttaaatagccctgaaagtacaccgggacagtttgcgatggaattaaaattagaagtgaatatttttaggtgcccttgaagctttctggggactcaaaattatcaagagtcaaggacagtctggaggaagagcatctgcaaaactgggttcctggaagtagggacggacgtggctttttgtagaacttagtggagagcagctcctcatgagagcagaatggcctggcgtggccagtgcttcccggcagcacgcgggtctgccggcctccagaatttccccgttctgagcttgatgcccctagcctattccctacctacttcctcccttcccctctagccctctcacaggggtgattgctacctctctcttttcttgggcctaggcaagttttcatgtgacaacttaactggatcatagggtgcctggatacttggtcaaacatcattctaggggtatctgtgagggcatttgtggatgtgattaacattggattcagtagactgagtagaacagattgcccttcctcgggtgggtgtacagcatcatctactcgggtgaagacctgaatagaacaaaaagttgaaggaaggatgaattcactctcctctttgcctgaaggcttgagctggaacattggtcttctgctgccttcagactggaaattacaacattgatgcccctgattcttgggcccttaaactcagactgggattatgcaactggttttcttgggtctccaacatgcagcgatcaaattacaggatttctcagcatccataatcacgtgagcctattccttatgataaatatcttcctatagattgtgtatatagatacagatatatgatatctgttatattctatctacatagtgtgaaagcatatgtatctttagatctatatctatatgtatgtatgtatgtatgtaggtaggtgtctatctatctatctaatctacctaccaatcatctattttattgattctgtttttctggagaaacttggctagtgaaatgcatccttaggcaattttatcattgtataaacatcatacagtgtactcacacagtcaaagatgggatagcctactacacacctaaactatatggtatagcctattgcttctaggccacaaacctgtacatcatgtactaaatatggtaggcaattgtaaaacaatggcgaatattggtttatctaaacttagaaaagttggtggaaggtggaagtatgacagataaaaaatgatacacttttatagggagcttatcatgaatggagcttacagaactgtaagttgccctgggtgagacagtgagtgagtgctaagcaaatgtgaaggcctagaacattaggatacactactgtagactttataatcactatacacttaggctacataaaatttattgaaaaatatttttctctgataaaaattaaccctagcttcctgtaactattttactttattaagacttagcttaaaacacattgtgcaactgtacaaaattatttcctttctttatatttttattctatatgctgttttctgtttttaaatcttaattttattatttactttttaaactttttgttaaaaactaagacagaaacacatacactagccaaggcccacacaggtcagcattgtcagtatcactgtcttccacctccacatcttgtcccactgggaggtcttccggggaaaataacatgcatggagctgtcatctcctgtgataacaatactttcttctggacacctcctgaaggacctgcctgaagatgttttacagttaacttttttttaagtagaagtacactttaaaacaataataaaagcataatatagtaaatacaaaaccagcaacatagtcatttgttacaattatcaagtattatgtactgtacttcattgtatctgctataattttatataactggccacatagtagatttctctacaccagcatgtccccaaatatgtgcgtaatgctttatgctacctcatagtgatatgacatcactaggcaataggagttattcagctgcattgtaatctcatgggaccgtcctcacacatgcggttcatctttgatgtgtggcatcattatgcagcacatgaccatagatggcaatactacttccaaatcacaccctgaattcttcctcttctccccattgcctcattgtgtcagcagtttttcctatcctcattcacctggatcacagcaatagccatctaaccagtttatttatttcctttcttgacttcctatactacagtatttatctccatcatagcctgggttatcatctataaatgaaaatcagttcaccactttttcacatttaaaaccattagaggcttcccatcagagcataaactctaccttcttgccacggcttgcacaggttcttcatggtctgccactggctactgcccccacttcattccacaccatccttgagctggccaccaagctcatccccagtgccttttgttatgtgtggacttttgtacttctgccagagggacttcacactaagaggtatttccagcctgatatactctttcctatgacattcacaccacagattgcttcttatcattcagatttcagaaacaactttccagatggtctcaaccaactgtcctgattctcttgtccactgcacagtaatcccggctcagcgtacatcactatttcctagttttcaaatgattaaatgaatttgttgatgtgttagtttatttgcttcctctttatctgactcatgaggatgtatattttctgagagaaagaagcaattattcaacactatttcttcagttccaggtacagaggagtgtctaatatagaataaccatcccaaagtatttgttgaactaagcaatgtgaaacatttatttaaatagtgtacatcgaatgaatttggtacaaatgcacaatttatatgtcaaatctaccttaattctttcctcattagtatgctgtaattaaaatacatacaaacgtaaggaattcaattatgtaacaatactgcattgtgtgatggttttcaatgctttatgatcttatctttctcagcttggatggctataacaaattaccataagctgggtggctgatataaaacaaaaactgatttctcacagttctggaggctgaaaagttcaaagtcaaggcagcagtaagcaggtttagtgtctggtgagtgtgtacttcctggtcatatatggtttcttttcacaatgtcctcagatggtggaaggggagctctctgggcctcctttatgaaggcactaatcccatctgtgagagctccaccttcatgacctaatcactttcaggaggccccacctccaaccaccatcatattggagattagattttttcataaaaacttttgggagataaaaacattcagtctcttattatcatccacaaaatgaaaacacagaataaaataattatcatgaggaactcacagctccctgaaacatatctatgggtttcagtttttgaatgtactagacaagcattgagtcagtctcctctgaatgtctggattcaaccgagtttctaaatgcaggatttttagattagtggtgactgaaggaactcctgatttcttccttgagaggcctggactgagcatagtaaatcttccctcctaatatctcaatagaatcatcgaagtacaaagctgctctcctgaagagtttgatagaattcagtacagttaataatttaactagctctcatgactggagtctggggctcctaactcataaacataaaggtatgtgccaataagttaatttcagataaaaaagatggatgagtctatgcttttttttctttgtttttattttattctaatctctgatgattcattactgtattagatatcattgctattgcatgagcaaaaaattctgtgtttccacagtaaatggaaaaggatgtataacctcattattgatataatgccattaaattagttgaaatgcaatgatcacacagtgcctttggcaaggctgggcaccctcatgggaactgaaacttgatgtgaaatcaacatgttgtattagttaatgcacaatgtagtgacacatcataggtaaatggctaataggcagcagcaatagctgattgtccatataactgacccttgtctattataatttttaaaaatgatgtttttataaaagaaaagcaaattacaaagaacctgaaaaattaaggccccagactgttactgtgaacaagtccttgacatcattctatcccactatattcttatactggtttaagaatttagagctaaaagttttgatatataaaacaatgataaatcaggctactatggtgtttttttaaaagacttgctattattttagctcagaagagacaaactcatggaatgatattttgttaacacaaactccctgtttgcttgagtttgcacttgttaaattttgactgagggctggtccacagaaagagctaaaaagagaaatctctcatagaatcgctgccaggcctataacaaaagccaccctactggttgtagctctaataataaactctcttttatacaggcctttcaaagttacagggtcacaaagtgccttgaaataaatttcaaagggaacagcaaattctggaatcacacccaaactctttatrttcatgactgtaacagagttaataaattgtgggcataaatgaataactgcaatgtcctgcttggaaacccagtggtgagtgtgttcatcagataaaaatgaccaggtgttgacaggcaatagaaaggaattatgagcagcaggggtttagtatcgatacctcacgaatttaacttatgtgtcagaaacaaggctagggccctgggaggggaaggcgcagagatatatgtactttgcagactattactgcaaagcttggtataaagagaaacaggagaccaagctgattatcatattcatgagcttgtcaacaataattggccagatccttgttaaaatagaaacagtaagagtcttgaccgttcattttctgggattatctcctatgcaaagcctgagggagcccaactatctcctacttcacataaagatgattaattttcttccttgtctttttttcttcctcccatcagtattgagaaagaacaaataatttgaatggaagacttagcatattttggatccaagacagagactctgtagtctcagttcttttccac

SEQ ID NO: 94516 - DNA, 40184 bp, Homo sapiens
  misc_feature (1)...(40184): n = A,T,C or G
tagccatcattatgaattctctctacacatctagctgtctttgcacatgtcccagaggctaagtgattcaacaaaagctcattgcattttgtgatctcattgttgatgatctctgccattttactatgtggtctaaagtgactgcacatgaaaccatacttgatgacaagaaaagggacagaaagaagtctcatctaccaccatagagaatgctaaacccatcaacttctgtatgaatttctactgttgtttcatggtatctggattctctagccagtttacagcccaaagacatgccatttttcttgatttccttttctgtaggttcactgggggcacagtggtattcagtgagttgtttaagtagcagcgactactgatagctttggcctctcagaaaatcttgggctttcctaatgtagcttatggatgatcttgtttgtctaaccccgatttctttttaagttacttattttgaataagtaatacattaacatggttcaaaaaataaactaacaagatttacatttagaacccccatacctactcctgtccccatctaacttacacttcctactcccataaataacaatgttattcatttcttatatatcctttcagtgtttcttcttctttttttttgtagagacaggggtcttggtatgttgcccagggtggtctcgaactccttgcctccagcgattatccggctttggcctcctaaagggctgggatacagtcgtgagccactgtgtcctgccagtgtttcattatgcaaacacaagccaagaagccatatacatacaaatatatatatatatatatttgtagagacaggagacagggtttctctctgccacccaaaccagagtgtagtggcgccatcacagcttactgcagccttgatatggaatgagctccctcattcttaagcttcatatagtacagtattctattgtattcatgtaccatagtttaactagtcctttattgacagacacttgggatttttcctgtcctttgctatgacaaatgagaaaatgtacatacagaaatacataaagtccagagatctatccttacattagattcacagaaatggaactgctggctcaaagggtaaatctattagatctttgtgtcactcagagtttgcctgccatatgtgtgaagaagagatcaaactttatcttttctatatagctatgcagttgtctcaagaccattgatttaaaataaaagtccattattaccccactgatttgactcggtactaattttctacatgcatttggttctatttatagactttctattctgtcccattggtctttctactcatgttccagtgactcaatgtgtgcttttttcattttgcaaggttagctcaccatagttttattagggaggggactggtactgtaacaaagattgtacacaagtagtttaaacaagatagaagttgatttctctgtcatgttaacagtatagaggtgagtggtccagggctggtgaggaagcactaccatcactgaggccaaggtggctgccccagcttctgccatctcccagtcagcagaaggcagaaaagggcctaaagacagcatgaactttcctttttagggtcactatgtggaaatggcttatatcagttgcccagaacttgctcacatggtcactccaagccacaaggaagatggagaaatgtagtctcttgttggagagccatgtgtttgattaaaatttaggagttctattagtaaagaaagggaaaatggtctctgttacaatggtgacctgatggtaaagaccccaatgtagaaggtattggggcattgtaacgtaaataatggcataaactttcctccaggaattcacaatagaggattggtgcagaggagtctaggattcatataggctctacctcttaccttcatatttgtgggattctctttgattagaattgtatttactatttttagagctcttgcatgctctttctctttttctgtatatgttgctgtatgtgtgcgtttttttttcttttctcactgctttactcacatgtccctggaggtatcaatctatttctgaggcaactattggggcttgttaatgaattaattggcaaaaagaagcctctcagggaacaaaagcccgaccccgtttatacctctgaacttcctatctcccttcctttgatatctcccttgaatgtgataaagaatagacaatttaagtgggtcttttatatttacagaagactacacttatatataaaaggggatctgggtaatagataactaaactaaaggataggaaaaagccacaaaaagaaagatcctatagccttagagagaccatatgatttatcacctaaactgggatactttaaagagtttaaggaggctgggcgtggtggctcatgcctgtagtcctagctacttgggagactgaggcaggaggatcccttgaaccccagaggttgagcctgattgcagtgagctgattgctggactgcactccagcctgggagacagagcgaggtcctgtctttagaacaagcaaacaaacaaccctccccgctccctccaaaaaaaataaccacaagcagatttttttggggcatacacatattttgatcagtttcttagctatatctgtctctaataccatgttactggtatttttctgaaaaatgtattttttttcaatatggtcttattaagttttttcataaaattgcctgcaatctgtctcccagttgcattttatggttaacaaatttaacattacagatatcttcaactgatttttctccatagatcatgtcgacctaaaaggaagaagtgtaggcaaaatatggaaaggtcatttgggccatggttgagaactgcagcctgggacacacttccaggttgccttgaagagtactctggagaacaatggggaggttcaaattttttaagaaaaaaggatgaatcaggagtgggggtgattgcaaagttgtttgtcaagaattctcattggtttaaagaaataacattgggctgggtgtggtggctcacacctgtaatcctagcaatttgggaggccgaatcgggcggatcatttgaggtcaggagttcgagaccagcctggccaacagggtgaaactacgtctctactaaaaatacaaaaattagctgggcgtggtggcatgcacctgtaatcccagctactcaggagtctgaggcatgagaactgcttgaacccgggaggcggaggttgcagtgagccgagattgtgtccctgcactccagcctgggcaacagagtgagactccgtctcaaaaaaaaaaaaaaaaaaaaaaagccaacaagggtgtctctctagagcaaactagaaagatggaatctcctatatacatcataatctaatcatgggagttatatctcatcacttctgccacattctattggttagaagccagtcatagttccagctcacattcaaggggaggaaattatagaaagatgtgaacactagagggcagagatcatgggcaccatcttagaattgggaaatggctctgagattgagatttgtgtgcaggtggatcactgggggttgcttctgggaacaagtcctgtaaaggagtaaggaaatcagatttggatagaaaagggagaagtctcaatagaggcttcagccaaccccacagacagttctgaagcagagctggtcctttagagacgtcctgaaatgaagcaaagaagccaggcctttggaacggcattaagcaatcactaatggatgcccctgggaagtcggtataaccttaggcaaggcagcttccttcaacagagggcagtttctggggagaaactcagctgtgagctgtcagcaactaatactcccagcagctaataataagtgcctcagttctgaaagagggaatctgagtgatatatcatcatcacacttggttaactagaatatctcctcagtcagtatatatattttcccagcactgtgaataaaagtcagttgaatgagaaattgaaagtayctctgattggtcccttcctgcaaccaatcaggctggtggcaggccaagttttcatttgtataggagtgtaactttgtaacttcacttcagcctctgattggtcactttctgcaaccaatcagactgaccatggaccactacttcatttgcatggggtatacaccaagtggctaatgggaaacctctaccgggtatttagaccccagaaaattctgtaaccaagctcttgagctgcttgctcaggcctgctctcaccttgtggagtatacttttgaaaccgcctttgcaaaaatcataactgaggaaattatgacagtgaaagagatcagacctaacctaccctatcttccttctaacttctaaaatgtctttgttcattcctgggtataggccaaactagccttgggaaagaatttatagtgtaaactctgagacaaaattgataacagccctttccccttcttgctgggaccagtctgcctttctttgtaggtgtaacaaattagctacaagattataaattacagtttaggggccatgcagcctctggctgcaagaatctgaacctccccaaattgcttctgggaataacatcaccattgcaaatcctaagatcagtgcttgagatattttgcagaccctgcattctcatgcagcagaggacaccacccagactgataatctggctcaactagctccacgatcccacccaggaagaactcgcaagaactcacttcgaccccgtgatttaatcttcatcccgaccaactagcactccccactttccgaacccatacctgccaaattatccttaaaaactctgattccagaatgctcagggagactgatttgagtgataatgaaactctggtctcccgcacagcgctcagcgtgaattattctttcgccattgcaattcccgtcttcataaatcagctctgtctaggcagcggacaaggtgaacccattgggcggttacactttcgttttcaatacatctctgcttttattgcttcattctttctttgctttgtgcatttcgtccagttcttagttcaagacgctaagaacttggacaccctccacgggtaacaggactacaggtgcccgccaccacgtctagctaattttttgtatttttagtagagatggggttttgctatgttgctcaggctggtctcgaaccactgggctcaagcaatctgccggccttggcctcccaaagtgccgggattaaaggcgtgagccaccgcgcctggcccactaaacttctctgtgcatcagttatttcatttgcctaatgaggataacagtagtcactactgcgttttgtgagcgttggttaatatatgaaaaatgccacgtgtttgccattagcatcaatcatgccataaccagaaaaattacattgcattttttattttaaaaaaggtgggggccagagtggacctgggcctcttccaacttctgagaggtctctattactaagtaagccttaagaagcagaattccatgaagggagctaggaaaccaggattttccaaaaggaggtggcatttgcattgatcctggtagggcagcctcgaattccacggggttggggttgcgccttttccaaggcagccctgggtttgcgcagggacgcggctgctctgggcgtggttccgggaaacgcagcggcgccgaccctgggtctcgcacattcttcacgtccgttcgcagcgtcacccggatcttcgccgctacccttgtgggccccccggcgacgcttcctgctccgcccctaagtcgggaaggttccttgcggttcgcggcgtgccggacgtgacaaacggaagccgcacgtctcactagtaccctcgcagacggacagcgccagggagcaatggcagcgcgccgaccgcgatgggctgtggccaatagcggctgctcagcagggcgcgccgagagcagcggccgggaaggggcggtgcgggaggcggggtgtggggcggtagtgtgggccctgttcctgcccgcgsggtgttccgcattctgcaagcctccggagcgcacgtcggcagtcggctccctcgttgaccgaatcaccgacctctctccccagctgtatttccaaaatgtcgctttctaacaagctgacgctggacaagctggacgttaaagggaagcgggtcgttatgaggtaattctgcacgtttgcccgcgtgctctctgtgctctgtcgcaaacctctttggccggagccgacttgttctctcgtctgctctaagttcttttagcttttggctgggccccaggggtcctaggcttggagggcgaggctgctcacgggtttggtggtttctagccgcattttccccagcccagaaagcacccgaagtcacccttcggggatggatcccactgaggaagggctgagattgccgctgggacccattttgtcctttttcctattggtgaaatgcagttccgttgcctccagctcccagtcggcgagatgggacttaatgcttatcctgcaaatctctaggcttcaaggaagggaccttgaaaggtcattttactttcccttcccccacgctcctrgaccgtcgcagccaaatgagaaacggcccacatctcacaggttcctgcacaaaaggatatttttccaagaggatgttgatttaacttcaggagtagacccccccgccccccgccactaaagaattggggtgggagggtagggcggggcgaactggaggaggccctgcagagcttacgtaacaggcgtctgctgccctgcagcgcggtatcgttggactcttgggcacaggatttgcatcaggattgtgacatactaggtaatggtagagcagggtgtggctgctcatacttgctggcctccaatctcatccccacgtgtggctagaaaagtagaattttaaaattgggggaagtttcctcgtgcactttgggtctcttactctgcgcatgtggatctctagtcacttgccaacacggyttctctcttatctgccagaattgttggtagagtgggcagcttttacatttatcctttttgtcacgtgtgatatatttgtgcataccaggagcaaggtgcaggaggatgagtcggtatgtaactgatggacttgactgttcatataccttaacaggatccaagagtggtgtttttgaggggtcataaaggtttctgttgatagcattttgcaaccttgacctttttgggaagtggttgattgatgggtaggtatttatttggctggtgtaatctagccccttttccaatttgggctggttcaaatgagggcttgtgttggatattaacagacacgtaagtcagtaggagatctccctttactctaactttaaacatatgaggacacgtttgagttagggaactgtatgggtaccctaaaaggacatgtagctctcctcttctctctaatttcactttggtcaatatttttgcaggtaaccgctgccctgctrtggagatagaagaacccaataatttatgtccatgaaaaatacctggtttccacatttccccaaatgacataggcctttgtaatctggacaaagtaggagtcacagccatgttagtactagaggagtgccctttctggccctcatacaatcctaaaaaaaggggatagaccctgtaaaaaacaggacaggtggacattggcatgcaactagcttttaggttttaattagttccttgcatctcccctgtgttcgacgctgattcttccagatgcatggaccaactaacagacaaggagtgggacattatgctgataaccttcctgtaattgcagtcttgggctttatttcctctctctctagggaaactggcttgaggaagctagctgggggcgggattggaggagctgcttaacttttctccctctggacctaataaagtttcatttagcacacrctaacccaaagccttgaaatgattggctagtcctgttttgctgatggaaaatgacctgttcagggttactgaactaccaagttggtggcagagctaggagtagaatttaggtctccttggctatcaactagatcctctgaatattcgagacaatgaccaaggatacgttgaaatagaactttctcccgtaacctggataccttctacttatttaggctgaggacaggaagttacatggttccctgattattaatgtatttcttttgaacagagagtcacattgtaggcctacttttttggaggtgcttaggcagccatgtggtgtcagctcaattcctttttgtttcaacgtggtggttgctggcggtgtttccggaatggggcttcctgagtagtggctgcctcatttgtcgtctttgtcctgcagaagtgaactatggtatttgctgactcttctggtccactggtttggattgccaagggaaattgatttgttgaggtaacatgggatagccagaaacctctgacttgttaattaccaggttccatcttagttttttaggactccgcagttgactttacagcctctttgaatacacttctgcttatttttgtggtaatttcctttctttctctcataggttgccagtcatcctttgcctgcttgtaaagcacttcctttttgcttgctcctgcctttttttttaaaccttactggttttctccaacttgtaacttgtaaagaaactgctttgatgtagtgggaagagaaacaggaaaaaattgagagcagagaaaaagtcactaagacacccacaatatcccagttttccatctggggcagtgaagcattgatggacatggttcctttgagagtttttaatggaactggacctgggacctgagatttcaggtgatagagacttgatattcttattccagctaaatcagtatattttttaatgttttattttgaaataaagattcatgggaggttacaaagttagagaggtcttgtgttcaacccattttcccccaatggatgcatcttacctaattatagaacaatatcaaaagtaggaaattgacattggtataaagtgtgtatggttctatgccattttattacgtgcgtagatttgtgtaaccgccaccacaatcaagatacagaactattagatcaccaccaagatctccttcatgctacctctttataataataaccaccccccttcctgactcctggtaactactgatctgtccactgtttctaaaattttgtcacttcaaaaatactatacagattgaatcacatggtatataaccttttgggattaacttttttcacttagcataatgtcctcaaaatttatccacattgtcacatgtatcaaaagttcatacctgtgtattgctgagtagtattccatggtgtggttgtattatagtttgtttaactatcattgaaggatattagggttgtttctgatttggggctattacaaatacagctgctgtgaacatttgtatacaagtcttggtatggacatacgctgtcatttttcatgggtaaacacctaggagtggaattgctgggccacgtccttttgaggtatccccagactgttttccaaggtggctgcagcatttcacatttctaccagcagtatttgagtaatcagtttctctgcttcattaccagctattttagttatttttcgttctgatggatatgtagtaataactgactttgtgcctgaagcaaagctcaggggtgttataaggaaacgaaaaaaaaaaaaaagaaaattgtgcatattttatgtaaaatggaacaagtagaatctgtaggcaagagcagttcctgtgttggagtcctctgaggagaagctaaaagcagagctgttgtgagtgtaggagataaggggaggtaatccagagggcattgaggagagagtatcaaccaagtctaattcattagtaagctgacaccatggcagcttggatagatgagacagtttcttaggtgtctctgtccaaagatattcctccctgtaagggttgggggtagagagtagcactgcaagaagtggcttgtgcccatccttttgccattagtccttttgagcataggccttctgggaggttgcatgggggaaaatgacccatggtaatgggatattctctcttctttggaatgtactttaaggctggcaggctccttgttcaggatatttaaagaagacagagaatcaagtggcctgaaacaaagtagagtgtatttctttcatcagaggcttactgcctttaattttgaagactttaaaacatgttttactatagaattatttttcctcagcctacctttggaaaggctgttcttcagtgaggtagattggagttcaggcctagtggatataggaaattggtggtcttctcagtatgtctgtaggagtttgtaattgccttagccttagagaggaaggggtatttaaaaaggcagaggaaaaagatggaggcttataatcaaggatagcagcagtcttcttgattaggtcatacttcactgtagtccctttgcaagtgatgttagctgtttttagtagtggttgatttacttgtcaaatcacagaattacattttggagaaacatataacaacaacacttttatggcatttactgtgtgtcaggtacacttctaagcactttacaaattgctgacttactaattctctcagtaactacgaggtagatactgtcatcccgatgagaaaaaaatcacttaaaaataatcatggcaggcacaactcttaaaccttaaaaatagctgccatacattattgttttcattcacattgaagtaggctgaggttccaaggagttcagaataattggttcttaagaatgataacatagtaatctgttgggtaagagatactgcagtacattattttcttgtgtcgtcttgattacttcccttctaatttgcctgtttgtcaggtgggctggggcacatgtcccaccctctcttctcaggctttttgaaagaggctgtcttatgttgtgtgtattgcttgaaggacccctagtcttaaggccccaggctttctccaaaaagaatgattttctcttagtgtgttttatttttattttaatttttttctcgagtcatgttagtttcacgaggacccagaaatagtatcaagggaattaggatcaagatgcattccttattattcctcacccctctagctgctacccggatactattgtgccaggcccagacagatatctttttaggtggaactagctttagcttcccagatcttcagggctagttcctgtgatttaagttaggttttttttttaaaattctttttaaagtatgaatacatacctaaaagggcacaaatcacaagttcaaagaattaccacaaaatgagcacatttgtatggtcactgaggttaagagatagaacattaccagaaccccaaagcctctggtgtcgttatcccagtcaccactcccgccatcctccccatgactaaccactattttgacttttaatgccactgattatttttaagatgagatttgaatttctgacttatttaactggttcattaaaaatgcatctcctagtctttgatggaacagtaagttgatcatggtcttgcatctttcttttttagagtcgacttcaatgttcctatgaagaacaaccagataacaaacaaccagaggtaaggtccctgctaatccttgggctgggtttaagatgtgtgtaggtayacaggatgaaatgtttttcctttcatattgtattatggaactgtagcaacttaaaacaaatgattttggctttctatcaacccactctctgatctgctttcttatttatgagaatatacaaatataagcaaaatcttaagaaagtgattccccttcccttgttttttgaaaattagaagaatttggagttcattttctttttttgagatagggtctcactctgtcacccagactggagtgtagtggtgtgatcacggttcactgcagccttaaccttctgggctcaagcagtcctctggcctcagcttcccgaggagctggaacaacaggtgcacaccactacacctggttaaattaaaaaaaaatttttttttgtagagatggggtctcactatgttgcctaggctgttctcaaactcctggactcaagtgatcctcctgccttggcttcctaaagtgctgggaccacaggtgtaagcccccatacctggcagagttattcatttttaaagaatataaaagttggctgggtgcggtggctcacatctgtaatcccagcactttggaaggccgaggcaggaggattgcttgaggccagtagttcgagaacagcctggccaatatagtaagacaccatctctataaaacacacacaaaaaatataaaaatttaaggttacttggcttctcttgcaaaatgaagaactatgtaagagaaggattttaaaagtaccagtagttactaaggttatatgtagttttacaagcccccattcaaatggctcagataagtcaatttttgagaattttcatttgtttttgcttccaaaaaaacaaacaggaaagacttcagaagtacgttttcagtcagtttagctgctccagtgtcttggatcctagattcagaaacaaattttaagtgagagtactgctcttgcttttgactagattataaaaggtctttatttttgtctttactttctttttaatttttttaatttttaatttttgtagattttatatatatatatatatgggttacatgagatattttgataaaagcatgcaatacataatcacatcaggttaaatggggtatccatcaagaaggtttttatttaatttttttttttttttgagacagggcctcgttctgtcgcccaggctggagtgcagtggcacgatcttggctcactgcaatctctgcctcctgggctcaagcgatcctcccatctcagcctcccagggagctgagaccacaggcgtgggccaccacacctggctactttttcatattttttttgtagagacagcgttttgcccttttgcccaagctggccttgagctcctggaccccgcccaccttggcctcccaaagtgctgggaatacaggcatgagtcactgtgctccgcctattttaaattttaaatgaagggtttgtgttggcaaggtgctttctaatgatctagaccagtggtatctaatagaaatacaatgtgagccaaattgtgttaattaaattaaagggacatttaacttttttggtactaagtcttcaagatctggcatgtgtttttatactacagcacatctcaatttgatctagttatatatctggtactcaacagacacacatgactaaatgactgtcgtaatggacagtgcaggtctagcccagaacattttcaggtattggtcctagaatagagcctgtcattttgccaagcacatccctgctgtaccatagtggcagggtctttgtataaggcagatctgatcccgcttgatcttcattattgtgcaacacacagaaacgattggaaatatgcctatcaagttattttaagagtaaagaaacatgtttggaaatcttttcatttccggaaatccatggagttgattaacaaaatgaagcattagaaataataaaacttgctgataagggatagtcctgaaaactaattggttccattgcacaaactttgtacctgatacagatttttaaatttgatataaaggagttcttatatctgctaaatattaataacataagatattttaaaagtataacttttttaatcattccattctttgctcagatgtcatcatatcagactttccctggccatcctgtctaaaaatctcctctaccattgttccccggtcatttttgtcctcaaaagtaggggaacaaaaatggggaacaatggtttgttttttttctgtatctcaccatctgatatattacatgtacgcacacacacatacatgtttattgtctctctccattagaatttcacttccatgagaacagagagtttttaaaaaagttttctgtttcattctcagaacctggaatgatgcctggcacaaaagaagcattcaataaatatttgatgaataaataaatgcttttcttgatcaattttaatttcttataaactggcaaaatggcaagttagtagcaggtttataacaaaacttttaaatgtttaaagggagttaattttttgattaatttataatgtaatgaatgtgatacattatggaaaccaagctctagacagtgcaattattttttcctacataaaaaagtgacttaggatctattaataggtgcagaaaagttactacatgttttttatttttccccaaatttcctttgatggtttcaagatttgagaattttatgtattttccatagtcatataagaagtgttttcaggggtccccaagatcacccacatatctcatgatgatttgctaggactcagagttgttctcatggctaaagtttattacagtgaaagaatgcatgacaagattaggaagaggaaaagacatgggggagtctagagaaatccatgggcttccagtttcctgtgaggggacacatcaagtgttttcctttcttcagcagtgaaaaatgcagtaattgtctgcagtgtttctgcctggagaagcatgctagagactcagatcccaagatttttgttgggaactggtaacatagggatcctctgcctagcaactaccaaaattacaaacttctgctgggtgtggtggctcacgcctgtattcccagcagtttgggaggctgaggcctgcagataacttgagcccaggagttcaagaccagcctggacaacatggtaaaacccctacaaaaaatacaaaaattagctgggcatggtggtgcattcctgtagttccagctacttgggaggctgaggtaggaagatgacctaagcccctggggaggttgaagctgcagtgagctgagattgtgcctctccactccagcctgttgggtgacagagtgagaccctgtctcaacaaaaaaaggaaaagaaaaaaaaaattctagacttctagagtggggcaggtgttcagcataaatcaccatgtttgtatagacggtctaggaagagtgaatagcccttgttggtcttgtcagttaactttgaaagccaagttcccagataccagccaggatctaatcttgcagacaggtccttctgtagatagtagcctcaggcctgctgtgttaactcttgtctgtgaaaggggcagatacataatgagattgtacaatcctaggtggagggttggcattgcatttaacttcttaaggaccaccattgaattactgatagtagatttgaaggaacttggagaagaaaaggagctttatgctttatgaggttatcaataagctagttcccactaatttctaggagtaacttcattctgtttgttgtctctctttggttgcaggattaaggctgctgtcccaagcatcaaattctgcttggacaatggagccaagtcggtagtccttatgagccacctaggccggcctgatggtgtgcccatgcctgacaagtactccttagagccagttgctgtagaactcaaatctctgctgggcaagtaagtgccaggctctggtgctggtagactttgtggcgggggaagttgtcaagcacgttgttactggtttttaactttcatactgctcaagtgtcttcatctcttcctcttctcagggatgttctgttcttgaaggactgtgtaggcccagaagtggagaaagcctgtgccaacccagctgctgggtctgtcatcctgctggagaacctccgctttcatgtggaggaagaagggaagggaaaagatgcttctgggaacaaggtaggacctgtgattttgacattattgggggtgagggcctgagtctgtaagagactgtggttgaagaatagagaaagctcatttattttaacttagacaccttttattgaagcatacaatgccgacacagcttgatgggttatctcaaagtaaacacacttgtgtaaccaccacccaggtcaaggaatagaatattaccagcatcccagaagccctccttcatgttcaggtggtgtttaaatatgtttgaaaaatatgtgaacacctttgaggtgaaagagtattcagtgaatatgatggtcatgatgatgtcaccttggatttaaggcattttcttaagatgtgtaaagtatgttcctttaaatctctctttaagatagaggtacaggtatcgacttatttcataaagaaactaagtctcaaaaaaaaaaaaacttaagtttctgaaaggcagtcatacgattaaagttagaggcagtggtgctgttggkctttagagctcagcccattcaatcagcaaactttttctataaatggccagatagttaatattttaggctttctgtgttgtgcagtcacttccatctgcatatagtctctgttggaactactcacctctgccgatgttgtgcaaaagcagccatagataactcaccaaacagattactgtgaactgacaaccagaattcaaatattcaatgataaaactggctctttgcagatgattttgaatttgcccattgactagaaaggaagctgaaggcattttttagtactttccactattctggtctttagtatctcggagaacaagatgctctgagtctagtgtctcagtctcctttggcttctcacatttattraggtcattgggagtgcctgctttcaagcagtttctttttttagcaccaaagatgctggtcttgccttatcctgcttttggcatggtcttgctrcagtattaggagtcaaatgctgacctaaaatttggtgtccttttaatctggaactcatgatgcatgaactctagggcttagaagtggcaggaggcaaagggcatattgaagcaaaactttttatttaggaaatgatgagctgactatgtagtctatgacttttttagtaaactgacttgacattcactatctaatggcttttaatacctgaaatttcaggagtcagtcccaagttcaaaatggattaaaaaaacagtgaggctgggtgcggtgcctcatgcctgtaatcccagcgctttgggaggccgaggtgggtggatcacaaggtcaggagttcgagacctgcctggccaacatggtgaaaccctgtttctactaaaaatacaaaaaagtcgggcatggtggcaagtgcctgtaattccagctactccggaggctgaggcaggagaattgcttgaacccaggatgtggaggttgcagtgagccaagtttgcagcactgcattccagcctgggcaacagagcaagactctgtctcaaaaaaaccacaaaaacaaagtgaggatatgaggacataaacattttccctttatccaaagtgcccacattgatcttttaagggccttctctttcttctagttatttgcagatcagtaaatgagaaatgggttctgattgatattatttccatggcaccttttttcatgaagagctttcaatttaccctgtttttccttaaatatctttttaaagagacagggtcttgttctgttgcccatggtggagtgcagtggcatgacattaattattgcagcctcaaacttgagggctgaagtgatcctcctgcctcatccttgyagggagctaggactacaggcacataccaccatgtccaactgacctttacttttttttttttttcctggtagagacggggtcttgctatgttgcccaggctcatctcgaactcctgggcttaagtgatcctcccatattggcctcccaaagtgttgggattataggtgtgagctactgcccctggcctccttaaatagttcgtaaatggaggggttattatgcctttttgatagaagggaaaatttcagagcaacttcccaaaggtgacacaatgaattagtgtcagagctggacatagaactcaggtctccttacatttgagcattgttatcattactacatgtgtcatcttccaatcactagtggcagatgttattgtagtctacagagcttatgggagtgccacaatcttcaattttagcattagtgcctctgcaattctttggatctttagggaaaagccccattttttatggcagtccccttcacctccttgatacataggagcataggagtgggcagtgacttaaaatgaacatctgctttgtgctatgtactcttctgtgtcctgtcccctttcatctggcttgcttcctgtgcctctttgcttaatctcctgccagagactctctggtttgcttatcctcccatcttgctttctgtcccctttggggtatgccttgatggcaagctgacattttaaagctctatgtttaacttctacattttcttcctctctttttgtagaagtatatttcttgttttctcagatgcctagcttccagagaaggtcataaaatacctytttgtcaatgtgaagtgtttctgaggttcttttctgttgtcatgtttccatctgccttctctgtcccagcttgcccttgttgcttttatgaggaatatgtgtgagagccccttgcacttcgcagaaaggccttggtagccagcagcttgagtcaagtatgatactatcacaaggagaatgtttaaaatgaggaactaagtcaaggagagggaaggataatcagaaccttgagctgaaggctggggagaggctagtggggtgtggttaacttcatgtgattagaggtaaagccatcgttcaggaatattaggtttgcaatttgagggaagttaagggagagcagaaacatgcagaaatgaccaaagtatctggaatatttggaagaaagaacacatcctactgctggttgtaaaaaatcgctgtcccacctactcagggtctttagagatgttcaagaggactcttggtgtatgaaatgcttttatagttgtctttggagccatcacattttctgtttttgtttttctctataggttaaagccgagccagccaaaatagaagctttccgagcttcactttccaagctagkggatgtctatgtcaatgatgcttttggcactgctcacagagcccacaggtaccaagaaccttgtagactaccacactgagaacagtattcctatttacttgagtagcccaagctctgggttgtttttggagagttttgtattatactgtaatcctttcagcttctctaattggaactgccrctatggctcttgttgagtagctctcatccaaagaggaaataaaggtaaaaaaatgttggtaattgtagggctttttgtggagtttcaggaagaggttgctctttctcaccttagatattttgtacagagttatccttttatgaacgttataagatcagactctcatgctgtcagtaggaagcaarttgaggaatcctcttctgctatcatcaaccggccaattacttactgtgatttgccctttggcctgcctgaagagtgttaactgggtatcttaaattctacctaagttcattacttttttactctttccctttgaccttgcactattagttaaaaatcttatcttgtacctaagtgttttttgttgcaatgtagggatgaaaaccatgatttcttgcagtccagaagtagaaatattttagtgataaggagctggcctctaggactaggaggaatgatagggattgactagaatytgaatgtctttgatcttttctagctccatggtaggagtcaatctgccacagaaggctggtgggtttttgatgaagaaggagctgaactactttgcaaaggccttggagagcccagagcgacccttcctggccatcctgggcgggtatgaagaactctttaagatcatgctttaagtattgtttgcctggtagtaggccataacttgggtggtttattgtcatatagctcagtcacactgggtaactgaggagaatttaataaaggaactacaggctgggcatggtggctcacacctgtaatcccagcacattgggagggcccaggcaggaagattgcttgagcccaggagtttgagatgggcccagacaacaaagtgagatctcatgtctacaaaaaaaaattagctgggcggtggtggtatgcacctgtggtcccagttaccagagaggctgaggtgggaggatcacttgagcctgggaggtagaggctgcagtgcactgtgatcacgccactgcactccagcctgggtgacagagcaagaccgtttctaaataaataaataaataaataaataaacaaacaaacgaacgaactacatacagaggtgtgggtagggttcagggaaaccacaaagggacagtacagtaatttggggctaccaacaggcatcaccatttctatgcctgaagggacaaagggaggggaatggttatcagaattcagagaggaaagttggtgtggagagagctatctgatgggaactgtagcctttggtcaaaggacacaagatctggtagggagggggagccagggcaataaatattctgatctcctttcagtctcctgctgctgcaccccctcccaccctcaatttggctgaaacccaaatggaagccagagcgcaagaaagctccttgatgtagtccatgcaggtcctcctcctgtgatgcaacagggtagagaaggatagaagatggctctgcagggaagaatgggaaagatccaccataggtgctcatttagcaattttgaagtgcttgagccttataacctggcagggtataactatataacctggcagggtataaccatataatctggcagggtataaccatataatctggcagggtataaccatataacctggcagggtataactatgaaaacctcttcatatgtgtttaatatataatttagacctcatttctccagattacatacctattttatcttttctcctatagggaaaggcagcaagtagataatgattttccaatgggttagttaaaaatagaaatttcagaattgagggttgagaggaggataaattttaggtgagagagctagcactgcttggataagacaatttcctgtgacttggtgtggtgatctaggtagcagtctctttatggctggaggcccattacccttctatgagcagggttttttcccccaggggagtgaacatactatctcctgatgaaaattgactctggagttgggtgtcaatttcaggtagcatagttgcttatactgtttggctctgtgtctccacccaaatctcatctcgaattatccccacgtgttgtgggagggacctggtgattggatcaagggggcggttcaccccatactgttcttgtgatagtgttgtttggcagttccaccctcgctcgcctctctcttgccaccatgtaagatgtgacttgcttcccctttgccttccgccacgattgtaaatttcctgaggcctctccagccatgcggaactgtgagtcaatttaacctttctttataaattaccaagtctcaggtagtcctttatagcattgtgaaaatgggctaatacagttgctttctaggctttatgagcccagtttcagagtcttaaaaataactcaggtagatacaggttgttgtgtcttgttcttggaaaaaggtatctattcctgggctttgttcttcaactttctgtagacctggaatatgggagtgagtgccacctagtgctaccttatggttaggtttttaggttcagactgaaatagctgttacggggaattggatgtgagatttttttgccacctttcttgtagtgtagtttccctaggccattaacagtttttgggaaaacttttatattttattaaacaaactttattgtaagaaacactcatatgtatggaagttgagagaatagtgtagtaaactcccaggtatccattaccctgtttcaacaattaattgacagttttgctaatcttgtttcttttatgtcctaactctgttttgtcaggaatgtacacacacacacacacacatatatatacacacacacacgtatatattcctgacaaagtgaatacaagtgaaataaatatgtgtatatatgtgtgtgtgtgtgtgtacatatatagatattttagatatatagacatatctatatatctagatctagatctatatatagatttttytttttctgatacagggtctcactctgctgcccaggctgaagtgcagtggcatgatcacagctcactgcagctttgaccttccaggctcaagcgatcctcccacctcagcctccctagtacctgggactacaggcatgcatcaccatgcctggctaatttttgaatctttttgtagagacagggtctcactgtgttgcccaggctggtctcgaactctggggctcaggcgatctgcctgccttggtctcccaaagtgttgagattacaggcgtgagcttgtgccctgctgtcaggaatgtttttaagttagccttagacatcatatactttcacttacataggttgagtatcttttatctgaaatgcttgggaccataaatgttttggatttcagatttatttttggattttggaatatttgcatggtacttaccagttgagcatcctaatctgaaaatatgaaatctgaaatgttccaatgatatttcctttgagctcaaacagttttgatcttggaggattttagatttttggattagggatactcaacctgtaatactcctgtatacatcttgtaactgctaagcagatttcttttaaataatcaccatattatacctaacaaatttagcagttttgttactatcatccaatacccaatctgtattcagatgttcttgatcatctcagaagtgtctttttacagttggtttgtttgaataaggattcaaatgaagtccatgcattgcctttggctgttaggtatctcttgtaataatctcctatttattactttcattctgttgatttgttgaagaaacaggcatttgagctgtaagctattctttagaagaaattgaactcctttctaactgctttcttccctttgtgtgtgtatgtgtgtgtgtgtgtgtgtgtgtatttaaaacaatctatctttacccttggtggtaaccaatctttacaactgaaataaatagtaaatagtttcttgccatctgttcacccacatcactgttgtttcatacctccttttcacaaatcctagcatagggtttctcactggataggcattatcttgtttattgaatgaagaaggaaacagacacaaggtggtttgtccacgtaagtgggatttagttatatgggaatgtttatggaaggcaggctattactttgtttctctttagtttggatcttttttgtctcatagggagatgcaagatacatgtgtatttatcttatttccatgtactagaaaataagatcccaaagggtagggatctttctgttgcctttgccctgtgatgtttctcaaagacctagaatagtgcttggcacagagtaggtgcccagtaaatgtgttgaattgggtgacccaataaaaataaatgccataaagaaaatgtcccaggctgggcatggtggcttaggcatgtaaccctagtgctttggaaggccaaggcaggaggatcacttgagcttaggagtttgaaactagcctgggcaacatagtgagaccttgtctctacaaaaaaatttaaaaagaaaaattatccaggggtagtgttgtacgcctgtggtcgcagctacttgagaggctgaggcaagaggattgcttgagcctaggagttccaggttacagtgagctatgattgtaccactgcactccagcctcggcaacagagtgagactttgtgttgaaaagagagagagaaaaaaatgtcccagcaactgagcatagggtatgactttaggaatatatatttttgttcagtatatatttatttagtatacagtccagtcaatccctgctctaaggttaggataattctgagtggctctgggatcccacaattagcaatcgtgcttagatacaattagcaatcttgatgctctgaatttgtgtgtgtgtgtgtgtgtgtgtgtgtgtgtgtgtgtgtgtgttggggaatgtgcaaaatagatgtggaacccatagtttccttagacaagagtaggtcttctgagccctgcttaaaaaaagaatatggatttaaatctgttgtccatcagcttctaggtagaattaaaaaaaaatgtattgatggtaagtggggtgaggaatttttaaaaagatacactgatgtctggagccataccttaaaaggatttcttagaaatggattgagtttttgggttggagaaacatagggcaaagttaggcagtacttttgtcactttgagactttctctgttcctgtgccttgaaatagaaactcagkttctatgtaataccacttctctagtccattcttctttaagtgatgattcttgctttctcttgtagagctaaagttgcagacaagatccagctcatcaataatatgctggacaaagtcaatgagatgattattggtggtggaatggcttttaccttccttaaggtgctcaacaacatggaggtaggaaacaaatgccaagtggatgtgaaatagctctccatgataatagcaggttgtataaatgtaaaaagaaaacagtcttttgacatgagccctgaaaattcccatttttatttattttggcaagtctttcgtctttgcattgttcctttatattgtattgtgtctggttcctgtctgctttgtgaggcagtcttgttcttagtatagatgctgacctccatcattttggctcccctgtgtagattggcacttctctgtttgatgaagagggagccaagattgtcaaagacctaatgtccaaagctgagaagaatggtgtgaagattaccttgcctgttgactttgtcactgctgacaagtttgatgagaatgccaagactggccaagccactgtggcttctggcatacctgctggctggatggtgagtcacttgagtgggttggtagtgtgagtgaacagaaactctgtggtgtcatttattcattgattcagccaatcaacaagcattttaaaacaatctctataggagatctgtcagagagggctctgcatgttgcagtgagtccctcatggaagaatccatgggagaaaagcagtgctattggattactggccttcagtaatgcagtaatgtgttgcaaaactttgttgttgttgtttttttttttttttttgagacagagtctcgctgtgtcaccaggctggagtgcagtggcatgatctcggctcactgcaacctctgcctcccaggttcaagtgattctcctgcctaaccctccccagtagctgggactacaggtgtgcaccaccatgcccagctaatttttgtatttttcatagagacggggtttcaccatgttggtcaggatgatctcaatctcttgacctcrtgatccacctgctkcggcctcccaaagtgctgggattacaggygtgagccactgtgcccggcccatttttagttttatctgttttttcttcatctgtttaatgtgtattaagtacttactgcgtactggagatagtgtcatgtactttcatggtttgggttgttttggattatgttgctatctagaaagctatataagaaaactttctcatatgaaaaaattaagtatactgattacaagcagggagaaatgtaagtgtatattaaagactaatatagttgattttagggtgctccaaatatcattttgattgctgtataaaattgtatcatgtttttacatgctagtttgcttatttttcttttcaggcattcacgtattatttagttcagtgtttctcaaagtatgttcctaagaccagcagtatcagtatcatttttggaacttgttaaaaatgcaagttcttgggtcccaccccagacctaccgaatcaggaactgagggtggggccaaacagtctgtttgaataagccctcctggtgattctcatgcatggcaaagtttgagtactactgatctagtttactgtcattcycaacactattgacatctgttgttttgtgggggactgttgaattgtaaggttgtttaaagcatccttggccactagatgccagtagcaccctcccaagttgcaacaacaatatttctagacattgccacatgcctatctattatgaaggggcagaactgacctggttgagaaccattgatctagttttcactaacataaatagtgtggctaagaatgtctttattaaataacttttgaggttttccgttagacttgatcttccatacagtagaatttttgagtataaagggcatgaacaggtttataaagactgaagggtactatttgtttctagaagaaactttggtgtgcagccctgagttctggtcttgstggaggtggtgtttaagtagcttttcttgatagctcatcttctctttcacctctacccctcagggcttggactgtggtcctgaaagcagcaagaagtatgctgaggctgtcactcgggctaagcagattgtgtggaatggtcctgtgggggtatttgaatgggaagcttttgcccggggaaccaaagctctcatggatgaggtggtgaaagccacttctaggggctgcatcaccatcataggtaagcggtcctatacaaagctaatacccatataagctggcagaattctgatcagaggaaggtggaatggagaacttcttctatgtctctttattctgggtaaatgttaagaggtaaacaggtaggtaatttacagaggagcctcttggtaagatagagttgggggtttatcagctaccttttgggttggggagcacactgccttacagttttggtgccaatcccttttttttcttttctctcttttccctttttacctggctttcattcaacaggtggtggagacactgccacttgctgtgccaaatggaacacggaggataaagtcagccatgtgagcactgggggtggtgccagtttggagctcctggaaggtgagggtcttctgttttttggcttgtttgggataagggtggactgtgcagtgagaggtgggtagaatggagtggagaangttagaaggtantgttgtcattagcagtcattactacctgggcagtacagaggaacttcagataaagctcctggcatccactgaggyggggagggacagatagaaayttggtctgagagttatggtctagtagacctggaatccacmatgtaaaagttggccagctcctggccatatatcctaaaaaagagctggcatgttattgggaagataaagtgggggaaatctggcttactgggccctatagtaatgctgtctatgtatgtgtgctctctcaaaaacaggtaaagtccttcctggggtggatgctctcagcaatatttagtactttcctgccttttagttcctgtgcacagcccctaagtcaacttagcattttctgcatctccacttggcattagctaaaaccttccatgtcaagattcagctagtggccaagagatgcagtgccaggaacccttaaacagttgcacagcatctcagctcatcttcactgcaccctggatttgcatacattcttcaagatcccatttgaattttttagtgactaaaccattgtgcattctagagtgcatatatttatattttgcctgttaaaaagaaagtgagcagtgttagcttagttctcttttgatgtaggttattatgattagctttgtcactgtttcactactcagcatggaaacaagatgaaattccatttgtaggtagtgagacaaaattgatgatccattaagtaaacaataaaagtgtccattgaaaccgtgatttttttttttttcctgtcatactttgttaggaagggtgagaatagaatcttgaggaacggatcagatgtctatattgctgaatgcaagaagtggggcagcagcagtggagagatgggacaattagataaatgtccattctttatcaagggcctactttatggcagacattgtgctagtgcttttattctaacttttatttttatcagttacacatgatcataatttaaaaagtcaaggcttataacaaaaaagccccagcccattcctcccattcaagattcccactccccagaggtgaccactttcaactcttgagtttttcaggtatatacctccatgtttctaagtaatatgcttatattgttcacttcttttttttttwttttttaaagaaatctatttcataccatggaggaaggctctgttccacatatatttccacttcttcattctctcggtatagttttgtcacaattatagattagatcaaaagtctacataactaatacagctgagctatgtagtatgctatgattaaatttacttatgtaacttttattgtctttggcattaacagtgtttcaaaaaattttctgtgtatacccatcagtgattcattcccaaatcttctagaagcataagtgtctcaatatattaaaacatattgaataatccttgttagagttatccctgcaggagtccttagtgctcctttatccaatttgtacttgatgccctctaggcagggtgtacagctagctgttgctctggtatttcctataaccttcttggggatttcttttacctcctgtgttagactcctgttttctggattcccccttttccctctttcttggtctactttttgtagaacacaagactctactagcttcctgagaaagggtgcctgggaggcaaaatctctaagactttgtaagtctgaaaatgtctttattcgacccttatacttgattcctagtttggctatatatagaattttagcctgagtatcactttttgagactcgaagccactgtttcattgtcactattgagaatctaaatggccattcggattctttcatcatctttataattttaccttcctatttctttcctgtccttttaatggagttttgggagagagcagaggtaaacatgatttgaaaaagccatgtctgaccagaaattctgtgctggmaagatatgtatttcacctttagggacaaagaaataaacttttggacaggaccacagagctagtaagtaacagcagggattcaagtccaggtttgtctggttccagtggctgatgcttttccaatgtgcctccgtccctgacatgatgcttctaggctatagatgcttctagactctatccctgacatgatgcttctagactattttgtttaaccctggatagaatagcaaaagaaaattttggtggttgctctaaacaaaacasaaatttgaaagctcaagttttttcttcatttgtattttagttaatactgtacccatatttgtagttaattttaaattgtaccatgtttctgcatacctctatgggtactcaggaattctagtccaatttttgtgactttttcctactgattacctttcctccaacgttttaaaaattatttcaaatggaactgaaagaagcataaactcccataaacccagcacctagactctacaattgccaacattatctatccaacaatctctgactgtaccttttaagtactttctactggactgtttccaggatcacccctcatttatttgggttgttaacctaaagaatgaatgggggaatctccagtcataaacaacttgtcaattaggcaaatatttgagttccttctatgtgcttaaagacgtgatagagggaatataagagcatttatgttctgaaggaatttttaacctaaccaaagaagatagtagataacttgtgtgcatataagctagaacagtataaggggccgggcatggtggcttacgcctgtratcccaggactttgggaggccraggcgggcagatcacctgtcaggagtttgggaccagcctggccaacatggtgaaaccccgtttctaccaaaaatacaaaaattagccgggcgtggtggcgtgtgccactgtagtcccagctattcagaaggctgaggcaggagaatcacttgaacccgggaggtggaggttgcagtgagctgagatcacgctactgcattcctgcttgggcgacagagtgagactctgcctcaaaacaaaaaccccacaaaacagtataaggatgtgctttctaatttggaattatgaattattggtaaaatattgcaaaggtgtatgctttaagttgtaaattcacctttaaccctagactatatatgtgtgtttatatgcagaaaaaaataattcccatgtcgtaagtgaacaatttggttctttagctcagtgttttcctgttttcttcatttccaaaatttccctctagcacaggggtttacacatgatcaaaaaggagtatacaatgaagacaccttcctcagtcccctacctaccagtttccctccccagaagcaacctctggaagaccagtttctttcaatctaaggctatttaatatacattaagaggccgggcgcagtggctcacgcctgtaatcccaacaacactttgggaggcccaggcaggcgggtcatgaggtcaggagattgagaccatcctggctaacacggtgaaaccctgtctctactaaaaatacaaaaaattagctgggcgtgatggtgggcgcctgtagtcccagctactcgggaggctgaggcaggagaatggcgtgaacctgggaagcggagctcgcagtgagccgagatcacgccactgcactccagcctgggcaacagtgagactctgcataaagagcatacccatgtgtgtacctatctatctatctatctatctatctatctatctatctatctgtatatagatatattaaaatgtaaatggtggcatacctgctgttctgtagttgattagtgttttctttcctgcctcttgaatattccctgtcaccttggatcccttagaacatagtgtgcatcacatcttccattctcaccccgccccatgctggctatattcctatattcgtactcagatcatagacacttgtttgctacccataaaaggaagaactggaggtaacagtgtcctcatcccatttaccatcagcacatattattttttaaaaattccacctagaagctgaaggacaacagatttaaacccatattcttctactcattttcaatttgcttcactatgatggtgtcacatgctgattccagataaaagcaagtgattttctgatatataaccattaaacaaatcttactggtctttggccatcagaattactgggctttgttcatctcccttgaatcctaaaaaatgaaaacactgataagctcaaatttttattaaccttggaacaaatgcaataattccttacagtcatatagcattttacaattctgaaagaattttcacatataccaattgaaccctcacaacagccctgtgaggtaggcagggtaggtgttactttcctactgctagtgaggagaacaaggctaagaggtgaagtaaggtcacacagttggtaaatgatggagctaggactagaacctaggccttctgacttgctgcctccctgagaacattcaagtaataatatcctatgctatataatgaakatttatctcctatgatgttgatcaggtctatttttatacattttacctgtttttatattacctttccctaatactgaaaaacactaaaactgatacgagacatttgagacatttcttctctgttactggactttcttagatatatcaaacactatcctaagatgaaacttctgttttgaggatccttggctataaattctcaattatgataygaacatttattttacaaattctacaaaagtatgttgaacttaagaaaaacaaaacaggtgtgtttatattctcaaaagctttgccatctttcccaatatgactttaatatgtgtataaatggaaaacagggaaaggtgttcagcaacattacagtattattgggaaacctatgcagagtgcacataaatgcaagttacatcacattaatttgttttctttgttggccttatagaggatgaaccattagtgtctttcaggtttgatcctgtcttatatgtgacatcctcagcaacaagctaaaatgatctgaattataccaatagcggggctcaagcagcagtgatcaaaacataatatgtatgtggtaaaaaggaacacttgttcttcagtggttttgcctaggtccagtgtaattacttatcaaaacatgttttaagctacagcatctctgttaaatttagaaatgtgaaacatggaagagttatcaacttggaatacaatactaaaactgaatataactgacccaaaactacctgtcaaaagcacagtaaagcttaacaggcataaaaactaaggggtaaaacccaactgctctgacataagagtgaaaaacagcaaatgcaaaccatcaggttaaagtgaatcacaaaacattaggcatgtagagcatgttttaaaaataggaaaatgacactgagctgtattaccaggaataatatttttaaaattccaggtatggccttctacatttaatagcaatggagagaaacaagcctatgggggaggtgcagaaaatgaatgggatctagaaagggagttgagtttggaagttaaggaagtcaaagaaacaaatacatccaaaatggatttagaatctctcctctaaatccatcctttccaaaaaatgtttcctatattgagagatttggtaaaaaaaaaaaaattagctagtgacagtaagtaactatattaccttataaaataaagtagtatttaaatgtagatcagaaattatgctgtcaaagataaatctgctgactaggctgtagaatytgaaacttaaatgctactatcagtgatagaaggcagaaaagtgtctcaaaaacagaattgccatattaggactcaacattaatgaaactattaagaaacaagtacttaactgtttgtaattgaagcctactgaaaaacacatttgtatgtttactaaagagatctaacagttttaactgacgaaaaatactgcagctacatttcagtcttttaaggtaaaacaagatctagaatattctagttcagtatactgggctcaaaaccaactttccttttgaaatgcatctagactagactatattccttacataatatcattgtcatcatcatcttcatgttttctcttcagtgggtttgcttcattggctgtgttctgtgacgaaaccatgttggtggtaataagaatatttttgggcccaatcattgaaggattaatcagaacattttgaactgcagttgttgcaggaactgtaaacagagaagaaagcccccccaaaaccaagctatgaattacccagaatctgaaacatatgataaaaagtatacaacaaagctgaatgtaattctaataccaatttcaatagcatgaagtgcaactatatcatagaagaaacataggtacttatactgcaatgagttgaattaaattttaaaaaatctttatttttaattggcaaataataattgtgtatttatttttaaattactatttttttgagacagtgtctcgctctgtcgtccaagctggcgtgatcttggctcactgcaacctccgcctcctgagttcaagtgattctcgtgcctcaggttcccaagtagccgggattataggcgtgtaccaccaaacctggctaatttttgtattttcagtagagacggggtttcaccacgttggccaggctggtctcgaactcctggcctcaagtgatcctcccgcctcggtctcccaaagtgctgggattacaggtgtgagccattgtaccctgccaataattgtgtatatgtacgggatataatgtgatgttctgatctatgtatagataaagattaaacatatctagtacaaggttgaagaagttctgttgtattttaacaacctagaatttcaatttagtcatgggaaactgcactggattcatcatgcaacatattaaacaaaggcctatgttcaaggtcaggaatcacttccctaataggccagtattttacgttagttgcttattgtgtgtggttaggtttcagaagatatgaaatctagacatacacattagtaaactgtgctatgacagaattcttattccaatctgtgtgtgtgtgtgtgtgtgtgtgtgtgtgtgtatcctatgaagtaaaggtacaatttcatttgaatttacatttatgttctggattgcatacacatattcatcactaagttttgtcgctttcttgagcttttaccttaactgcttttccttgaagacgacttagatttgtggaccctaactgtttagctgacggtgttctttgaaaatctgatgaacacactgaatactctttccctcctccccaaaacgttacatatatagtagtccccccttatctgcagtttcagctacttgtggtcaactgcgatccaaaaatagatgagtacagtacagtaagatactttgagagatcacactcacatatattttattacagtatgttgttgtaattgttaattaattattgttaatttcttgccgtgcctaatttataaattaaaccttataatttagaaagtttataaatttaactttaaaggttgtaaatttaactgggggtcttggaacaatccctcaaggataaggggggagactactttatgtaaaatttcacagaattttagagggctcataggtccctctgaagaaccctcatttgcagcattactgccaccttcctgttgggtattaaaacaatttacctcttgctataggaatacaaacggtcctacaatttcaaattattcacaaattctgtcccccactcccaatcacattacctggtttgacaggtgtggactgagaaggtggaatctgcaccgtaaatctttggcttgtcactgacattggagttgcaactttatttgggacagacaccgtttgtggggttgctgtagttacaataaacagaccatgtttgttaggtgacttatacagatttatattctacactcagcttaccgcaaactatcttcaaagcaaaggaaactaataaaaggtgaggaaaaagtcattagaaataagagcaaaacaaccttaaaaaaatttacaagcttgtttagatgttacaaaattcagtatagaatagtggtaaagaatgtaggctctgtagcctacctgcttgagtttgaatacaggctctcacctactagctgagtgtccttgggcaagtttatttaaatttttgtgcctcagttttctcctctgtaaaatgggggatatatcacccatttcatataattattgtgaaaattaagtaaaaataatccctgtaaaactcttcaaacagcctctagtacacagtaagcactgaggtatagctggatgaagacataaagatgagagtttaacctaccagaataaagacccaggttttctatttattaccttagttggcacttttaatcttggtcacctgctgagaatcagaagatgtcatctatgcccatgaaactaaagcagagatcaaatacaccccttgaggtctccaggtgggcccagaaaatttattccctttctgtgttcagatactttttaagcagaaaaatatcttggagataacctagtctaaacccccagtcatctaaattctacccattattccaaggtacagctcaaatactaccccgttttataaaactttccttaattttctcagttaaacgtcttatatcctgcctctgaagttcccttaacgtcataggagtcattattatcttatctcattgactagattacaagccttgactaacatttttcatccttgtgagcacatggctcttttaccttgctcctaataggtactcaacaaatgtttgcttaataaatgtattttgtaagactcgaagacttaatatatatactgacatcattgctctcttaaaaaatacatttatggaaatgtatccatttccaatttttcatttggggatgcaggctttccaatacatcccttccccctggaaccagcagtctacccagagatagagttgctgaggacactgcaattatcatcatttctagagacaaaggtgaagaaagtctaagggaataaagcccaaaggtactgagaaatccgggttttactgctttctctcccaaacacagaaggtgagaccttcctctaaaatatctccatccctaggtaagttttcccatgtgttaaggatcagttcaaagaatttggtgaagcgtaatgaagcaatgtaagtattttattttataaagaaaaaagaaaactcacagtaggtggatgttttcttggcctaaggattgttaatacattttagtaggtatggagttcaggctttaaaactgaacacattagactgtagatggagcttcccccaattgaacagagtaaatactcaggtcttaagtctatataaatcattttaatttttttttttttttgagacagagtcttactctgtcgtccaagctggaatgcagtggcatgatcttggctcactgtgacctccgcctcttgggttcaagcaattctcgtgcctcagcctcccgagtagctgggattacaggcacccgccaccatgcctggctaatttttgtatttttagtagagacggggtttcaccatgttggccaggctgctcttgaactcctgacctcaagtgataggcccaccttggcctcccaaagtgctaggattacaggtgtgagccaccgcacctggccaactcattttaatttttttaaattttaaaacttgcatctttatgcctggcgtggtggctcacacctgtaatcctagcactttgggaggccgaggcaggcagatcacttgaggtcaggagttcaagaccagcctggccaacatggtgaaatcccgtctttactgaaaaaaaaaaaaaacacaaaaaaacaaaaattagcctggtgtggtgacgcacacctgtaatcccagctactcgggaggctgaggcaggagaattgcttgaacccaggaggcagaggttgcagtgagccaagattgtgccattgcactccagcctggcctgggtaacagagtgagagtctgtctcaaaaaataaaaaataaaaacaaaaaaaaacttgcatctttaaaactatcaggcgttttttggtagtgccctgactctagattttaacaatctctgaacagtatgtacaacaaatgtctagctaggaataaaaatcacaactgataactaaaattggttaacctgcctaacacacgaaactgattaccagcctaggggtttaaaaaagctggtattcatttaagtaatgtgaacccacagacaaacagtatatgatgaaaatttacaaagattataatgcagatttctgtccacaaaggtcacaggtaggtaattagacatgtacaactaatactatacccaaactggttttacaatgctgaaatgcaaatttacatcctgagaatatgaagagagggtttacacacctcaaaaatcaaatgctgtttatacctgagctatatgacagctataggactcaagttataagcaataagagccaataaattaatactggtgaaaagggacttttctgaaaatactttgaatactagactatgcaagaaacccagcaggaatgtaggaaaaaaaaaacaggaaatctaagtccattatttgttttccttattatctaaacaacaatattaaaaagaaacaaataatggtttctaaataccattctccactaaaaggaactagagctctttggacaagtggatgattctaggacctaggcagaaaaatataaagatgagtttggaacatcttgttgcatcagaaagcaagaaatgatcacagaatgatgcagatacgtcaaaaggacacaggaaacagcttgaaggggctcccactgaccaatctaaaacaatcagtactatgttttaaaaaggttagtattaaaaacaatttttttctttgaaatccttaagatttttgtacaccttaatcttctttctactgtattctcatcaatgtatttggaaatttaaatttctaataagtagtctactgccataagtgtgtgtggcaccttatagaaggcgtaaagtacacagctaagagtaaactcctgtttttggtatcagagtttataccaacaacaatgggggcaatgtccaattttatattcatttgagatcagacgttccttgtggctttctcattttgaaatccagtaacatgtatgtttatagctttactagaggatgagtaaaattattaatagtaacacatacacaagaatttctgattcactttttgacttgcattatagttcaaaaccaagtgctgaggcactgctttaccagccagaaatgccattgtctcctctcacttacctatagtaggagtagtaggtttgctactaacagcaccaacacttaatcgtggaactagtctcccttggttaggtccctaggggatttaaaaaacaaattaatgttaagatgtgacacctaaatttaccaggaatgaaattaggattgctgatgtaaatgattatggataatccatggcaagaaagtcctgtttttgttctctcagtgttctaaatccaacatttaatctggggtttgtataaacatatatacatctctatctatataaaaatagatatgaatacgtataaaatcttatgcagtattaaagtttaagatagcggttatccccattcaaataagactgtaactactttgtgatttttaatcttaactggtcaatttcttaacccaaaaaagaataaaactcttatagtggaacttcagaaaaggcagcctattatggggagaactttttcagtggtgggagagctttatgtcatattttagaaagctggcctaattcctgatggtatcatttcctctgttattaggcctcactaaaaaactatgatatagtggaaagactgggagttatgaggcttggaatcagtcctagctttgctactaacttcataaatgagttcaggccctgcttcctgatgtgaaaaatgactgttgagttagatgaacactaaagttccatctagctcgaaaattttttaaaattaaaaaaattctagtaagttatcttaacctttaatctactatactagctacaggaatttgcttttcacaaagtcccctatcatattccaccttttaaaaaaagaaaagttgactaaaatttcttacctttttaattaaggacttcagcctatagtttggagctgttaagcagtatctatcaggtggcagtctaggtcctgcatatggcttaatcagtggcaaaggggtttgatttttctgccttgcgatatccagtaaaaacttaaaaaaaaaatccttattagaactacagttttaaaaattgtaagtaaaaataacttcaaatcaaagtttgctcacatctcttgggggaggagaggtaaaagattggtcagcacgacactggattgccagtctcacatcatctgcatcaacattaggtttcttagcatggctcgaataaatttttgcatcatccagaattgtagtcacataacctataagaacaaaacaatcttttcttaaacatatgaagacagcttaatatttatggctacttgtcttaataaaactttccactaatttgtagacggtttataaattttgtgggtttttgtagagacagggtctcgctatgttgcccaggaaactcctggcctccccgcgacagcctcccgaagtgctgagattacaggtgtaagctactgtgctcagcctaaatgctgattttaataagtaattgtcctgtctatatgatcagt

SEQ ID NO: 94517 - DNA, 71939 bp, Homo sapiens
  misc_feature (1)...(71939): n = A,T,C or G
agtgaagagctgttattccccactcaacagaagtaggagctgaaggactcagggatcaagtaaccagacaagagtcatcatggtaactggtgtcaggtatgcagtgagaatttacaatcccttgttggaatccagtttttattttcttagattagtaaaccaaagctgagatcaaacacacttcctttcttgtgaagtccactcttaggagtgacatcttatgtacgacaaatgtcgttatttatttcttcccaaagtgctctcacatatacggcctcatcccactgccaaccctgtgtggagttagacattcttatttcgacttacagattagaaaacagaagcagaaacacggcaagggacttgctgacattccactgctggctcctggcagagtcagaagcctggcattctttcctccaggtcacactgtcctccaactgatcccgcctgaaactgagcagggcagcgagggttcacacaggggttacgcctccaagccatcaccgtgaaagggaagacgcagatgtgaataaaactacaaaactggctatattttaaaacacagacattggtacccagatcaatgggtctatgtgagtcttggcctagaggttccctcagccactgcccagtcaaaggatacaatgtggacttttccttccttcttccctccttcctccctcttctcccttcctcccccttccctctctgcctctgtcttgtctggccttcctaagtcaaagcaaacctcgttaatgtaacagaagagctatttggtatggctcacattctccttcctttgcttgagacctacgtcgattcaaagctctgagctcttcttttggcaaatgttctatccactgatcacagagtatgatacagggtcccttggtccctcagacacagccatatcccatgctgagcattatttgattgctacaatcggtacacgtgcctctgatcaacaaacaaacgatcacagcatctagaaaattggagaaccgtaggccaggcatggtggctcatgcttgtaatcccagcactttcagaggctgaggtaggcagatcacttcaggccaggagttcaagaccagcctggccaacatagtaaaaccccatctctaccaaaagtacaaaaattagtcaggtgtggtggcacacgcctgtagtcccagctactcaggaggctgaggtaggagaatcacttcaacctgggaggcggaggttgcagtgagcagagatcacaccactgcactgcagcctgggcgacagagaagactgtccaaaaaaaaaagaaaagaaggaaaactggagaatcctcctcttagaggcacccagtaagaaaacatctccatctgaggtatctgtaggacagccatgaaaagagcctgcctgggccttggagacaaaatcatctgggttcctcatgaactagaaaagattcaacttctccaagcctcagattcctcatctataaaatggcaaacctaacactatccctgcatgttgttgtaagaataaagtgtcaagcacagtggcaggcaaacagtaggtgctcactaaatgtctattttcctcccagcagtcctttctttagctccatataaaggtgcattcccaattgagtgacaccatttgaagagttcattcttatcttaagaaataaaattatcaccttaagaaacaaaattctctatactctaacctttatgcctgaaaggctaacaactagctatgtcagggcaaatgccaccaaatggcactaggtttgggaaagaagagcctggtatgtgctgtgcatttcaaaggttttatgaagtcacaaaacataatccttatactgatgatgtcttcctcaccaccccaggacagagtgggcccctctcagtcatatctcaaccttctattgcactcattagagttgtaattatatagttattcatgagattatttgttttatgtttgtgcactctccaagagcctagcatagtgcctggcacatagaagatgaatgaatgaatgaatgaagaaaatgtccactggccttatcaccttccagccatatatcaattctatgatgactcaggggtatggattacaccttcattttacagaggatgaaagcttgcatcacggtcaaggtcagccattgaggaagtggtggggcaggcacttcagccaacccagacttcctaacaccaaatccttgttcattcctgcttctctgccccttgactcaccagcctcacccttgtgtctattcagatggtaacatcctagggggtaccattccctgtctaggcatgtcatttggtggccaattgccacattttgagtgcagaaggtctactttctaccctaactcattgagcaatgggttatttattggctgacaacagccccagctgatgatggcacagcaagcccttgcatgttcatctgcacaagcctgaggaagcagacaaaggattcccagagttgggaacttaagctggttgggtctgtgctgtttgtcagggggggatccttgacattcaacttgaatacctgtggtcattccattcataataataataataattctgggtctcagtttacatgctcaattcccttttaattgctatccattatttactaattaaccaagtttctgacacagccatgcagtaaacatctcagccctgttcattctgtctatgaaacccagttcacaatctagccttactggtctatgaagtccacctgtttctgccattttaacctctccatctctggggatctctggagaatacttagaggtgcatgttccaggagacaatgaacttaatgtttagacagacatgatgggtgaacacctggagtgggaataccaaaatatgtgtgcatggcccagtttacctttaactggttgtgacatgcgcaacaagtgatttcacctccacagattcggtctctgcgtctttgagcctgcagtggtttctccccaagctctgtgttcctctagtccatttaatcttctaaacagacagactgcccttgatgacaaatctgaacaagagaaacactcctgcaccactccagagctcactcgaggccctctatcaggcagaaaagatgatccctaagcctactgtggtctggaagtgcttgtaacaagattgtctttgtaacaacttccttaaggagacttcaaagccctttattaacccacacagtrgctgagctggtagggacagagcagtaacaccccttgaaatgtgggtggcatctgctttttggtggctcttggaggagaagttactccatcccttcaaacccaccacggacaagtggcttcattggtcactaaggctggcctgagagtgtgcacaggctgagggtcagcacagatgtgagatcagagagggcttgtctggctgctgtggccaagagaagagggcatgacaggccaggtcacaaacccaggggtcctgtaccagaactggggtggacacccttccgcagcccatgtgacctgagcagtgtgcataggcagcagtgagtaggatcatagagcggggaggaaaccgagcctggcccctgcagcggtgcagagacacacggagggcccagggaagccagaagcacaaatgactacagtggtggcaacagcagtgggaagatttagggggtattggggcagcaggttaacaagactagagaaacactcctgtttctctagcacagcctgtaggtctagcacagcctgtagggacagaaaggtgtgatccctttcctcccccatcataaaggtcacagttgacactcaaataacaaaagacaggccaacaagtgacacaagagacttcagaaatgaagacccaaagactcagggagaacggtgtttctgcttaggtttgatgaagaacatggatggccgtatagaaatgtgattggagagaagggtgtgatctcatagtgatagactgaggggaacccagcaaggcctgtccgttccaattcttcttgacctctctgtgtagcattgctttctcctgggtatggggcaggacccctctcgaatgagggtctttaaaggagaagggagaggggagagagtgatgtttctagattttatggcttgctgtggaggagaggggctctactttctatgacctgcctggggaagagggattctggtttctatgattcacttagcgggagaagaaggggcaggagacaggaggatgggagaaggtcagagagaccttgtttctgaggccttttcagtttccttcagttcaaagtactcagcatgccaaggtgccatactttggggtatcatgttctaagccccccaaaaaagtgcctgacacacaacgggtgctcagtaaataatgtaagtccctttcttctgctgccaccccaaaagagggaccctctctcccagcttcctagtgaggatggaatgatgtattgaaccagcatgagtcccatctacttacccgttactaaggggaattgtgataagctcttcatgtgtaccccactgtgctgttctcctattctcagttcatctctttgcatctcaacttggaaggtaagaacttaatcaggatgcactgaacaattggcagaaactcatgtgaatgtaactatcttgtccagttccttaacctgtgctaagtccaggcaggcacctgaagaaaaaaaaaaaaaagcatgaaggaggcttttgcccaaatggcactatacttgggggattctgagtagggctgaaacagcctttgcaaaaattataactgaggaaattatggcagtgacaaagatcagacctaaatgactcagtctttcttctaactttcatgctgtccttattcattcctgggcataggccaaactaaccttagaaaggaattcagtttatggtttgactcagaaacaaaatcaataatagccctttcccgaaaagacccccttcttgcctgggtgccagtctgcctttgtacgattaatctattagttacaacattagaaattatggtttaggggtcctgcggcgtcaggctgcaagagtctgaaccttcccaagttgctgctggggataacatcgctattgtaaaatctaacatcctattttgcagaccctgcactggatggatcagctgacaccactcagaccgtgtgtgatctggctcaaccagttctgcgatcccacccaggaacagaagactgcaagaaaacgttacttcaacccccctgtgatcccatctgcaacctgaccaatcagcactccccaagtcccaagcccctatctgccaaattatctttaaaaactcccagaggcagggtgcagtggttcaacgcctgtaatcccagcactttaggtggatcacgagatcaagagatcaagaccagcctggccaacatggtgaaaccccgtctctactaaaaatacaaaaattagctgggtgtggcggcgcgtgcctgtaatcccagctacccaggaggctgaggcaggagaatcgcttgaacccgtgaggcagaggttgcagtgagccaagaccatgccactgcatttcagcctgggcgacagagggagactccgtctgaacaaacaaacaaacaaacaactcccggaatgcttggggagactgatttgagtactggaatcccagtactttaggaggccaaggtaggtggatcatttgaggtcaggagttccagaccagcctggccaacatggtgaaaccccgtctctactaaaattagaaaaattagccgggtgtggtggtgggcgcctgtaatcccagcactttgggaagccaaggcaggtgaattatctgaggtcgggagtttaaggccagccttaaactggcgaaaccccgcctctactaaaaatacaaaaattatctgggcatggtggcatgtgcctgtaatcccagctactcgggaggctgaggcaggagaatcgcttgaacccgggaggcggaggttgcagtgagccgagatcacgctattgcactccggcctgggcaacagagcgagactccgtctcaaacaaacaaacaaaggaacgaaaacctccggtctccggcacggcaagctctgcgtgaattactttctccattgcaactcccctgtcttgataaatgggctctgtctaagcagcgggcaaggtgaactcgttgggctgttacaggaccagtgacagaccaagggcatgccactgaaggaatccctagacgcacccttctggatgtgagacaggcggatctcacccacgcctgccagcagctcctcggagaactgtgttcctgggtcagccctggcccagaggagcgccggggacccgcagagtgctgctgaagtcaaggctacaactcacctrggatctggggcgccagccctccggtgggcagggcgttctcctcccccaccccctccccgcacgatgacatcaagtgtttggcgttgagttgctccataaaagctgcccggggaagccaggagagcgaagggcggacgtactcgccacggcacccaggctgcgcgcacgcggtcccggtgtgcagctggagagcgagcrgccaccgggagcccccggcacagcccgcgcccgccccgcaggagcccgcgaagatgccccggcgcagcctgcacgcggcggccgtgctcctgctggtgatcttaaaggaacagccttccagcccggccccagtgaacggtaaagtttccgcctgcttctttcctaacactcctgagcgctcagccgcccctgggctgaaggctcttcaatgataaagtaaaatcattgctgsggggagcagggaaggtgtagtaccaaatagtagattctcaagaaaggatgctccgttttcctttgctgaggytgggtcgggaagcacgttgctttctagtggcgcttggcgcagatttggtgttaaaatgtttgcgtgtactcccgggcaccgccagctctgaagatgtggcttgggaacttgctaaccagggaggagatgcaaagccaagatttaaaacagcgttcccctgatccacgtttagaaagtagagacatgactgtggcattctgattggggtaagcacagagaaaggtttgctgtgcccctgtgcagaacccgcagacagtggtaggcgcttttctttggaggagaggatctttaccattaagtcttacctacaagtcaaagggatgatgcatcccattcttaatcattgtttttctccaggagggctctactatgctgaatgtacgtgtgtgtgcacgtacacacacacacgcacgcgcgcacgcacacaaacmacacacacacacacacacacacacagcatatttctgattgtaattagaacactaaatcccaaaaggctggaggctgagggactgaatggaggctccgtggagtgacaggaggaggtggcagaggggacctgaactgtgggctcacgccgggccagtgagctaacacgtgtacagccaaggctggttcattaatcttttggaataagaaagtgattttggaccgaaagtgattttactggctgaaactagattcttcctggcgaggcagtggtggtgggaaatgtgtcctgctcagcagcataaaagctctgagcctcctctcttggaggtcacagtgcccatggggaagggcaggggagccaggctgtggataactcttaattaaattccagtcaactagctggcatgatgtgcttgatattatctccctcatctggtcagggagaaacagaagcgatgtaacagaagttgggagaaaggagcgatgtaaaagtgaaaatcaagttttaaaaccacaaactttacatgtttccttttacgaaagctgcactgagaccaaagtttccctggaaatctctttagtcctaagttgctccaagaccaaagggagaaacagccattagttggccctctttcctatagctggttgctcctctcactctggggcagctctgcctcccttctctctcttttcctgcccttccctgttctcttccctccctccccttcctttcttccctactttccctgctcttcctcttccctctccctttccctcctccttatctcctctcccaattctccaagttgggactggggaagtttgtagtcaaaactccactttcgcctcactctgaggaaggagactgcctacccctgggtagagcacagcttttattctgtaaattctcatgcagtttccttgggtttttaactgccttagaggacaggtcaaagcaaaaatcactgaggtgtagaatgtcagcatgaacccaaagttggaggtggagaggagttaagctgagtaatggggtcaaagtgtgatctgctctctgcctggtgcatttaaacttccagcattggagaatgttcaagaacaatgtcaggggcccaggagggagcataataatgtgaagtcaagtgtcttctggagaaacccttggaattcttagttgccgtggctttggggggcatttcagtgaattctgcagagcttgccctgcccaaacctggtgtggagagccaggcagtcttgggctacccaggagatggttactcagggaaagttctagcacccagcacaggaagcaggcagggcccaggacctctgatatggatcttggtaaataccattttctctgggcattccctccaggggaacctccctgcccagtaccagctgggtctgcaggttctaacaggtttcaggctgagcctcccaggtttcccagatggaacagataaccttccttgggaaggaaactattcccctccaggaagggcctgctccctcaggatgccactgaggccttggcctggcctcgcttgtggaatcagtttaatccttttaagccttctgttcttacagctagaagtggggaaccagggggtgcaattcctgaataaagcacactktcgtgcgcgtgcacacacacacacgcacacatacacacacttttagagagacttcctgaggtcagagctgagctggggccctgatcctcacccgatgaacccccttgactcaccatcctcacttacaaygccgcttctccccagccctccagctcctgagcccctccagacactgccatttatacccaaagtgccgagtctggagtcccaagccagctcactcacagagaggagggcagggaatgttgctctggaggctgctgcctttcaacaagtccccagtcctatgtcaccaccgcgacctcacagtcccagatgtccactctatgacttttagccctgagctttccagagtgtgatgctgaggcctcatctgaggatgagaactccaacaacagggaaaaccttgattagcgagccctgggagggtagcagaagatgtagggtataaggctatgatttgaatgtgagcaggtacaatgcaaactgctggcaaggcagcagtgctcaggcagcagatgtgtttctagtggcctccaggatcactggagtggcctgtgcctcctcaggggaaaagtaagggtgaactcctctgttatttgtggaattttacatcctgggcctccaactgttctgcctgctaagaggtaatgatctggcttattatatctctaaggtctgggattacatcttaataatgaacctctcacacaaaagactgaagaaaatgtccagaagaggttttatgtcttctatagcttggtttgaaagcaatgctttctttattttttttcattgttgtttcagcaaaggggtgagcagtaaacttgggggtcacatacaagtttggtttccccgtggttctgaatgtctaattactaattcaagggaggttgatcttgggaccctcaactctcaatgcacccatagctggtttcaggggagtctgtggaccttctgaaatgacttgtatataaaactttatgtgtctaagcttagggaaattttttttttgagacagagtctcgctctgtcacccattctggagtgcaatggcacaatctcagctcactgcaacctccgcctcccgggttcaagcaattctcctgcctcagcctccccagcagctgggattacaggcacccgccaccacgcctgcctaatttttgtatttttagtagagacagggtttcaccatgttggccaggctggtctcgaactcctgacctcaggcgatctgcctgtcttggtcttccaaagtgctgggattacaggggtgagccaccgtacccagccagcttagggaaatttttactgggagaggtccataatactcatcggatactccagggggtctggactcctccacttaactactccaaagattgaggagacttgaagattccctaagttcatggcactaatgctaaattaatggtaaatgcggtgggactccttccagtgggaatatgatattggtcaggacacttcaccttggtggactttcatttcctcacctacaaaaggaggagatgggctatgagtgtaagaaagagatctgaactcttctcttccagggtgggatgtcaataaataatgcctaaacataaaacaatcaaggtaaaacaatattagcatgttatatagagatatggagataatagcaaaagaatcattttaaaaagatccaaagtggttgctctagggagcagtacatggttagggaatgtcagggaactgaggtttttgttacacagctttgtagaaccatctgactttctaaaccacgtgcaagtgtaatttgataaaaattaccaattacattggaaaattaaaaacaaaattaattacaaacactgaggcaaagaaatggaacagaataacaaaaaatatgagattaaaccggctttttttwaaaaaaaaagccaagttcactttttaacttttaaaaaacacaatttccttaagtaggaaatgccaggagtgataagtgaccagattgcttgtcacttaagttttactgcaaactaattcccacgagagaaaggggatgtgaggtgcttccccacaagggtacgcttttccatctgtacccttgtgggtcgagaaccacggagaccctgggaaaagttgggaggcagggatttaggagttgcacagtcccctcattggatgagtcacctgagacacacagtgggatgcttctctactcagggtcccttcctcggaggtgaagaggaaggccggcaggcagggtcacaagagcacagctctgcacttgtgaaaaagaccttttttgacataggaacgaagaacatttatgcatgaagagtgtggagtgcgaagtagtgggtgacttttgttctctttctggcagaactttgcctacacattcctactacccctggaattctaactcagatgtgggtagcagcttcctcaaagagaaactttttcccagctgggtgctgtggctcacacctgtaatcccagccctttgggaggctggagtgggcagatcgcttgagcccaggagtttgagatcagcctgggcaacatggtgaaactccatctctgtgaaaaatacaaaaattagccaggtgtggtggtgcgcgcctgtaatcccagctactagggaggctgaggtgggaggattgcttgagcccaggaggttgaggctgcagtgagctgcgatcacaccactgtactccagtgacagagtgagaccctgtctcacaaaaagaaagagaaagagagaaagaaaaagaaaaagaagaaagagagagagcgagagagagagagaaagaaagaaagaaagaaagaaagaaagaaagaaagaaagaaagaaaggaaagaaagagagtgggaggggagagacagagagagagagaaaatgtaaagtgggaaaaagcaagacacagaacactatttccagtatgccaatgtttgtgtgaggagaaagagggagatcaatgcatatgtgtgtgtagccatgccatgaaagggctcccaatcatcagctaacctccttgtctaatggaagcagggaaggtagagtgggaagaagagcttctactgtatataccatttgatggcttttgggttttgagccacatgaaattattgcctattcaggtaataaagtttagcttctctaagatgtctggaaggcacctgctcaagaaccccctcctgcttccatgagcctctgcatgaaccaactgcctgtgctgctgactggagcacagttgccctgagaagctgctgttctgatgcagactcagaaaaagtttcaatttggccgggcatggtggctcacgcctataatcccagcactttgggagaccaaggcaggcggatcacctgaggtcgggagtttgagaccagcctgaccaacatggagaaaccccatctctactaaaaatacaaaattaaccaggcgtgacggtgcgtgcctgtaatcccagctactcaggaggctgaggcaggagaattgcttgaacccaggaggcagaggttgcagtgagccgagatcgcgccactgcactccagcctgggcaacaagagcaatactccaccttgaaaaaaaaaaaaaagaaaaagaaaaagtttcaatttctgggcatcgacctccttttcaatttcgctcatatcaaaacaaaatctgtagtgttttccattactcatctggttccattgtacttacttactgtgttttgttctttgtaggttccaagtggacttattttggtaagtagagattttaaatacttttttgttgaaaagaaaatagaaatggttgtatttaatgagaaaaacagaaacttcatgctctgtggaggtgattttgaagggtcggaagcacagttcttgtattgtagaaagagagtacaaaggcatctcctaagaacacttcaacttgggttgcatactgcactttctccaagcaggcgagcctgctccaggcacaggactgtgagtcatagtgtccaggcttcagattcctgcaaggatttctaccaaacctccaagatttggaggtaacttgccccacctccggactgcaagggtcctgggcaggagagagcctttctcccttgcaggacacatatcctattataaacaaagaagaaagggctcctctctgaaagtttggctgaggtcccagaacttaagctgtcagtatgtctagaattaactkcttgttgccgtgattgtaagctagcgatggatgaagaggtgttggtcagtgcttagtgaaagagggatgcttgtcttaaatgaagcgagaggagcaccagtgtgcttgttgcctgggctttctgtgggacggtctccaagagcatgttagccccatctggcaggcctgccagagaagcagctggaaatcagcttagctggagagttgcagtgaattagaaattggtcattggctggaatggatgtggcaggccagacacctgagtcccctggccagtgcgggaatgttgataatgtcttgttggggcacagccacagaagatgcacaagatcgattgttttggtagcagaagggtggaactgactcactggcacaggaggcattttaagcaagcagggttgtggccaaagttaaagccacaggatgcaatggctgtgggcggggacaggcgggaagttgattactacagtggaagcaccgtccagagaaagatctgacaccaatttgcataggtcagcctttggaggttcaccagcccaagatgcatagaaaagtcactgaactgaccaaccagctacccacaggccaaggtcccctcagccccagcactgcacggctccgttattgctaacatcccttatgtactgattatgtgcacagcacattgctaagtgggtgggtaatagaagggtaggctgtggtccatagttgggaattacttaaagctcacaattcaaagcagaacataataggtaataataacatcataaacaaatgcttcagagatctgagtgctcaaaggagggcgagtgtgctagggctagatggtcagggaaggcctcctggaggaggagggctttcacctgggccttggaagataaggaggattcggtgagtggggagtgggtgctgttggctaaggtgatgttgagcagaagcaagaaagagcaaggtggtgttcgaggaaagcatgtggagaagggtttatagcggagtcacgggctctaaggtcagagagataggctgggtcaaacaggggaggtgtggagggtcagggcaggcctttcccactttgtcctgctcctggaggggcagggcagggagtaagtctgtgttttaggaagagttacttggtggtaggaggtggagggggaaggatggagggaggcaggaaggtgtttggcctgtggagaaaccccgttccgtgtcttcacatccagtttacagtggtggcagtgagggggaaggccaggccaggataagagaactgacaaagtaagaatcgcagaatctgggccacagggccccttgggcaggttccgtgtgtaggaggtgacaggcatggaaagaaggtggcacttgggttctgggctttattccatatgatccccagtaagccatttcagccccaggacttcactttccccatctgtaacctggaggaggggttgtctagaccagtgtttctcaaactacggcttgggatcacccacatcaggatcacctggaatacttccccaaaatgcagatttctaggccttgggctagacctgggaaagggagggagcctgaaaaacctgtattcttaacgcactccccaagtgattcttagctgcactctatcagagaatcactgacccatggttcccaagacctgtctatccagagagaggaagcttgccccacctcttctgctggcctctcaggtatgatagaaacacagatcacatctctacggggtcctctatccctatctctctgttacagccctcctgggcagaatgagatggcgacagggaacagagacattgtgtgaaggtgtgggaggacaaattttttttttttttttggagtctcattctcacccagggtggagtgcagtggcgtgatcttggctcactgcaacctctgcttcctgggtccaagggattctcctgcctcagcctcccaagtagctgggattacaggggtgtgccatcacgcccggctaatttctgtatttttattagagatggggtttcaccatgatggccaggctggtctcgaactcctgatctcaagtgttctgcccacctcggcctctcaaagtgttgggattacaggtgtgagccaccatgactggctgggaagagaatcttaactgcctcttcatcatgacgtggtgttcgccaagggcgggcttctcagtgcagccacactgacctgtccagaagcatttctccctgaccactagctctggccagccctctgtccctcctaccctgcataattagagcagctctttgctgaggaagcagagggcagagtctaatgatgcatggacatgcatggggtaagcacaaaggcaagtctggtttttattagtgacatgggcatgtgtgatgtggagtcagccctcagaggggacgtgcaggagaggacagatggaagacagctaaggaggcaaactcctcctgaggtcttggctagctcctccttaggtcctggctggcagctggcacctgtgctcagggctgcacaggtagacagagggcccagcataagtgctggagggaaacggcttccaagcaataagggccgcactgaatggggcaagtccaaccaaaggctccgtgctgggcatggtggctcatgtgcagaactcagcttctttgcacgtacactgctgagtcattctccaggggcctcccactgtctggcacacatggtaggacttttagaagtacaaaaaagggagttctacccctacatcctcatagctgagtcaccaggctgactgcatggatggctcctccctggagagaggaggaccatctgactgccaagatggggccagcgccacctctttgagcccctcctagggtgctgaaacagcagctgaatggctgctgggcttagcatggctgaggtggcatcatgagagagaggctggggatgatgtgacatggaccttccccgccggaaatcagtcccgcatcaatcccgctgagcccggcagcttcacttgctgtgaactgaggacagctgcaggtcaggttgtcatgtgagctaaggacaaactccagcctgctaaggtatcagaatatgtgccctgtgggggatgaagatgaccggaaggaggcaggaagggttgtgggcacrttcaggtccttggtgtgggtgctgcagtcagtttttgagcattcatccagctgtttgcttatggtctacacactyttcggkrtatatttcatattcaataaaagagttacaaagttccagctggctgggagattcatccttactctgayagcttttttagtccttccccaagaaaaaaccaaaccaaacyaaaacaaaacaaaaaacccaaaaacaaaacaaaaaaaamccctagtgtgttcaaaacaacagagcaaccagaaagaatgactgtattggagctagacccgagagcacatcatgttagctgagaatgggcgtggtgtttcatccctgatgatatcagatattggcttgctgcttcttggatgtgagctggttgagaaatagatgaaaacccctgtttgctcaagatctgcaaagtcttaaacgcgatgggatggcagaagaacatggatgacaagccttcctcctggagggtgcgccaacccctatcacagccccacagggcacccgcgaggccagcccctccatcctgttcaggaaaccttggaaagaaggtggcctggcacgggggtgccaggtggctggctgtggctgtggccgcacatgcttacaggtcagcctgcccagttctctgttgcggcaggccagccctcgtggccctcggctctggcaggactcggygtgagccgggcagtgctgtgcattccttttgctgcactccttggttcctctcccagataatacattgtccgtcttaaagaatttcctttggaaatcagggggagatcctccactggggcaaacctcattttcatgtccctgaagtcctccaggcccacacctccaccygccttctgtcctgtatctgcggaaatatttattttctgtaatgaactttcttggggctccagacaccctctcagcctcttcccacacagaactagaaatggaacacatgaaaggaggccaggaagcaaactcttgactttctattcttcagcagtgataaaggcactgtgtgacctcacacctgaattgcaatataaaaagcaggctgcagtgagagctcaggggagactcaaaacagcagggagcacctgcaattaatagaccgagggctcttgtctctatcaaagggagggaggcttggccatctcaaaacattccagccacttctcgcgactcccagctgccatcctgaggatgaataaggggcacaaagtactctcaggagagccggaaaaggccagacatgtttttcttttttcttttttttctttttttttttgagatggagtctcgctctgccacccagactggagtgcagtggtgcaatcttggctcactgcaacctccgcctcccaggttcaagcgattctcctgcctcagactcccaagtagctgggattacaggcacccaccaccacgcccggctaatctttgtatttttaatagagacggggtttcaccatgttgaccaggctggtctcgaactcctgacttcaggtgacccacctgccttggcctcccaaagtggtgggattacaggcatgagccaccgtgccccgcccagatatgcttttcctatcttttctttttttcttttttttttttttttgagacagggctttgtcatccaggctggagtgcagtggcacaatcactgctcgctgcagcctccatcacctgggctcaagggattctcctgtctcagcctcccaagtagctaggacgtatgccaccatgccaggctaatttttaaattttttagtagacacaggctacattaccaggctggtcttgaactcctggcctcaaatgagcctcccgcctcggcctcccaaagtgttgggattacaagggtgagccaccgtgcctggcagacatgtttttcataccagcacactgaattcctatccccaaatcccatggatttctgctggggttagaaatccgaccccctatcttgaattaaatctgtgttgtagtttcagttacttctaattgaagttgtgacatctagggtctgtctggatgtggtgtggcccgcctactcatagttacttctcatctttcctgaattgcagaattggggtttgtgcgtatcctggaggcttttggcctgtggctgccaaaatgcctacatttttgtgttcacagctggcctcatcagctgagtaaaaacatagggaagctagcattagttcctaaagacaggcatagtggaacagaggatgaggcagaaaaccaggaggaagaagcggaaactttacagaccccagaaccaggcgacctccatggaaatatctgctaggccactttctgtctggtgcgccttaggaaagtaatgacctctctgagccttggttccttagctacaagatgagaatcatggcatctacaccagtggttctcaaagtgtggtccctgggccagcagcattagcatcacctaagccaaatgcaaattctcagcccatcccaggcctacctcctaaccagaaactctggggggcggggcccagaaatttgttttaacaagtcctccaggtgattctgctgctcactcaagtttgagaatcccagctgtgcttcagagggttgtggtaaggatcaaataagataacacatggagagaggctcacacagggcctagcacatacaaagctaactgtagtttctttctctttgcctcgcagagctatggtgcagattaaatgaactaatatggagggaaaggccttgtaaactctacagcaccaaacgcatgagagctctatttttgttaggaagggttctgcttcttcacacttttctgaattgtgagtttttacagccaggaaatactccttttatattttcaataaacaaagggtatttcctttttgagtaagaaaggaatttaaaaaacacaaggactgcaagctctcgtcccaagggcctcacaggccagaatgtcctttctagcctggttcttcagaccaaggtgaagtcaggtctcatctccctggtgctttcctggcatccaggaaccagatatctggttccataaccatggcctcctcagccaagcccctgaagtctcccagagagcaggcaaataggcaaattctctggttccctgtctagcccatgggggctgagcctagtttggggttcaggagtggaggcctgagcctaggaagaaacttggggctgagctatttgggattgacaccagcctagcctcatgcagcgcccttttcccactggggcagcatcaagccttggaaccgcaggtgcagcgggctggcaggtgaggaggaaggacgagctgtggggctgtcctgccagggcctttcaggcctctggctgtgctccgacttgaccmttctgctacctgctggtcttgagccccgggcattcaggtgagggcagggcatggcttctgcaagagctggccagagcttttggcaacgcatccccttaagaagaggagccagtgtgctgccctgtgaacctgctcaaaataaatctttcaagcaaaaaggctgaattcaaagcatgagtgggaaggtggctgcgggcaggagggagaaagtcctggttctccttgaggaagagaataggtcagagaatgtttcctcgggatcctgcagtctcagaaggagcaggggcctccttcctggcctgttactctcttccttcgcaggggcaactgctgggcgaagggtgcaggcaccacggtggagcgcaggcaccatggccagtctcttccaggggccacaccaccaggccaagaaagagagatagcacctgctacagtcaaaggtcctattttattggtcctaagatgtccactttccccacattttagcatctctgaaattgggatatatcttgttatcagttgcattgagaagcaatgaaataggatagctattccacgaatacagagaagcaccatgttagatgctaagaacacacagaaaggggctgaaacgattaatttcaacaatactgaaaacagtggaggcaaaacggtataaaaataacggccattatgcacctggtctgacacagcacgtaagtatgatggggaatcatgtcagatcttgaactatagctttttccaacttgcagttaattcacagttcacgtatactttttggtgatgttgggtcgttctcacaagtatgtaaaaacaaagtaatttaggcactagtttttttagtttatgtaagtattcatttaaggagaaaactttccaattacctgacaagcgttcaatttatgccaaccaggaagaaacaaatactagctgccacctccttgagtctataaacattgactcagagctggtgtaactccaaatacgtagatcacttagctcattttaacttttaaacaattttgcaattattaactcgtgactaggtcagctatggtgtgaaatggatgcaacccatccagttctcagaaagatacctgcagattcagggcaagtggcacatgctgccccctccttctaggacacagggctctgcaaagtctcctaggtaatgatgacagtgagatttccttatgtaaggtcatgctggcattggcaagtggggcctggtgccttcccagggtggctcctcattggcacaccacttttctggaaactctatcagaaatggagaaaggagaaaagatggaactctcaatgtcgtggaagaaagttttgaagcaagtatgaggcagtgtttactgttgactcttttggctttggtcaccaggaagcccagaggaaaattgatgtctccaacttgagcaaatgtctattcttctatgacctgcaaatctaaagaagccatgctggctgggtgcggtggctcacagctgtaatcccagcaccttgggaggccgaggcgggtggatcacttgaggtcaggagtttgagaccagcctggccaacatggtgaaaccctatctctactaaaaatacaaaaattagccaggcattgtggcatgtgccggtagtctcagctacttgggaagctgaggcaggagaatcgctggaacctaggaggcagaggctgcagtgagccaagatcataccactgcactccagtctgggcgacaaagcaagagtccatctcaaaaaataaaataaaataaataaataagccaccttagtgttacccttctagcttggggatcttatttcctgatcctgagccaaaaccttgtaacagatttctggattttcatctagaaagagccttagtctagtggtaccctacattttcaccactgttttattctgccttcccccaccacatgggtaccatgatttaaacagtttttaaacatatttatatagtaatgaagtagtttaaaatttcccacttgttattaatcaaaggcagatgtaaaaaccaaccaaagttttcaacttgcctgagataaatggttcacattcattccacaaatattcactgagtgaagactaagtgccaaatattggactaaagaaacggataagtattggtactcaggaaatggttgacaaggcttggtccctaccattatgagactaagaatctggaggacagagcaattaagcggggccttacagtacagaggagagagacctcactcrgtattttggaggaaaggattaaagaaggcttcctgggggaggtgatgtccaagatgagacctgaaggacacataagagcaagccaggcaaagggcaggggatggagggcctctgggacaaagggacagcctgtgcaaagaaggaagctgctatgttctggagattcctgaggacctcagtgatgagggaaggggcttggggccagagtgtgaagagctgagccaggccaaagagccaggacctcgttctagacacagcagggaactgcaggacatgcttttttttttttttttttttttgagatagtctcgctctgtcacccaggctggagtgcaggggtgcaatctcagttcactgcaaccactgcctcccagtttccagcaattctcatgcctcagcctcccaagtagctgggactacaggcacacgccatcacgcccagctaattttttgtatttttagtagagatgggggtgtcaccatgttggccaggctggtctcaaactcctgacctcaagtgatctccccgccttgccctcccaaagtgctgagattatagtcatgagccactggacctggcccactgctggaccttctaagtagaacactgacaaactgggattagcattttaggagaatcatcccagctgcagggtggagaatggattgagtgtgaaaccccagaggaagggagaccagagggatgtaggggaaagggagaggatctggaccaagggaggagaaatgggggtcctgaccttttgatataattgggccagaaatgtagatacccaacattgcaattgcctggagcagcctgattgtggctgaaagcccgtctctgctgggcttcacaaagtattcaaataggtgcccagacagccgttattgcttaggtgggccccaggcaggggaggggaagctcatgtcaccaaaccctgcccctgtttacaactgaagccaggaaagctcaaaactgtcaggtggctccagcagcctgaggagcagagtcagaacttgggcctcttaactccctccyggtgctctttcccagtccattggtggatgctcgttttatgccaggcactgtgtgccctgcactacacctcatgccgttgaggaaatgcagggattttttttgaagagtaaatagtgtagatttgccaggaattatgccaagttcacttgcttttcttccccccatcaggatcaaaggcttagcagttaaagaaaacacaatagacttaatacctattgacataaataaatattttacactgttcgttgtgacatgctcatgggaaatgtggatcaaagaccagtgtgtccggatgaggtggcttatgcctgtaatcccagaactctgggaggctgaggtgggaggatcacttgagtctaggaggttgaggctgcagtgaactgtgattgtgccactgcactcagccccagcaacagagagagaccctgtcgcaacacaaacaaacaaacacacacacaccagtgcagttgctaggaagacaaaatagaatccagtcattgctgtcagcagcacagggctgaaagaggtgcaggagttcctccaggaacaatcttgaaacagtgccctcaggaacacatctttggaagaggttgggcagtggagggagtgcggtgattagcactggacaggaccacattggaagagggaacacagaggacaggccatgcacagtgaagaggcatatgccagaaatgtgcctggacgatgggccagggctgcagggcctgggcagcaagccgtgattcagtgagcagatatcatatgagaacggcacactgcgaggcaagagcccaggctgcaaagactgattgaagaggagcgcccacatcccccaatctgtgttcatctgcgtatttgtgttcttagatgtgtctgtactcacacatactcccagctgcatctcctgtacagtttaactgggacccagcctctcagctggtttctgagttactcacatgtgcatttatagctccctgcttggaaccgtgcttaggtgaaatcttaaagagactccttgtggcagtttcctaagagtcccactgtttttttttttttttttttttttttttctagkgacggggtttcactgtttcactgtgttgcccaggtgggtctcaaactcctgggctcaagtgatctacctgccttggcctcccaaagtgctctaagattgtgagccatcgcacctagccaagtctcctcaccgcccccccactttttttttgagacagagttttactcttgttgcccaggctggcacgatctctgctcactgcaacctccgcctccagggttcaagcgattctcctaccttagcctcctgagtacctgggattacaggcatgcgccaccacgcccggctaattttgtatttttagtagagatggggtttctccatgttggtcaggctggtctcgaactcccgacctcaggtgatccgccctcctcggcctcccaaagtgccaggattacaggcgtgagccaccgcatccggccaagtctcccactcttgataagccttttagtggaatgcttaacttgtacatcagcaaggatgaagcagggagcgacccatcccttggtcagactgcatctgcacagatgccctgtcagaaaacttgttatgccctggtaaaaagttaagaattataggcatcaactgtttcctgccacataactgtcccatgatggcatgggtacttcttgggttaataatcaggtgttggctttcctgcaaaggctgattatcacttgtcaaattatcactgctgaattgtttaatcaatggtggcttttgagcttgagcctgctgcatgcacagcagtgttctaggacttccaagaggaacagagggtgaccaaggagccatttttaccctcaagaagagttatctagaaggagggtgtgtctgcacagcttargggtcagcgtcyccacagcagctgcataggcagatagatgcacatagcctggcccaggggaggtgctcaggaaacacttgttgatgattgaggaaagaatgggttatttctctattaatttttggctctgggactcagggaaggcaccagagagaaggtgacattgatctgggatggtcggatttcagaggtgaaactggcctgaaaggaaatgccacatcaccatgtgcatctcattagaagtaaaaggagacatgtaggaaaccttagatttgtttttggtgaagtgaaagagagaagttgctctaaaaggttggaaaccagcccctaagaaaaaaagaaagaactgagasaaatcaactcaggagggcctgggrcccagcgtgcgtaagagtctaccttgtctagacatggctcttacgcagtgattcctcacagcacagcacccggtgagataggtactgccacttccattttgtaagtgaagcccagagaagcaaagaaatgtgccctaggtcacatagctagtcggtggcagagctgtgattggcaggttggtygaatgcctccaaagccctcgaccttcccactatacttcacgcatctctagagaagagacagaagtagccaggatgaaggtcttcaggtttaagaagaactatgaaaaagcaaaagatttttgttttcgtggtttttttactataaaggaaaactttaaataatagcaagagtgctataggtaagatatcagaaagaacatccttattgtgaaagctgttacgtgaaacattgagccagcatcaggtcaacgtccagcggccaatcttcactttagttcaggcttcatcctggggaacttcaggaagtttctgtcttttatcagatcccctctttgggtaatttccagactccccagggattgttcacaaagtcacaaatggctagttctccactccctccagctctggaccattgcccagggcttatctgctggtcacgtctcaccacctcatagccgttgctactgcctgggctctggtccctccaaagagcattgagaagctgctgtcgtggaagatgtgaactgtcatggttcagagctcaggcttgctactcactggcagtgtgactttggtcatattagtcaatccttctgtgcctgggttcctttgtctattaaaaggaacacagtgtctatatcatagcattgttattcagattgcagtaattaacacatgttaagcttacagaatggcagttgacaaactgtggcccatgggtcaagtccagcccaacacctgttttataaataaatttctttggaacacagctacattcatttgtttgcatattctctgtgactgcttttgggctacaatagcagagctggtagtgacagaaaccacagggcccgcaaagcttcaaaaacttactctctggccttttgcagaaaaagttagccaacccctgatatagaatgatgcctggcacatagaaagtgctcattaaatggtagcttaaacaaagaaaagggaaagaagcctcactagttcttgagtttaacaaaatttgaatgaggtcctatgatgaatgcttagacaatgacaacctaaaaggaacatctaacacagctgtttgtgtgatcagtgctccctgagggtggtgatctcttcctgcctcctcaatgccaggaggtgctgccatcatgctgtgtcccatggactggagtccctcctgactgtgttctcccaccactctttcctgccccagagaacgactgacagggagagcagccaactccatcaagatcaacctccgctgtggggcatgctctggttcctctttcctcacggccctgaggggacaattacaatagtccagtctcgaccttccagtctcttccctgtggatattttgggcaggataactctctgttgtgcaggactgtcstgcacattgcaggatccttagcagattccctggcctctgcccactagatgmtagtagcacccccccaagttgtgacagctgaaaatgtcttcagacattgccaatgtcccctgaagggcaaaatcgccccagttgaaaatcactggcttagtctaaaataacatcacaggtggggcaacagcaacccggtctaggatggcttaacttcatcctttgaaaaacagtgttctttgcaaaggcacaaactgctaaagatgcctccagtttgtattattgtatcattaaacagagcatctcacctcgaagcagcagcatctggactgctccgttgggggctacacttccactgggcagctccctgcctcacatctgtgtaggtaagagggtctatcaaagagctaccttccacagcccagagacggcctgccccagagtgtggaagatgcttatgaatccccccacccctggccccatgctagctttccagcttcactgtatttacatccgatgccacctcaagtgtcaggaagaaactgtkgacagctttaaaataatagtttattcaccgattcgcttattctcccctccagtctttaatgaatccctttgtgggctggkcacagggaaccagagacasagcccttaccttcaatgggctggtaggtgagggggaggtagacatataagcaggtaattacaatgaagcacactaagtgctatgatgacgtgtgctggtgttgtggaacacagaggggacaaataacctcaattcgggggcatgtgcgtctgtcagcaaaggcttgcctgaggagctaattctggaaacacacaggagttagcagggcaaggagaatatgtgagtatttawgtgcatgggtggtgagtgttttagggatgaggatggcatcccattgcaggcaacagaggccctaaaaagcaggcgagagcacgtggcacaattagagactcagtagcctaatgtttgaggggtagtgttgggagacagttctccatgggtctttcatgtttcagcatatctgtgaacagagacactagacaggttttgttccagacttgcttttaaaggacgtttatgtaacaaacagtcttagatgatagtgacaatatctccctgcagggcaaagagtgatttatttgctgtcagcataataaagatcacgtctcctttcagaggtaaatgttggacaggtttgctagccgccccctttaaaagaatgaggtttcccaagccttgagttcctcagccaatgatgctgagcagtttgcatatgccagtgtcacttggtccacatatcattctgtggaactggggctggggaaacaggtgcaaacgttactctggctactgctgtgagtattaaactgtcccttgtctctgacccaggcatctcatgtcttctgccgatatccatgaaactggcagactaacttgttaacttgcaagcaggataaaagctctgaccctccacacttttggacaggtgatgagtggggaaagcaaagcctggagaagtgagtgggattgtgaaggtcttgtgtgctacatgacagagcttgatatttatctcaaggagccactgaagaactttcagcagagaactgtctggatctggtgtgcactgttgtggagagtggagagctggagggtgagcctggagaaacacggccaatgaggggtacagctgtggggcaagtggtctgaacaagggctgtgccagttgggagagtggcggtcaagtttaaaacaaacttcatactatccttgatagcattttttttctgatccaggattcaatccagatagcatttatctgtggtatctctttagaccttttatgcccttgacatttctgaagcatgtagaacggaccttgtagcatatagcatatagatcttagagaatgtccctcgatttttatttgtctgagggtttctcatgacgggagtgaggttgcatgtgtatatatatttgtgtgtgtgtatgtgtgtgtgtgtgtacatatatatggttagggttaaggtacatatacacagtagagggtgtgagagaaagcaagtgtgcaaaatgttaacaactggtgattctaggtgatggctggaagtgagggttgaaggagaggagaggaacgagtcagttgtgatcgccaggcatttggtgtggtggctggtattaccagctgacatagagggttggggggagctttggagggaggaagggggaggaaaagatggtgagtttggttatttttaaaaatgatttgctagcctgagtccccttccagccacatctggttttaggatcccatggattatccaaagggggtagccagcaggcaggtggtctggagctcagaggaaaactgggcaggggcagagctggtgttgaagccatgggaggggacagcttcaccccaggggagtgtgtctgtaagaaggagaaggggccaacaacaaaaccaccgtgacagctgacattgaggggcaagtggccacagagatctgagaaagggcagggaaaygggaggacaattcaacaaagcagtgtccccagaaacagagggttcagaaatcaggagtggggggttagtgccaccagggtcaagggctgcatgaagtgcgagggccgaagagtctgtgtggactcagtgggacatgggcgtggaagagcagggaggtctgaatgggaagtaaagacacagatgcgggtatgcacacagttctttgaagatgctcggccgaggagacaagagtaatcaggtcaggggcaaaaaggggtactcgcctgaggaagtaaacattggatgtccacagctcagagttagttcaaggtcacattcaaattagataccccgatttcccccggcctgctgtctaaatgccaaatcaagtcatggcttctcacctaccgcttcacactcttcacaaagatgagtgctgggaaggcggatggggagagggagcatttttttgtcagccaggggagacagctgtaccagtgatgaaaagcacctgtgacattttcaagtctctctctgccaggaaaggagcctgtcacaaaagcagcctctgcccacagtattcgctctcccactggtttcccgtgagtgcyggggaacattgctacatcaccctgtgtggaatatggctttatgatcatgatcattygaagttttctcttttcactcaagagcttgtcacaaataatagccttgttgaccccaggccctcattttctggaaaccaggctgtattttctccatcttcctttccttccagctgccttgcagcactctgcacagcttattttctaaaactcaaacaggagaaacaccaacattttatttcggtcaataactattttacacaagagaatccatagcaatttaactagagtcaaatatttaaactacaataaaatgcagtcctatgaatgaataaccaaattgtgatatatccatagaatgggatattatgccatcataaaaaggcatgaaggccctttttattgcataggaaggaatgctacaacatggatgaaccttggaaacattatgccagatgaaagaagccacctgcaattgaccacatattgtatgattctgtttatatgaactatccggaagaggcaaatccatggaggcagagagcagattagtggttgcccggtgctgagagcagggagagtgggaggtgactgcttcacaggtatgaggtttcctttggaatattgaaatgttctggatctaagtaggggtaatggttgcacaacatcgtgaatatactaaattttactaatggtagttttatgctctatgtattttaccacaacaaaaaattaatttaaaaaaaaagaaagaaagaaagcaacttcaccctgagaccagagagaaaaaggccctgactctgctcacaagaaccacaaggccttcagtgtgatgagggtttcacagcagctcttccctactttggctgcccatgagaatcatgtgagcagttttttaaagcacctcccacctcaacaccaagaccaattaatcctgatctcagggactggggctgggagcaaaatcaggagctcttggagattccactatgtagccatggttgagaaatatggctctgggctggggattctccaaatgtggttcctggacccagcagcagcagcatcacctgggaatgtgttagaaatgcagatgctagggctccgtccgtgaagtactgaatcagaaactctgagggtgtggcccagcagtctgtgtgggaacaagccctctaggagattctgattgtgcactcaagttctggcaaccactattcaagtctaggccaagtaaactacagagtttttctcaaccagtgagtattcattgagcrtctgccatacgtttggttccataaagggtgccgtgaaaataaaaagacctatcccagctcctctcaagcatctggtgggttagattcttggaaaagaaatggtacattaaaatgagatcagcctttttacggctaaacaatattccattgtatgtctgtgccacattttgtttatccatgcatctgttgatggacaattgacttatttccaccttttgactaatataaataatgctgctatgaacacaggtgtacaggtatctctttgaatccctgcttttaatactttgggatctatatctaggattagaattactggatcaggccaggcgtgttggctcacacctgtaatcccagcactttgggaggccaaggtgggtggatcacttgaagtcaggagatcgagactggtgaaaccccatttctattaaaaatacaaaaattagctgggtgtggtgatgtgcatctgtaatcccagctacgtgagaggctgaggcacgagaatcgcttgaacccaggaggcagaggttgcagtgagctgagatcacgccactgcattccagcttgggcaacagagcgagagactctgtctcaaaaaaaaaaaagaattgctggattatatggtaattctatcttaacgttttaaggcaccgccaaactatttgatgttcccaccaacaataaatgtttgagataatgaaaaagctctgttatgtatattttactacaatttttaattttttatttgagatgctctgtcacccaggccggagtgcagtggcgcaatctcagcttacggcaacctccatctcctggatttaagcgattctcctgcctcagcctcccgagtagctgggactacaggcgtatgccaccatgcccagctattttttgtatttttagtacagacggggtttcaccatgttggccaggctggtctccaactcctggcctcaggtgatctgccctccttggcctcccaaagtgctgggattacaggcgtgagccaccgtgcccggccgacaatttttaaaaagagattaagccatgaaaacatggttagaaacatgaccatgtttctgatggtcaacactgaataaaaattacttcaaacaccatatttaatcatgtaaatgttatgcatataacagtgcatgaaaaagacggtatctgtagtcctttctgttcagagatggttaccagtcgttgcctgagcctggagccccctatttgaatattatgtttaagaaagacagagcaggatgtcttgcgagggcggtggctacagggctgtggacttaacactttcacatctagcacgattcctcacatgaatgggccaaggaagatgaaggaggataacatgtggtgagcactgatggggggctcaggcctggctagttttcatgataggggttaggttgttagcatgtcagcagtttgtttaacttagtggtttgctgttgtttgttgcttagttcgagagctgtttgttgaacacttcagtgtgccaggctctgcagcaggagccaggtgtacacgcatgcagaaagcgagctgacagtctagtgcagcgcttctyagcctcagcccgcagcagcatcgcctggcagccttgtccaayggcagatgctgggcgccacccccagagtgtccggttcggtaggcctggggtggggcccgagactctgcattttgaatgagttcctaggcggtgatgataatgcttgtctggagccacgctttgagaaccactggactactggggtggaaaggcagacaatattgctttgatcagtgtggctgctgcaaggaagagaaatgcaaaggctgtataggagcacagaagagggggaaaccctttgccctgccccagcgaggggagggtgtttcagggagatgtgaagcagcttggtgtgtctgcaggatgcaagcagctcagcgctgctggaacgaaaaggaggggtgggagcagacacagaaaagtccagagagaggtgggcagagcctctccacgatgaacatactctaaggtcacaggtcatgagaacctaagaggaggttagaaatggagaagcaaaagcaaacagatcgtcaccctttacctttggcagcctggaaaccccacccgcctccctgtaataaacctcatctccagaaggaacctgatgcaggccttgacaccagtgtgtaaatgactgcggagcctttttgtccccgcctcatcccccacccagcaatattagacggggattattggcggggtggaggagaaggacttcctgagggtgggtggagggctgagctggcagccccagccttatggttcacctcttctggcctccagcctgcactcctggcccccaccaccatggctggatgggaaatgattcccatctctctctgtgttaatacatccatcagtcctgcccctgtgactagagccacagagaacacagctaagccacaagactcagagggaacagcagccttcatgtcccctctaaatccatctggaaatcagacatcctcaggatggtgtctgcatgtagaagccactttttttgttgtttagagatggggtcttgctatgttgcccaggcttgtctcaaactcctgggctcaactgatcctcctgcctccccaagaggagatttggggggatttaccaagcccaagtctcaaccctccgtctccagctgacccaaacaaaaattagacaaaagtttgatgcaaagtatggattaaagcatctttagaaaatgtgtttatttttattgatctataatgtaaaatccaagaaaaagagttggcctgctatggcaagtccagctttgagctttattcataacaagtaaccctccccttctagccctccctcactgtcccgggaccacctctgattcagtggtgatactgacaaaggaaaactctaacgctagtttgattcctcgccctctgtttgtacataataacatcataagacctcatccatcaattattaacccatgtccttggtcacctcctttccttctgggcaggacattggggtttatgactgtgcctctccgcctacccagcaggaaaacaggtagaattcagcaggttgtggccttctgtgcggtgggtcaacctcttaccaaggtgatgctgtgggaaccacactactgactggctgaacccactgggtttttatgagaagacatagatattttaatcagcttcagaagtgaactgcaggacctataaatatattttaaacatgtttttaaaatgtagcttctaggctgggtgcagtggctcacatctataatcccagcactttgggaggctgaggcaggaggatcatttcagcccaggagtctgagaccagcctgggcaatatagcaagaccccatctctttaaaaaaatggcttttacatgcagacaccatcctgaggatgtctggtttccagatggatttagaggggacatgaagtctgcggtcccctctgagtcctgtggcttagctgtgttctctgtggctctagccacaagagcgggactgttggatgacccccagagagaggcaggtactagcctcccaacaggaagacctttctaacagatggaggaatgtacacaagcaggtgtcaaatgatcctagctcagccttggcacagggcaggacccagacctggcaaagggaggccggatggatcccagactctttctgagtcaatgcatcacacatccctagaatataccagcctctccactgcagcagggcctctgagcttgctgggccctctctagtgaacgccattcctcacgtttcactcatggttggttctacttgtcctttaaatctcagctttaacggcgcctcctctgggaagcctgcctgcatcatctgcttgacagggatccctccatttttctgttgcagccctcgtttaattcctttgcagcgctcattgcagattgcaattatttccttgtgcattggtttacttgttatttattatcagtctcttacactggtctgtgagtgccgcaaggtcagagactagagctgttttgttctccattgcatcttcagcacctagtacagtgcctgacacatactagacacatttgttgaagaaatgaatgcattaactccaaaattaaattgcactccaagaaggagagcatttagagatttttctccttcattcaacatttgagtactcgttttttattgcaaatacaatccatcttattaaatgtgtattcaaatttggtacataatttttgatcattttcatatagatacacatgcctttcattatggtcagacctccttacaaaacaaactttgagggactaaccaaaagctatcattgtcctgaaattgtgcctatttgttgaaaaagggcgtgtcatcatctagaatgtgtaaactttgccactacagtggtatcctttggggcaagttttgatctgactgcgtgttggtagccggcccaaagagatgtaccctggagcttgggcccaggcaggttctccaggaagctgcctgcagtgagcactgacacagacacaggggggtccacctcagagtatgacctccaagaagtgtcatggggcagaattaatgttgactctggtgcctggatccccccactgtcttctcatggctacctttcatcagtgagcccctctttcttctgtctccaaccttccttctctggtctcttttgccgtctgcatagcagtttgctcaagcctcttcataaaaaacaaaaacacaggctgggtgcggtggctcgcgcctgtattcccagcactttgggaggccaaggcaggtggatcgctttaggtcaggagtctgagaccagcctggccaacatggcgaaaccccatgtcgactaaaaatataaaaaattagctgggcgtggaggcacgcacctgtaatcccagctacttgggaggctgaggcagaagaattgcttgaacctgggaggcggaggttgcagtgagctgagattgcaccactgcactccagccttggtgacagagcaagactcagtctcaaaaacaaaaacagaaacaaaaaacaaaatctttcacattaccctcaccttaccataaccaccacgcatacacccttctctcatccctttatggctaaatttctgaaatgagcttaaaaaaaccctccacatccattcaaggatgtgttcagacataagtagggatatgacataaagttctggtcttccaaaggtctttgaaactcatattctgagctctagtctgtaataagtttctgtactagtctggctctaacagtcacaggtgaggcaggctaacaatcatcactgcttgctagtgtgcacaacccgagtaggctggccgagaagttcaagtcagggactagaaagcactggggtagctttggcaggacctgagctggactttgaagagtggacgaaatttggaaaggtgcagaggaaagaagagggcatttgagcagattttttcataacggcatttgtgaaggtgggttggcatagcctgttcttaggctcagggagctggctgaagcatggggcaggctggggcgggatgtgggggcctttgaagactttgacaggttggggcacttcaaggccatgaaaaacagctaggctgtgctttgtcttgttggggtggggcagggcatgctagggagaaagggagtgtacrgatgggtggtggggtggtgccacccaagccaggctatgacaagattgatctggttactgcaggagagccagcctggmagtgtaacaaggaaggytggggctggttgcctgtgggaagcctttgcagtgtgacatggcgagggcctaacccatggaagcatgggagtccatgacccactaagggcaaaggatagaccaagctggctctgagatgttgagccttggaggagcggggcccaggtgttctctgatgaggcattccaccatcaagctgtaatctaggccataacacatcctctaattgcaatattgcaaaaaatatatggactgtatgtgaaccctgaaatttacaaactgttaaaaatttatgacctatttggaaaaatttgaattctaattggattcggtaatcttaaggtattaattcttaactctctaggtgtggtcatggtactgtggttttaagagcccttatgttttagagaaacatatgaaatatatacagatgaaatatatctggatttgtttccagttatccaggtagataaggggagaatgggcttagcatagatgaggcaggactgtttctgaattgtaaactgtccaagctgggtgacatggggttcattccactcctctctctacattgtatacatttgaaattttctgtaaaaacattctggtccttggataatgcaggtcctacaccctgggcctcaaaattcccaatcagaaatcacgagaggcattttgagctgtgccatgttaatctcttgttacctttcgaaacaggaattctgaccacttctgttttgcctagagcaggaaaaacacatagacaggaaagaaataatgccttggctttatttagaaaaacaaactgtgaaagacacgtgatcctcctgtatcacgatcatgggaggagtccaaccaactggagaggcgaagtcaaaactcagaagagcaaaggcaaagttttagctggaaataaatgcttcttttaggagagtcactcccagtggaggatttctggcagtggagcacttggcatgagtgtgaaagctgacactgagttggaaaatggtagcccagggtgtagcggccagcataaggccagcactgtgcagtcacatgtcacagctcagggaacagaaaggcctgctgttgtcacctctgatattggttgtcccggtgcccaccctcatggcacctctatctctcacatgccacaaagacaggaggctgctctgacagtgtccccagctatgcaaggcggggacacccactagccattacatgctgggggagggccctatgaacttccttggcaggccatctcccaggctacagggcagaaatcagatttctttttcaattagtgcccccaaacagaaaccatttgcacacaggtaagctagaaagctaggagggtacattttgaacctgagcaagtgatctcatttttcctcctcttttttgaggagaagaaatacatgagggaattaaggtgggtgcacgttccctgggaaaggaacaagcatgaaacaggtgttgagagttcagcttagtaaacatgtgagggcccactctgtgccaggcactgtgggaagtgcagcgatggatgagccgtggtccttgtcttcaaggacagcgtggggaagccaggaaattccaggtgcacaaaatctcctggataaatactgaaggacacataagtcctgtgacccaagcaaagtaactgttacttagccaaagtcaaacttccggcaaatckcttaaatctctatttttcacccataaaatggtgcaattctgccttgcttaccccgtaaggttatagagttataaggatcaaagctactacaatataataacaatgaggaggaggaggaggaggcgaagacaaggctttcttgaccttgctgacctacagacctgtgactggtgcccaaggacgaactccgctgtggatggcagccaggaccagggcaggttcctgatgcagatggctgtctgatcccagccagtcctggagcaccggtgccctgtgccctcattcccgaagctggttcccctgggcaccttgtcacatgcccagtagctgccttgacatgagcaacctctctgactcattcaaatttgcctgacagatggagaaggtgcttagtcctagtattcttaataaatatcaragcttaagagccagaaggaaccttccagaacatagcttccacacacatcccatccccaccactacscccaccacccccaccatttgcacgaagggcaatggaggctccagcagggaacataacccactgaagtgttgggacagctgatgctggaatctcattctctggactcccctggtccaacatagctgcttctctttccaagacaggttttgccaacaccaactctactgcctttaatatccttagtctttcctgccccccaaataccttatttggtcctaacttccaataaagcgtatttagagcaagagaaaaaggaaacattccccaagtcacattttcccaagccctctgttctttttcactctttgggaaaatgtttcctaaatgcccatgggggcacgtgaccctacttataatatgggttcacagagacgaagatgaggggtccctatcttcacgaggctctcgtttagctatcagtaaaatgccctcttgatgaaacctttttgaacctccactgtgggaaaagaaaacccttctaatccagttccctttagtcatgtgtgcaaagagaaagcttctcaatgatgcatctctttacttcctgagttttttgcattcatgcctgsctggcagcttccgccctgctggctgtgggcccaggcagtattgtgagcacagaaaaggctggcagcctcacttagggagtcttaccctgtgctgtgtctcttcctgaccctggggttctacatgaggcctcacggttgcttcattctgctccccgctgcccctaaagcattcggtttggcccccagctgaataattgtcttactccagtttggccctggagtgcctgctttgatatcctccagcctccctcttccctagtcaccatcttggtgtagttgagttattttgaggcctygaaaataagaatagtagagctcagcggagactctgccatgcccaagtgagaagactggtgtccagtgaaaggttggactggagattctgcaattccgtcatgctgtaacatttctgaaaatgcatagcctaaggttgacagcctgaaaaatcagtagggttccgatgtgtgtgtccggacctagaagtaagaactaactaagcctgggaccaacgcctcatagcatttgaaatgaacctgggtaccaagtatcacttcggattcttcccactctcagatacggtcccctagttagagagcacgatgtagggggttgggattctgtggggccaatataacatttacacccttgtgaaacagtgcaggggtctacagaagaattcccagaagaggtggtgttcctttccccttttctctatttacccaccttccttgtgttgaaatactgatgaacggacccccagatggcaaagcttgatccccagctctgatagagcccacaggacaccctgggtctaccctaacgagccatgacatgccaattctttgcttttctggagaaaccttggcctgaaagtctgtttaattaccgtggagataatcttttaaacatagatttacattctttaaagactttttccctgtgggagtaggaaagttcatctgcacatagcatgtttattttcatttccaggggaggaactgctatctggtagttagcaagaagcttgagccctggaggaatttctttttttaaagtctgttcctcttcactgatagtgtgtcaattatattgtaataattagtttatagtgtggtcatatttttttccagcttaaactctgcacttcactctgtgattccaggcctataattatttaacatttgtcaatcatccctatcagattgggttctatagttactctaaatgtgggtatcaagagtcaatgtcctcagggktttctcttcaggaaggtcatacttgcaaagccagcagccacaaagacctatttaggttggtgcaaaagcagttgtggtttttgcctgaaaggaatggcaaaaaccgcaattatttttgcaccaagataatacttggcactgtggtcagtaagacactaatttttcccacctggggtggccccgcagatttgctaaattcttccccgctagawtgccagcttggatgagcaggggctctattgtattcaacctggcagccccaagacccagagtaattcctggctcataataggtactggctaagcagatgctgaattgctgaaagtcaacaggtcttgacgtgtgtgtcaaacaggaacaatgtacaaaataaagcagagttcggtggccttctggctctggcctgtgcagccctagtccttctttccccacatcacttaagagcaggtggtcctgagtggttgctggacctgattctggaggccaagactctgagccttgaagatttacctccrgggantcagaaaagaggagaaaaggagtaattgtattgaacagagaattagaagataaggaaaatccctttgtgagaaactctaaatcttgagcatggatctctgtgtccaggtcctgatggggagaatagctggtccaagaagtacccgtcgtgtgggggcctgctgcagtcccccatagacctgcacagtgacatcctccagtatgacgccagcctcacgcccctcgagttccaaggctacaatctgtctgccaacaagcagtttctcctgaccaacaatggccattcaggtgagggagaggccttggagacctgaggggtatgtctgagtctccctcagctgccaggcctgtccttttccatctggcagggaggtgttccrtggaagcatccaggaggaggggtggggcggggcgggggtgtctttgagagattccaggagcactctctccaggggatgctggaggctctgggctctgaggatcctgccagggccgcacttcccagaagaagcacatctctcaggatggggcaggagacyggcctgagcactgtagttcattggctgtgcagctggagtgaattctggaccataaacgattcaaggaaccacacagtttggcggggggtgcccaggctttggagtcagaccaacctggatttgaactctggcttgactgcttacgagccatgagaatctaggtgagaattttagtctccttgagcttccatctggaaatggacatattgatggataccgtgaagactggagattatgtacgttggggtctggcatacagagtgaagtaaatgcttcataaatagcagttatcgttgctgttgctatataattctaaagcttggaaggtacttcactaaaggtgtctgatccatcaatatgtaaataaacacccatccgttggtctagtgttagcgtttctggcatcactttccaaggtgaaccaagaaggtgctggtgccactggagttgctttggggaaaagggaacattctcagggaaagagcccaggtgtctgacctttaggctgcatctctgctccgcacctcactccatccacctgcctctctctgggctccagggggtggcagcaggggtggagggagcattgcctacctgactgctctctggcagtgcacagctggccggggctctgaaggctgctcctccactccccgcagtgaagctgaacctgccctcggacatgcacatccagggcctccagtctcgctacagtgccacgcagctgcacctgcactgggggaacccgaatgacccgcacggctctgagcacaccgtcagcggacagcacttcgccgccgaggtaagtagggctgccagtctggcagaggctgctctgcagtgggtggtgtggcaccttctcgacctggctgctgtgcagataacaccagagcatgggacaggctgccttcaggctctctgccccacctctggccctggcacaaggggcrcagccactccactagcctgtagctcatctgcactgtcctggtccctttcttctcctgaacatgctaagtttgtccctgtgtcttttactgagtgatgctgctggggaggcagtattcccagggtggcccagtgggacatacatgcccttcttttagacattgccttcctatctgtgcagataaaaatctcctgctgactcacactgggctcactgctcccccaaacttctcagcctttcttcatatgtcatgctgtttgcatcattttgatgctatctttccctctctgggcatgggttgtgtttagaacatggggacatgggtctagggccacccttctacctggccacaagtctaggggtacctggcagtctaatgtgcagggcatcacggcaagcagactcactagggacaagatgtcagccagcacagcatcgtgtcatgttgccttgagaagctactccgaaatgccaaaagaaaattagaagacgggcagagcatttgtcctatgcaattgcaggatggggtggggcaaggagggggttgagatgctccattttggcactccaatagccctgaactgggggtgtggctctgaatatttacagggaaatacaagcagataaatgctgctgactgatcagccaggrgagtccgtggtaaatagagaccattcccctccagtcataactgctgaactgcttaatgtttcagactaatcataggtctacttgcaagcatggaagggataggatctggttcaataggatggtaccactggaggttcacatatttcagagcggcccttccctgaagctcaagaactgaaatttcctccaggctaattgcagtgttgagacttctgcttcccccatggggaataaagaaggtgtaaaccaaaaagtgtctgagactcaatccatttagaagtttattttgccaaggttaaggacacatgcccgggagacagggagacaagtctgtgcctttctacaaagatgattttgagggcttcaatatttaaaggggaaagggcagacactggggaaagagggagaaatgtttaaaaggtgtggggaggtaagaggcaagaggtcgcattcttctgagtttttgatcagccgttcacatgtgagagaggggtagaggaatagtcacttgtgcattcatctagctcagcgaatctgcattcttacaaaataaaacagacatgggcagaggaagcaattagaaatgcatttgtctcaggtgagcagagggatgactttgagttctatcctttgtcctgaacccatgaagataagttatccatttacattgtcacggtgaaattcaacagaactgttttagggtaaagaccttgcggcccacagtgaatttcctagtgggcaaaatgtgaggtgtgtwgcttttttatctttgtagccgtcttatttaggaatagaatgggaggcagctcccagcttgacttttctctttggcttagtgatttgggggtctcgagatttattttcctttcacaaaggaggttagggtgtagattggcagggtttatgtgttttaaaatatttctacttcttgtattttctgctattaagtcacagcatcagaccaagagtctggttaagatggaccataaatgccaatactagagaaaaggcatcagggtgtccctaaagtgggtcctctaaggaaggaccttggaagtgtagtggttctttgggatggagttcatataagaagattctggtggggcatgttggctcacacctataatcccagcactttgggaggctgagacgggtggatcaccggaggtcaggagttcgagaccagcctgaccaacatggtgaaaccccatctctactaaaaatgcaaaattagccgggcttggtggcacatgcctgtaatcctagctactcgggaggctgaggcaggggaatcgcttgaacctgggaggcggaggttgcggtgagccaagatcacgccattgcactccagcctgggcaacaagagcgaaactccattaaaaaaaaaaaaaaaaaaaaagattctttctatcttaatctcctcaacagggagctcctttatgcttggattagtcttcacttcctctgagcacaataagaaaagtacagacaaaccacaagctcaaaggtcagctgtaaaaggaaataggggcttaggacctcaggggttttaatcatatagaattcagctctgtttctcaaagtgatgccaggccgagatggtgtgggcagtgtggcagactaagtcctttgaggggaagatggtgaagtaggagctctgaagaaatccttaatagaggaccacttaaaagaagaaataatttgatatataattttttttaagttagaaggagccacttaaagttcgaaatgggaaaattaagctgtattcaataacatatgttgaactgtatttataaacacatgagatggaaaaggatgaatgaaaagagaaaagaaatagagttaaaatctcaatatgtcatagtctcaaggacaaagaaccagcaaaaatgcatgggttgtgtaaaccaaaaataaattmtaagccccccaccccacccacctgccatctgaatggacctctcctcttgaccaagggcattccaaagttaacatgaaaactagttcaggccatgatgggaagagggagttggacatgacccattataccctcctcccttttggaatttaggaaaagcccacattcattaacatcaacacagaccttaggtctgatcagaaatatttacagtctattctctctgaagcctgctacttgtattcttcctctgcatgataaaatcttggtctctacaaccccttattggaacccagacattcctttctattgatgataactctcaaccgattgccagtcagaaaaaagttaaatctacctatgtcctggaagcctccaatttgagttttcctgcccttccagatcaaaccagtgtatcttgtacgtattgattgatgtattatgtctctaaaatgtatcaaaacaagccrtgccctgaccaccttgggcacatgtccttatccttggcaaaataaggggagggtctgaragacctaacctagtctggggggmtgagggggctggggttctgtcctcacagttggagtcaagtcttctgcagaagcgacaggctcccatgagtcgcttatctcctaatgggtggcttctcccccactgcagctgcacattgtccattataactcagacctttatcctgacgccagcactgccagcaacaagtcagaaggcctcgctgtcctggctgttctcattgaggtaagagatatttaaaaggttcttaggtgaaatttgaagcagggatgagattgggattccaccttttgttccatgcatacctgttgataatcagctgttcctgtatcgactccgtgtcaactccagagcagggggtatcctcctgtagtgcaccttctctcttggcctggaggcagcactttctgtgcctgggcagcagaaatggggaatgttctttggtccgttggaaaaacgggccccaacatctagccctgttgcataaggcatggaattgcccagttggggaggacctgtgctggaaagggatcatcaaactccatctgccccatcagatgcctgaactcttgatacaactcctgccatccaagctcctctagatccaagggacctctagatcagtggtccccaacctttttggcaccagggaccagtttcatagaagacaatttttccacggaccatggaccagggagggagatggttttgggatgaaactgttccacctcagatcatcaagcattagttagattccgtaaggaatacacagcctagatcccttgcatgcgcagttcacaawagggcttgtgctcctatgagaatgggaggcctctgctgatttgacagggggcggagctcaggctgtaatgcttgcttgcccgctgctcacctcctgctgtgcggcccagttcctaacaggccacagaccggtactsgtccacagcctgggggctgggcacccctgctctatatgtaccctggaatgaattctttttttatcccaagatagaggaatgtcttctgattggcttgcatgtttttttttcctaatgaggctgtatgtacctcatttcccaacatgctcatttgtctgacgtggcttttgtgaactcagagctccttaagttctgtgtgacatggatgttagtcaaagccttcaggctcatatctggatcatcaagagcrcacacggtaccctatgccccaggacattcaagcccaactccttaagctgaaaacaggacgtcctgagatgcaagaggcaggaccattacactaactcccaagagcctagtgatccatcataattgtccagtaaagtggatccttcaggcagtggtggcaacatacccacagctttgcccttctgatagcaatcgtcaatcctgrctcagcctatcctgttctgtcccagtttaacctgccctgtctctgttgcagatgggctccttcaatccgtcctatgacaagatcttcagtcaccttcaacatgtaaagtacaaaggtgaggggtccttgcatgcatattcactctctgctggagaaggaggtagtcagccctgtgtgactttaagaaaagcaaacacaaggggcaggtgctgtctgtgttcaccaggttaagagcagcaggttgttgaacaatgttgcaaccaggtcctggggttagatgaccctgaaaggggctagttcatgtttctaggctcagtcgctctgttcagctgcacttatgccctacggagggaggctgacactatcacctctgcaacatgtctctmtaggccaggaagcattcgtcccgggattcaacattgaagagctgcttcyggagaggaccgctgaatattaccgctaccgggggtccctgaccacacccccttgcaaccccactgtgctctggacagttttccgaaaccccgtgcaaatttcccaggagcaggwaactgtcgtgccagactcagccagagtccacgcggcacctcagtccccatcatcctccatatcacaatcaatgacttgatttcctcatttagtttcattggcagctcttcaaaacctctccaaatatcacaggtgtctgaaagcaccgcagaaattccaggctgagcttcaaaagaagtcaagctaggcaaatgaatagatgtctcctagttcttttttaaaaaaaagagctctaaatctgcatttgctaatatatcctcagtggctgggtggtattcacttcccaggcaggagagagcctggttcctttacagggcagaataaagacaggatcagatgaaatcatttaagagatgggattgcagcaatgactaagtgagggtccctgcccccaagaagctcaaggtctagtgcaaactggggaacaaaatccttagccatcacctctaaagcttcttatttgataggagatgagagagaagagtagaagtctgtgggatcacccgcgggttagtgacaaagctgagacccaaagttaggtcatctgagttccatgtcactgctcatacctgtcctccacagcytaaattcatgagaagaaaaatggctccccaggagacggggctggggccagcactacaccctggctcacagccccacgccagcttcatgcgtccagggcagcctcacagctgctcctctttacagtaagcttctgctctgagtcacctggtaaatggcagcaggtgggtggacaggaatgaggacatgatgaaccaagagatggatgaaacatgtggggaagcagcaacatcctacctcagaaactgccttgggaaagggttatataatctatgcaggtgcatgaaaatgccatggaacccgcaatcagatggcctgtgaaactcttaactccctcctttattccttctgatatgaccatcagaacaagccctgcgaccctctggttgagagctggsctctaatttaagttcatgagaggaactcagtctctgtggaggttaaggagcactccatcaccccaggtttccctccacgcagggcagattccaggtataattggaaactaacagcactgcctttccctgaagtctcgggtgctgggaagataaacccagcgctgcccagctcccactcacccactgtggagggaagcagttctgtggctttccctctgctttctaatatctcccacccggccccacagaagctggttccagaggcttctcccaggtgcaagagcggagagctagcctcttcccaggggatcaggtgaggaggtcattctgcctgcrggctatttctgctcttgccctcagctgctggctttggagacagccctgtactgcacacacatggacgacccttcccccagagaaatgatcaacaacttccggcaggtccagaagttcgatgagaggctggtatacacctccttctcccaaggtgaggagaggcagtgctggggggagggggtgcgggagtgtggtgccaagacattgggatcttctgtgaatgcagctctggcactgatgccctcaagaagttggctgagagctccctggctgccacrggaaccaggcgccttgtgagactaggtgtggggctcactggggtccccccttcagtgagtctttgcagagaagcaaaaagccgaggcccccaggcacatggaccagagcactctttaagcctgggagtcttgcacagatgggtaagagagaattccctggggacttctctgttccagacaatgatcccttctctaagacacaggataggaccctttccatgagatcagacttctaacttccctccctaggctttcttggcatcaaaggctgcagccagcctatcttaggcctggccaggtgattcatgcaccaccaccaaatgagcaagaatgttcctatgttagatgtaaaacagtgagtgtaacccacaaccatgtctaatgtagcagggcctgttaggcaaggaagcacccttgtgcactgcatttttgtctaacctccttggagcttgcataagcacaagcacataagttcccaattgaacaaaacttaatagcttggtttcttcctaatgctacaagggctcgggtctccctttcacagctgtaaccaataactccccagtagaacattaaccgttttccttgctcagtgcctacatcaacactgctggaaactgggcatcaggggaaaggggtgagggagcacttttggggcccacacccctcttcagacctctgagttcactttcaagctcactttcttactgtagattctcgactgcttcccagcttgggaatcttcatggctggtctgtgcagttccatttcatccccagcatcacgtgtggaccaaaccgggcctggcgttcatatttaaagataacccgttctcacctgcaatcccagcactttgggaggccaaggcaagcggatcacctgaggtcaggagttcaagtccagcctgaccaacatggtgaaaccccatctctactaaaaatacaaaaattagccgggcacggtgtcttgcctcctttgggaggccgaggtgggtggatcatgaggtcaggatttcgagaccagccggaccaacatggtgaaaccacgtctctactaaaaatacaaaaattagccgggcgtggtggcacatgcctgtaatcccagctactcaagaggctgaggcaggagaatcgcttgaacccaggaggcagaggttgcaatgagccgagatcacaccactgcactctagcctgggtgacagggcgagactccgtctcaaaaaaaaaccaaaaaacaaaaacaaaagaaacccgttaacccacttgtcagaatctgctctcctcgtctcacctggtgcacttttttgggttcctttcttattatatgaggttataacgatcacctcctaaacttagttgaacatatggagactgtatttgaaggccctttccaggaagctttagaaactgacccatccttacggtcaggattacatcattctctgtcttttcatgaagaactgcccaagaatttgtcttttgtgttttctcctctccaggtacaactaattaagatcatttccctctttcctcagtttctcagttggaaaacagaatctgtgaacagtagccttcctgaaaattcaaaatccatgtgatgataactaacagtttcttttctaggaaatgaactgagtgcatggaatgtatctgttatggatacaacgctgtcttttctcattcttctaagtggagaatgtagtatccaagggttaaatggaactacttcaactcttaaaaccaaaaacataaaaactctgccaggagattaggaactttgcccacatagatcagatagaattttgctcgcgatcccaggaccccattgccggctctgttctctgagctcacctatgcacacccagggaaggggtggcacatattctccttacagtcaggaggcctaggttcaaggcctggctttgcttcctcctggctgcaggctgtggacaaatcgtgtcccttctttggccttggtttcctcagccacaaaatgccaggtaatcccagctactcaggaagctgaggcaggagaatcgcttgaacccgggaggtggaggttgcagtgagccaagatcatgccactgcactccagcctgggtgacagagtgagactctgtctcaaaaaaaaaaaaaaaaaaaaaaaagccaggttggattaggtgatctcatgtcctttcggtgctaatatgttgtgatggttaagtggacactaacaactgccaatcctgactttacattgcagggacagtgtttgagggcagttacagaggatcagaagaaaccgggcaggagcttgactctgacatccaaaagtaacccccgcttgtaacgatggactatggcattggggataattagccatcttcttagaccggcttgtgtctaagcagctgcttgtagtggggcagcgtaggcaggtttttagccaagcgcttcagtagattctcccagtctggataggggagcttgaggggcctctaagcagaagtctggagaccatctcccagcttaggacgtcaagatcaaagcccaaatgcagcgttgccactgctcttcctccacggtttgcccagagctggtgcttccacaagcccaggytgggaccagctttctcctctgagtgagactctgtggcagtccaaggaaaacctgtccatctggaggctgattatagaagcttggccagaattctcctcccctccctttcacttcccaaagacacaggcagcaagtgsggctgcttcccaaggagcaatgaggaggcagycccaaaggggtgaaggcccaaacctcatctgcccagggggctgcattcacgaggcctttcttacccagctcggagcaggcctcagactgtaacatgatgtttcaggtttacggtgtgagactttgtcagtgtgaaccttgagcagtttggactcaaattgtagcctcatccactgaggcatgtttgtaattagggtctggcttactcagggctttctctggaagttaacaagaactacagagtcagaaaattctgccaggagaaaagtgatgtttaaaaaatcatctaggatggccgggtgtggtggctcatgcttgtaatcccagcactttgggaggctgaggtgggaggatcacattagcccaagagtttgaggctgcagtgagccatgatcacaccactgcactccagcttgggtgacagagtgagaccctgtctcttaaataattaaaatttaaaaattaaaaaaaaattccctatgagagaaagtacatggactttggggaaggatctgaagtttagccaggttgggacaatttggacygaatcatttaacttaaccctgctattttcctcaactgtgcttagaaaaggggtacaggacctgatttctgtccttaagaggtttatagtccagctacaccttagcctgggggcagagtttctcaaccttagcactaytgacaacttaggcaggataattcttacagtggggggtgtcctgtgtgttgtagcattggcagcaccgttggtctctacccagtagatgccagttgcccctccccagttttaacaggcaaaactgtttccagacaytgccaactctgtgcaggcaggaggggcaagttttcccctgatggaaaaccactgccccagggtttctgcggcccagaactcattgttttcactgatgtcataggagtctggagttttatatcacatgccctggtcttcattgttttatggcatgaacatttcagtgtgatgatggttatccctgaaacagtaaggctgaagttactgaggcagaacaaaccaacccaagagagaccttgttccccatcttcctttagaattcaagtatagattcttttttatatgattgggtaagaccaagagacgtagcgtgagagagaactgtgcacccttaggagtgtacaaatcctttatcaggggtgcagatgcctctgaagtagcaacttcttcaggatcccccctttattctttttctctctcccttttgtatgagtttttctctcttgtatgttatgtttcttgttgcctttagttaaaacgtccactctttatggaaaagtgaaagtcatgtcaggcacttttttccattcttaaaaagtgcctcttccattggctgggtgtggctcatgcctgtaatcccagcattttgggaggccaaggcaggtggatcacctgaggttgggagttcgagaccagcctggccaacatggtgaaaccccctctctacttaaaaaaaaaaaaatcagccaggcatggtggtgcatgccagtagtcccatctactgtggaggctgaggcaggagaatcacttgaacccagaaggcrgaggttgcagtgagccaagattgcaccagtgcactccagcctgggcgacagagtgatactccatctgaaaaaaaaaaaaaaaaaaaaaaaaaaaaaaagtgcctcttccaagtggcagttggaagatttgagctgaaggagaaagcaagactcgtcctcaaggtgggcccctgggaggggacacgtcctcaggccagttcgggtttcaagtcaggtgctcttagtgggaaaggggaaagacggcagaggcagggggacatcacaggggctcaggcttagggctttggcctggttcttggttcctttgagttcacctcctcctagccagtggcaccaacactgggcccagatgctgggtaatgaagcaagagcccatcagacaaaaatgctaacaccatctagccctgtgctcaacatgtcagggccatggaaacttgagggacaaaaggaagccaagaagtttctataatcacatcattagtgggcttgctctaagcaactgcatgtcacccaccagagcagctatggcacactcagacaagsgtgccaggcagcaaaccgcaagggcaaatctatagtcctgcaattaggatctgcttaagcctagacctgggcaattttatgaaaccttaaaaggagggagaaggaaatcagacatggctaagatggctaattatctaattttttgaggctagaatgcatgtgttatcattattgaccttgtatttcttaaagtttccattwataagwaaaagctattagctgaaagaatatcatcgattctcccaaaggatccaaatgattagccagcatcatttccaccttcagtcgctggtctgggtcagaggccgaacagtcaggagcattggtccaaggtgctaagaagtgaggtcctagtgcctttcacacaccacatgtttcccgagcacagtccgagttatgcgctatgggggacagaaaaccccatggtgggtgtcatcttgctcttaaacacagcccgtggcacagggcagactatgttcaggaaagacaatgggaaaaggggctgggcagacggctggacccacccttggtgatggggccctagccgatccttccacatcatctccccacagccccatccctgccctcttagcctcagcccccaaaactgtagggcagatgctttcaagtacacacacttgatgtctgggatgccccctccctcctccatctggaaaattctttcaagacccaactctaatcacgtcctcctggaagtcctccccatccctctaaaggtgacttaatctccctcagtgcagccagaaccacgtctccatctctgttatgttacttgacacaccatagagtaattattaccmcacagcaaagacgaatagaaaaagaacaatacgtacatattatacacatactacaagctccttaaggccagggatgactgacgtrttactcatttttatgcctggcatggtgcctggtgctcaatataagcttgttgaaagaatgtccctgacccatctccagttccctcccctcctcagtgtcttctctgcagaatgatttacacataagcctggccagttgtcaccttttcgttttattgtcttgtttttctgtggtctccatttgctaacaatgttaaaaatcaaccatttgtttaagagagattaacgatcagaacttagctgtcagttttgaaggtctgggaggaagttgcctagagatgctgttgtgccttctgtagctctggcttgatagggatcaaaggcccccgtcccaccacccattctttccccagggacagtgaagacagcttagagtgccaagcaccaagtgccagcattgtaacctgcccctgaggctctgggatttaggcccttcagagcaacgtgctgtctgcaggggctgcattcctgtaatctacaggcaaagccctcagtcccatcatagctgtataaaaccagttcccccatgtaatctggtactatcttgttggcagatttctttgtagcaattcttgttttgggttgcatagcgttcataaggaaaactccgcagttaaatatgtcctctgaagatggctccactctgtggtgagggcatcttccttgtcttggcaaagcatcatctgaagatagcactggatttgcagtttcttgactctctgattttttattaggtgtaataataaggggctttttaccttcctaacagattttgtgtatttaaactatcaaacccctgataaatctaaactctctgacctcttttacaaggctggagacggctaaggatatcgctacgtaacatgccatctatgtaaacagtgtgtactttaaaataatacttgaaaaggattatagtccacagtcaaacagaatcgtaaatagagctagaaaatactagactgttgttccaggaacctccagatgtgaaagtgaggtgcttgttcctcgtgctggactcttctgtgtttatgcttgaggcttcagaagacctcaaaagcccttaaccagcatccctcagtccagcaagatgccggtggaagacgcagctcctgggcctgccagaacaggtagcaaggcccttgtggcaagcagctcaccgaccttctccgggtgtctgtaccttcctgggcaaggtgtgtgaccatcgagttcttctatatctgtgtggtttccttgtgtgtgtcacactgccgtctctctgctcgccctgagtcatacccgagcactttgtgaacaggcggctctcccacgtcctcatggtgtgcaccctcttaccagccagccccagagctccttctgttgggctgccactcgatgcctctcgtgggccacctctgtgacctagcctgtctccatttctactgtctgtcccattgttcttccgtgggaatcgcctcccttctttcctattcagaaacaaaccatttctttaacctgaaagtgaatttctctagttctgcccctccctgtaccatctttgatgcctgttctctacagtgcctagaggcttcgctctcacccagccgaggctctgctgggaaacaggctttggcttcgcactcaggytctagttctctggttgccctgacagttctccctgtgtcccgaaagtctcgctgactttctctctcccatcagataacagatgttttggcatctgcctccaatgggactcaagcccatttctgcaaagaagctgagcctccatgatggttggtgctgtctcgattggcagggacagcattccaacaacaccttcctgccctgggcttcctgaggtggtggaactatcgggtgacaccctcgccggcattcctcttccttaacagcttatgatgttggctcagtcaagctgcttcgtttttgctgtatcaaagtcttggctgaaaagtatctgtcccagtctctgggcctttctttgtcttcatgcctgtttggtctcatttcgttgtttccaaggagagtccatttaggccttgacaagtggtcctcaagkagcaaagatcccaggtcacagcactgggttcaactatgctgttgcttacaggacctccaacaggaaccccgcgtaataaccgggggaagccagactctccctccagagaagccaccacgcagggcatgtgccctgagaaaagccccacccttgctggggccttgctctccatagactttgctcagctccccaagaccaggcatgaagggtacccccaccagccacagactgggctgctcagtggtctggggcctgtgtgactctcagaatgtttgaggtgactgtgaaagagatgactttagaaaccatccagcctggatggcttagccaggtggtaaggcttcctagtaatagtcttcaggtggcgagaactggtttggcaccacaagcatctggagcttcaggaacaaagaacgagagtgtatttcatcaaagggttgggaagaaaaaccatggctaggtttattatgtttgtttttttaagattccagggaccatggtctctggttacatttaaaaaagaaacaaccaaccctaataccaagttccactgtgcagaggccacaggccctgcaggaaacagagcttgtgctgtacaaacactggaagctccctccaggtggagactcatgtcctcagtacctccccaagccacaggctggtccttgtgttcaggttacacgaagaggcctggggcagggagtctggccagtggagccactctgccacttgggaggtcatgagcagctggtggtggtgagcagagtagggagaataggcttccctgtccttggggacagctcttctccctgcctgctctgctaaccctcacagcagcccggtgccacctggggaagccagaccaggaacccccagggcccagccttggaccagggaggctctgcaggttcaatgtgagattgcagaaaaagacaatcggaaaagcacacggctgatggctcctggggaatcagctagacttgggccatacgacaggagaaggggcagtgagcaaaacctcaccctgcagcctcagatctggttccccaggctgttaagggccccaagggagagtccttggccccctgctggcatcttacacttgaccagggctctcccagggcctcagccaccactgtgggttctatgggcacaggatcttctgtgtcaggctgggtggccaccatctgtacaactgtggctcccagtgtgagttagaacaaataccccttcttcctccaagacacacacacatgctagaagtttccattgagatgagaaaaccaccagacagaagggtacctgtaaatctacactttctttagacaaaggacctgattaggagaatggggaatggctgtgggaaccttggaaaaaacaggctgagggttttcaggggagacttcatgactgggatcctctgctcactcaagacaatggattctcatgtgattttccccccaggaggtggctagtaggctgactgtgagacttaggtagctgggcacgggttcagccacactgaggacttctctctcaccttatttatcctcaacagtaacttgctggttgaagccgtaataccctggttccatggagcagagaagtggggctgatgtggtgaaggcgtttgtccaggagggacaaagcaaaaatagaaccaaaccatgatgacaagctgatgggctgggggagaagtctggtgatggattccttgcttaggaagtgaggcaggtaccagggacatggacaggagcctgcccaagcaggctttgatccctacctttcttcatctttcctctttggccatgttgtattaaaaactgaaatcttggctgggcgccgtggctcacacctgtaatccccatagtttgggaggccgaggcaggtggatcacttgagatcaggagttcgagaccagcctggtcaacatggcaaaaccccatctctactaaaaatacaaaaattagccaagcgttgtggtgcacgcctgcagtcccagctgctcgggaggctgaggcatgagaattgcttgaacccaggaggtggaggttgcagtgagccaagattgtgccactgcactccagcatgtgtgacagagcgagactctgtctcaaaaaaaacacaaacaaacaaacaaacaaaaactcaagtgaagtcttgccctagccaggaaactgttgtgataaaggagcatcggggccgggcgcaggggctcacgcctataatcccaacactttggaaggccaaggcaggtggataatgaggtcaggagttcaagaccagcctggccaagatggtgaaaccctgtctctactaaaaatccaraaattagctgggtgtggtggcaggtgcttgtaatcccagctacttgggagactgaggcagagaattgcttgaacccaggaggcggaggttgaagtgagccaagatcgcaccactgcattccagcctgggcggcagagcgagattccatctcaaaaaaaaaaaaaaaaaggagcatcggaaggagggattgcagtatgaattccctagatgggcaatttcctgtacttcatcaggcaatccctgagccaagggtggacatccctagaggtctgtcagcctaagaccaaacaaatggtagagcgtctctcaacacgctgctcaaatccagtgtggtttgactctagagtaacctcgtcttttcctctccccttttaagtgcaagtctgtactgcggcaggactgagtctgggtatgtggctgggcagccagccgtgcatgctgcagctgggtgatcactgtgattcttggtgtgatccaagcccgtcctctctgcttctctgtactattgctctggctcctggccctctccttgctatgggtcttaccctcaagtcgctctgtgattcaaagatgaactgccaatcaaatgttcctctaatgaaagatccaatcactctacagcatgtgtgtattcaaagaacctatctaagactttcttttggtcatggtgggaggctgttgctgaaaacataccagagcccattgtggaggtcagctgacaggccgcatgaccttggcaatggactactggtcatctgggactgcttaggactgtgcaatggaacttgggggcaaaactgatggagacagccaatgggccttaaatccagcaggcaaagacagagtaagttcttatttgtgtagcccagggcttatcaaagtgtggttcttggaccacgtgcatcagtatcagctgtaagtatttggcaaaatgcagattcccgggccctgcaccaaacagattgactttgaatctctgggggttgggctaaaaaaaaaaaaaaaaccctacattttaaacaagctcttcagatgacccttgtgtaagtttgagagcatctgctggaaaaccactagaatttgcaaacggccacctcaaaatactccagccagtcccactaagccaaagaccagaatctgagaacagggatggggaaattattcctttctgtggatgattatgcagctgggccatgatttcacacccgggggccatgggctaagatggaggggaaggaaggaatgtaatgtgtgccctctacctcttcaccaggcatcatcctctcactggccctggctggcattcttggcatctgtattgtggtggtggtgtccatttggcttttcagaaggaagaggtgagctggtttgggtccaaaatgggaatggacagctatgtgtccatgatgattagtctgcctgggaaggcagctttgtggcatgaagagccgcagtcacctggaccaccacttaccctaggagggccgtccccaaagcacccgtgccctggcctcctttgcatgagacgcacatgtgaccctggtcgttcaaagggttcaggggtcactgtgctcagatttggaagcgtgtgtgccttgcttgctgctattgcatggccttggacgagtctcttgacttggggcttgtgcctgaagttaagcagccaggctgtcttcttatcaagatctttacatatgctttttggtctatgaattcaaaaagaaagatgaaggaaaacctgatctctcactcacattaactcttcatgccctttgtccatgtttttattgtgacatttggcttttcctaaaacctaatttatttggggggggtatgaaaaataaaaaggtttctgggaaccctgttatggaatcagaggtttgaagaggggggtgacaacgagacctctttcaaaatataggtctactactgttaggtgtgaaagagaacagttggaaaacgaacaagttctgtttttgttaaagctttatttggtgacactccctcccaagaccaacagaattggggaaaggtcccaaagagaggaatccaacttttaaaaacggcctcattccatacctgagtcaggctgctctctggctcgctcgctctcctctctaacaagagttatgtgttctttctgttctagtatcaaaaaaggtgataacaagggagtcatttacaagccagccaccaagatggagactgaggcccacgcttgaggtccccggagctcccgggcacatccaggaaggaccttgctttggaccctacacacttcggctctctggacacttgcgacacctcaaggtgttctctgtagctcaatctgcaaacatgccaggcctcagggatcctctgctgggtgcctccttgccttgggaccatggccaccccagagccatccgatcgatggatgggatgcactctcagaccaagcagcaggaattcaaagytgcttgctgtaactgtgtgagattgtgaagtggtctgaattctggaatcacaaaccaagccatgctggtgggccattaatggttggaaaacactttcatccggggctttgccagagcgtgctttcaagtgtcctggaaaktctgctgcttctccaagctttcagacaagaatgtgcactctctgcttaggttttgcttgggaaactcaacttctttcytctggagacggggcatctccctctgatttccttctgctatgacaaaacctttaatctgcaccttacaactcggggacaaatggggacaggaaggatcaagttgtagagagaaaaagaaaacaagagatatacattgtgatatattagggacactttcacagtcctgtcctctggatcacagacactgcacagaccttagggaatggcaggttcaagttccacttcttggtggggatgagaagggagagagagctagagggacaaagagaatgagaagacatggatgatctgggagagtctcastttggaatcagaattggaatcacattctgtttatcaagccataatgtaaggacagaataatacaatattaagtccaaatccaacctcctgtcagtggagcagttatgttttatactctacagattttacaaataatgaggctgttccttgaaaatgtgttgttgctgtgtcctggaggagacatgagttccgagatgacccaatctgcctttgaatctggaggaaataggcagaaacaaaatgactgtagaacttattctctgtaggccaaatttcatttcagccacttctgcaggatccctactgccaacctggaatggagacttttatctacttctctctctctgaagatgtcaaatcgtggtttagatcaaatatatttcaagctataaaagcaggaggttatctgtgcagggggctggcatcatgtatttaggggcaagtaataatggaatgctactaagatactccatattcttccccgaatcacacagacagtttctgacaggcgcaactcctccattttcctcccgcaggygagaaccctgtggagatgagtcagtgccatgactgagaaggaaccgacccctagttgagagcaccttgcagttccccgagaactttctgattcacagtctcattttgacagcatgaaatgtcctcttgaagcatagctttttaaatatctttttccttctactcctccctctgactctaagaattctctcttctggaatcgcttgaacccaggaggcggaggttgcagtaagccaaggtcatgccactgcactctagcctgggtgacagagcgagactccatctcaaaaaaaaaaaaaaaaaaattattctgtaccatcacaacttttcacaacgatggcaagccttatgtcttgggagcctgttttgctaggcaaagttacaagtgacctaatgggagctcaaatgtgtgtgtgtctctctgtgtgtttgkgtgtgtgtgtgcactcaagacctctaacagcctcgaagcctggggtggcatcccggccttgccattagcatgcctcatgcatcatyagatgacaaggacaaccctcatgacgaagcaacatgaattagggggcctcttggccttggtccaaaattgtcaatcagaaatgaacataaaggactccagagcagtgggachgtctgtcaaaagactctgtatatcttttgtggatgagttttgtgagagaacagagagaccattgtacctggcacaagggctsttcatgaaaagggagacttactgggaggtgcaagacagtggcatttctcctctcctcttgctgctcagcacagccctggattgcagccccgaggctgagaccagacaaagcccgggaggcagaaagatgctccaagaaccaacactatcaatgtctttgcaaatcctcacaggattcctgtgggtccagctttggaactgggaaacctttcttcggatccgcactcattccactratgccagctgcccctgaaggatgccagtactgtggtgtgtgagtctcagcagccgcccacacgctcctaactctgctgcatggcagatgcctaggtggaaatagcaaaaacaaggcccaggctggggccagggccagaggggaaggccctggattctcactcatgtgagatcttgaatctctttctttgttctgtttgtttagttagtatcatctggtaaaatagttaaaaaacaacaaaaaactctgtatctgtttctagcatgtgctgcattgactctattaatcacatttcaaattcaccctacattcctctcctcttcactagcctctctgaaggtgtcctggccagccctggagaagcactggtgtctgcagcacccctcagttcctgtgcctcagcccacaggccactgtgataatggtctgtttagcacttctgtatttattgtaagaatgattataatgaagatacacactrtaactacaagaaattataaatgtttttcacatcaggctgttctttttttttttttggaggcgaggttaaagcattactatttgcaaagcactstgtagctccctgttatggggataggtaactaatcagaataataatgtcactcgcatccacttcttagaacctggctccaaaggaaaataagctgatagactcaatcactttcctgaggatggaggcctatggcatgtgtggctgcaggtcgcgaagctgcttaatggtgctgggaagcctagaggaattaaataaagaccctggaggaggtgggatcggagctgcaccttgaacaaatagctcagatttgaacagatggatggaaaagagggaggtgttcccaaccaaggggacatgatacagggaacaggtcctatgtctctttactcctgagagtattaaacctagtaggtgggcagcccctcttggttgcctgttaccttattttgaattctttttgcaaaacatactatcacccgtccaaataatcttttgtctaaatccagacttcacattctgactggggcaaaaagaggcagtccagtaaaggttataaaataggtaccatcattgtttgccttatttagaaaagcwtccaattttcactataatcaccctaagcctgagagaggtgaactgttcaagggtactttggctccagtgggtgacagtacctggcccagctttggaattgaaacatttctgatggtctgtrctctgctagaacacaggatgcttctgctctccctgctctggcatcctgccaggtgtcatggccacgcacaggcatgaagacagccgggaagccagagttcccacgaagcactcactccttggacttgctcccaccccactggggagagcactcctggagcaggaaatgagcatctctcatctccctgaattccacatccactggctgaatgatcagggaggcatagcagtgagagccataggtcggcagagggaactcaggccctcctttaggatggccatcacctcatctcaatccagccaaatcaaccatctagagcacacaggccgagagaaatgtaataaaatataacatgagacacgtatgaaatttaaactttccggtagccacactagaaaaaggtaaaaaaaaaaaaaccagtgacattaatttaaatttaattttagataatccaacagatctaaaatactatcatttccacatgtaaccagtattttcatgtgtttttttctgcagtaaatctttgaaatctggtgtgtgttttacactgacagcacactcgattcagatgctagattttccttgtagatatttggtcgttatttagatttcataaaatttacagtttaaaagattccaatatccgagttgctccaaacacacttagaagttgttttccaaataatggaatcaatgatcggcttttagatgtaaacttattaaaataaagtagcgtttctcagttaagtcacattccaagcgctcaagatccatgccctgcgcagacccggacgacgaacccgactttcagagactgagggttctgcctagagagctcccacagaaatcagcccgagaagaaagccttgtgggtgaagccagggagggagacaggagggcaggaggaaaatcaagcctaaatgagcacatcgtggacgccgctcttcctctccccacatctcctcgcctcgccgcagtgggcccggctgtgccccaggtccccgcggtcgggagtgaatggcgctcgggtggcaggcacgtgggcacctggtgaactgcaggaccctggcaccgccaccccctcgcccctacacacacaggagtgcccctcccgttgtcacgtggccttcctgctgggtatctggagcagttgcagcctcgcttccggaaggaaacggggcctctggggcacagggaccacctgccagtgcgttccagccgggctgccatccacactggagaccgccccgcacgtggtcctcgggctcggattcagctgtcgcaggatgtgaggggaaaggtatgtggcccgacaatgccaccgagggtgtccccgggctccaccccgtgcctcttcattatagaatgactgggcagagataagggccagattactttgctgtattgaataattcaccataaaaatgattgcaaccaggtcagcgtatcatgatgactgcaagccacccaggaattcggcaatgcctctggctcttgaccgccctaagtccccttcactccattgcacaacccagggtcaggcgcaggattgcccctagcctccaagtgggaaagaggaggtggctctggctaagccaagctcccagagctcccacagccctcggatttttagtgacagtgctagggccacactccacagccccagtgacatggaaacaccttctggttgtagagtttaccgtgcttatcccaatcacgtggcatggaaacaccttctggtcttagagtttaccgtgcttatcccaatcacgtggcatggaaacaccttctggtcttagagtttaccgtgcttatcccaatcacgtggcatggaaacaccttctggtcttagagtttaccgtgcttatcccaatcacgtggcatggaaacaccttctggttgtagagtttaccgtgcttatcccaatcacgtggcatggaaacaccttctggtcttagagtttaccgtgcttatcccaatcacgtggcatggaaacaccttctggtcgtagagtttaccgtgcttatcccaatcacgcggtgaccttgtaaaaccccaggggctaaaggcactaaaagcatttgtactaatgacttccaaaaagtcaaccacaacctcccacctgcaatctgcttggtagctctaatccctggcctccactcaggtgaagcctgaccaaggactgccaactgcatttgggcagaagggtctactgagctcttgagatgttaccttcacctgttaattcagcaaaccaagttcccgaggacacgttcacaagctttcccttttcctaaggctgaactggagagaaggaataaacacacacacacacacacactcacagagacacacacaaaatagtgtgtctctctatatagtgcatatatatatatatatatacatatagtcacacaccgcttaacaatgtatcccttaacaacagggatacattctgggaaattcatcattagatttcatcgtcgtgtgaacaaacctgcatagtacagcctgctacacacctaggctagatggtacagcctattgctcctaggctacaaagctgtacaacatgttactgtactgaatactataggccattgtaacacaatggtattggtgtatctaaacatagaaaaattacagtaaaaatgttataaagattaaaaatggtccaccatgaatggagcttgcaggactggaagttgctctgggtgagtgagtgagtggagggagtatgaggcctaggacattactatacactactgtagactctaaaaaatgctgtacacttatgctacacattgattgaaaacttttctttcttcaataataaatttactctaacatttttacttcataaactttcaatttttttaacttttggactcttataatagcacctagctttaaacaaacatactgtacagccgtacaagttattttctgtctttatatcctttttctataagcctttaaatttttttttaaacttttttgtttaaaactaagacacaaatatgcatattagcctaggcctacacagggtcaggatcatcagtatcactgtcttccacctccacatcttgtcccactggaaggtcttcagggacaataacatgcacggagctgtcatctatgaatagcaacgccttctggaatacctcctgaaggacctgcgtgaggctgttttagggttaactttttttttctaagtaggaatacactctaaaataccaataaaaagtacagtgtagtaaattcataaaccataacagagtcgttttagcatataaaagtatatagcatatacaattatgctatataattgtacagcatatacatttatagtatataacataattgtatatgctatatacttttatataactggcagtgtggtaggtttgtttacatcagcatcaccacaaacatctgagtaacgcactgcactaggattttacgatggctatgatgtaactaggcaataggaatttttcagcttcattataatctatgggaacactgttgtatatgccatacatcattgactaaaatgttatgtggcacatgactgtattccatttaatacaaatttcttaatgctgtacagtctaatgacagaaagcagatcagtgctaatgacagaaagcagattgcctcacctagggatgaggtggggtggggaatggagggattacaaaagtgtataagaaatggttaaggtgatccatatgttcattatcttgattgcagtgatggtttctccacatatgtgaacatgattctaatgttatattttaaatatgtgccatttatcttatgtcaattatacctcaaaaaatctgttaaaaaaaaaaaaaaaaaagaagtccctcccaccaccacctccatcccacacacagccaaacgatactcagtcccatcctggaatttccactgagagcttacctcctcctggtccctctagagaagaagctcagcaaaggctggtctaatgcaccttcctgggctcccacccatagggcgagtccatacttcccttggactcgccctgtgggtgggaggccagaaaggagcatgctctattcgcatggttggctatgacctctcagtattgtaagtcaaagtcattatttctgcttgggttcactcatttcaaatattaacttttaatgaccagcaatgaagacaacaaaacacagggcccatggggtcaagggcagactgagacctatatagcaactttgttgatgatgacatagtcaaatggctttctctggaagaagcaaagaactttctagtgacataggtaacataaccagttccttcatatgctgaaactagtttccgaagctacctggatatccaacaacagatctcatgcatctagtgtctcccctcaaccactcaacacataaccatttgaaaagtgttcctgaatatggtacatcctttccatggaggagcacacagccactaagcagtgcagcccaggagcttatcactcctttttaatcaatggacaaaatctggattaacccccttctattattcaaactaacttccaactaactttttctcatacctccttattcaaaagtaaagatttaatgaactactcctgtctgctaaacacagattaagtggtcgggattcaagcataatttagatacaacgactgaattactggaaaagaggaaagaaaaaaagggggcaggggctgggcacggtggctcacgcctgtaatcccagcactttgggaggcccaggcgggcggatgacctgagatcaggagtttgagaccagcctgggaaagatggtgaaatcccatctctactaaaaatacaaaaattagccgggcgtggtggtgggcgcctgtagtcccagctactcaggaggctgaggcagaattgcttgaacccgggaggtggaggttgccatgagctgaggttgtgccactgcactccagcctgggcaacagagcaagactccatcaaaagaaagaaagagagagagagaagaaacaaagggggcaggttagatagactcaggtgactgaactcccaccctgtgggatctgacactatctccaggtagatcatgttggaattggagggcacccagcccgcgtctgctgcttggtgtgtggtgaaaaaacctacacctctggtcatggaagtcttcttctgcgttgatattactgtggtggtatgagagcagaggaaaaacacagtttgagagagcttttcccgaaacacaaacagaaattgccagccccgctgtacagaagagcagtatgtacagaatgctatgtgtccatcaaaagaagagtgactaaccaaattatagtatctctgtaaaatagaatgctattcagcaataaaaatagcaaattcttgatatatacaaaaatatagaggatatctcagaaaattatgttgagtgaaagacgccagacacaaaagagtacattttgtgttactctacgtatatgaagttcaaaaacaagtgaaactggccaggcgcagtggctcatgcctgtaatctcagcactttaggaggtcaaggcgggcggatcacctgaggtcaggagtttgagaccagcctggccaacatggtgaaaccccatctctactaaaaatacaaaaattagccgggtgtggtggcgcatgcctgtagtcccagctatttggtaggctgaggccaaggaatcacctgaacctgggaggcagaggttgcagtgagctgagattgtgccactgcactccagcgtgggtgacaaaggctccgtttaaaaaaaaaataaaaaacaaaaaaaacccacaacaacaaatgaaactgatctatggcaatagaagtgggaactagcggttgcccctgtggatgatctggaagggagacggaaccagcagggaaggaaatgttttatatcttgattggggtggagcttacacaagtgtacacatttggtaaaattcatccagctgtacactttgaatctgtgcgttttattktatgtaaattgttccttgattttaaaggaaagtgtaaagagatcacagtggaaaaggttatttgcttttctgggcctaatcaggaaagacttcccaaaggaagtgacatttgagcaggatcttgaaggaggaataggacattttctggttggagctaaaaacaagaactaaaatgtggaggttgagagtcaacgtgcatctcagtagaggagacctcacggatgtgtttgagaatgtctgagaaaggagggttgggaatggtgtgtgcaaggaaaataaaaatcttgggaccccaaacttactgtgccaaagggaaaagttcagtttgggaactgagtcatgcaaaaactgccttccattttgtttctaaatagctagctgcaaa

SEQ ID NO: 94518 - DNA, 56304 bp, Homo sapiens
tccccagttcaagtgattctcctgcctcagcctcctgagtagctgggattacaggagtgtagcatgcctagctaatttttgtatttctagtagagatggggttttgccatgttgcccaggctggactcgaactccttgcctcaagtagtccacctgtctcagccccccaaagtgctgggattacaggagtgagccactgcacccagcatttgccaagacctttgatggcaggctttttccaggtgatcagtccttgtctggtctggctctgccccactctccttctcacctagttggaatccctagctacttttcagcagaggagagtgtgtaccccagtcccagcttggttcagatctgcatttaactcatggaacctggctgctccccaggtcctgaagaaaaaaaggggtctctctgtgggtatgataaaggatgggcctgtccccaggaccctgtgagagggaagcccaatgtcccaccaggttggcagggctggggaagggagtgttatggtagccccaagaaaaaaaaagggcagcagagggagcaggacagtgctcacatggaactcttgccactgcctgagtgaggggagggaggagtgcacgccagcgacgtcagggggcagagaggcgcagttccagggcggctttccccctcacttcctgccatgttgctctgatcgcctccaggtgagcctgcccactttgtgcccaggagcctgtagaaaaccacagctccccatggttatggccccaggagtggggcagagcagggaggagtcctggacagaggagaggcaggggcaggagggagtgggcctcaaactccaggagtgggcccttctcatgggtcctgctttctggcttctccttccttacccctgggctgatcactcggggaagaactgagacaaagtttctcaccctcaggcccaaggggtttaattactggccccttagggaggtgtgagccccctgaaaggatgcaaggctttgttttgttttgttttttgagacagagtttcgctcctgtcgcccaggctggagtgcagtggcgtgatctcaccacactacaacctgcgcctcccgggttcaagtgattctcctgcctcagcctccggagtagctgggattacaggtggctgccaccacacctggctaattttttgtatttttagtagagacagggtttcgtcatgttgggcaggctggtcttgaactcctgacctcaggtgatccgaatggctctgcctcccaaagttctgggattacatgagccactgtgcttggccacaatgaaaggttttgtgtggagagcacatacatgcctttctgggaaaacagtccacagctcttattctcagcagacttcacggtcaaaaaagtttagaactcttgctacagagctgtggaagcagctaggtgaggggcctgccaagggcactctgggcactacctgggcactctcgagcccatcatcccctaggcaggctgcgctgcttggtatttgcagagctgagggggtggggcatgtggggactgtgaaatcgccctgagatgacccacagtcctcagctgggaagtgagcggtgcatctcctgcagtgtcctccatccctagagccatggggccaggagaaccggcccttgcagcaagtgaaaagcctattattgactccctccctagccatgtagacaatgaaccaagacactcatatcaggtaaatgccttggtctctgtcaccgaggtgaccagtaggcattcccagatacagtgaaggtcctcacaccaagatatgcacctggccacctgaggaaagagagaggactatctgaggggatggggctgagctgggtgtggagtggtccttgtgggtcttggtgagtgggaaggggagcagcatgagccaggcctcaaggcagaaggacaaccaggagacagcctggaaaaagtgctggacccacaacggctcgaggctggccagaggggaggtgggataggctgcaaagtcctgaggtctgaagattggccctggcaggaagaaaccaggtaaggtggggtgttacctacaccctcggggctagatgcaggccagagccagccaattaccaggcccttagggaggtgtgagccccttgaaatgatgcaaggttttttgtttttgttttggagacggagtttcgctcttgtcgcacaggctggcacctttgcccagagcaggcaccaagatttctggctctgggtgtgacctcagtctggggaaaagccccagcccccaccaggaccacctaccccctagactacttcaggtgctgagcccaagccagggacaggaagctaaactgatgcctagggtaatcccaacaaagtccctggttccccgcagctatggggctgacggggaattacagcccaaaccccagatgctggctctcaaactaacactgagccctcagtgcccacagggagatacaatcagtgcactttccagatggggaaatgggctcagagargtgcaacagccttgcccaatgccccagaccacggctccaggcccagagtgttcttttgtcactgtgtccagagggcagcagctgctgtgatgtacccacctgagcctggcagctttctccaactttggaagcccaggagcatggcccctgtccacagatgcacctggcatgaagcgtgcccagagggacagaggcagatgagtttcgtctcctccactggattgtgagggcctagaaggagacaagggtctgcttgagaaggcagtgaatagtgagcaacctgaggcagtgcccctctggatggatgcgcagtgcctggatggaaactggctcagacagagctcagttctgcaggtccctgaggcatggagagttcacagctaccaagtgtaggagtctggattcaaagccaacggcgtgactccaaagtccctgccctagcccctggaccaccttgcaggcccatcagatgccttggccagcagcacagccggccaagaccagggaaacttcagagcacccccaggtattccagagcctcagagcacccccaggtattccaacctaatcctggtacccctgcctctcaccacccttcttcctgctttaacctcaacccctacacaaagcctgggccacttaatgtggcatcaaacagatgcctcaataaatcagagtgtaatcttgaaaaaaaaataagacttaacagatacacaattgcatgttagaatgctaaagaccataaacatataacaacttaaagtacatataaattcaatatatatccaatcgttgtgactatgacacagtagaatattaaaatactattttcaaaatgtatacaagcttaatgttctatgtattcaaactatttattcaaaatacaaatcatcaacataatttgccactaatattcagtcccttcacaggacacgattcactgggagttaataaattagcagccggcaggcagtgacgcacagcaaaaatgaaaaccaagaggtgaaatagttctgaaataaaggttttaaagctaacagaaatcactgaattactaagtcattagcactaattttgagccgactaactaattaatacgagatgatacaatgtcctatactttggtaaatacagactatgtttaaacaatgtctgtaacgtgactttcaaaatgctcctggctttacaaagatgtgattaagacgtagtaatacatgctaaaccatttccccctgcagagcatgtggtaactttcatcagtcacactgagagtccagaagataaaggaaaaggtcatggattttgctaagaacttaccagagttgaactccctcattttccgttccccagcattggcgggttctgggactggtggctgtggtggctcgttggtctttgtctctcagaaggtggggaataatcatcatcttgaaaaagaaaaaatggtcattactgaaggaaccatcttaggttacagccacctctgggtcaattcccaacattgaaaagctgagcagggctttaaagctatcttattaataattatttctgtattgcgaacttcagcatacttttttctagttacatttgaaatgttattcttttgggatgtgctcaagtgaatactgctttttcctctgtcttgctttattactttttagtttgcttcatttgaatcatcattttaagtctccccttctcctcaaataactttcaaattgctgccaagaactacgttctattttaaggcttttgagaaaaaactttcaatgaagatagccacctaaagttatacaaatatagaagaaacgggataaaataaagcttagattggaaaaaatatttaagattatacaaaattcaagcataaacaagggaagctgagtaattgtatgttcaaatacttttaacaagtgcaaaacatgtagtcttaaagaaatagagctggccaggcatggtggttcacgcctgtaactccaacactttgggaggccgaggcaggcagataacttgaggtcaggaattcgagaccagcctggccaacatagtgaaaccccctctctactaaaaatacaaaaattaggccaggagcgatggctcatgcctgtgatcccagcactttgagaggccgaggcgggtagatcacctgaggtcaggaatttgagaccagcctaaccaacatagagaaaccccatctctactaaaaatacaacattagccgggtgtggtggcacatgcctgtaatcccagctacttgggaggctgaggcaggagaatcccttgaacccgaaaggcaaagattgtggtgagccgagattgtgccattgcactccagcctgggcaacaacagcgaaactccatctcaaaaacaaaaaagaaaaaattagccaggcgtggtggcacatgcctgtaatcccagctacttgggaggctgaggcaggagaatcgcttgaacccaggaggctgaagttgcagtgagccgagactgcaccattgcactccagcctgggtaacagagcaagaccctgtctcaaaaaaaaaaaaaaaaaaaaagagagagagagaaagaaagaaagagggctacattatttatgaaacagatactgttaactcagtcaccagaaagcctgtgtataaatgagcagtgagatatccaagcacagcacacacacacttctcaggacagctgtcgtgagagtccatgctcgtttccttctggatacatcagcaactcactctgctatgatcctgcaatacatctcatgttagaattagagacatctgggccaggcacagtggctgacgcctgtaatcctaacactttgggaagccgaggcaggcagatcacctaaggtcaggagttcgagaccagcctggccaacatggtgaaacgctgtctctaccaaaaatacaaaaaattagctgggcatggtggcgcacgcctgtaatcccagctactcgggaacctgaggcaggagaatcgcttgaacccaggaggtggaggttgcagtgagccgagatcgtgccactgcattctgccatgggtgacagagccaggctctgtcaaaaaaaaaaaaaaaaaaaaaaaaacagaaaaagaaaaagaaaaagaaaaaagaattagagacatctggatcaaatcagctgccagtctcgcaaagtgtcgggttaacatcctattaagattgctgcttacacatcatctataaaatactgaaaatatcattttaagaaatcttttttttacttggagacagagttttgctcttgttgcccaggctggagtgcaatggtgcgatctcagctcactgcaacctctgccccctgggttcaagcaattctccttcctcagcctcctgagtagctgggattacaggcatgcaccaccacgcctggctaattttgtattttcagtagagacagggtttctccatattggtcaggctggtctctaactcctgacctcaggtgatccactgaccttggcctcccaaagtgctgggattacaggtgtgagccaccatgcctagccaagaaacccttatttgaaaacaagccaggtgcggtggctcatgcctataatcccagcactttgggaagccaaggtgggtggatcacttgacgtcagtagtttgagaccagcctgggcaacatgttgtaaccccatctctactaaaaatatatttaaaaaattagctgggtgtggtggtgggcacctgtaatcccagcttctcaggaggctgaggcaggagaatcacttgaacctgggaggtggaggttgcagtgagcggagatcatgccactgcactccagcctgggtgacaatagaaatactccatctcaaaaacaaaacaaaacaaaacaaaacaaaaaaccactaaaaaaaagactccatttcaaaaacaaaactaaaatcaaaaacacaacacaaatgtagtatacaaatgaaaataattactgtgttaaacacagtttcatagaaaataaaagaccaatcaaatacaataagctgcctttttagatgggtatgttattcttcttttacagctaaakaaacrggctcagagaatgttatttgattggaccgtgttgcatytctggacagtgcagytgaaatcagactgtgtgtgtaactccactagcctaccagggtgcctctcataaagttagtaagaaatgtaaatttggcctaatatacaaagttgccagggcagcactgggtcaattctacatacaatacttctatgttcatcaagggaaaccttaagggaaagtgaaaatgcttytagaaggcgactggacaccagcgcctttgcttgttgcctttgggctcttcttctaaggccaacagtgacctgaaattattgactgacttttccaatcaggtggacaaaatggtaccaaggtcgccaacatcagacaaattcacttgagggccttatctgtgtgctttgaaagacaaaactgcttttgtaaaggatactttacaaaaacataatcacattaataactagtaacactgtaaaatgctgacgtgttgaatgctactttagaaaaacatgttcaaatttagggaaaaaatttgatacaaaactacctatcaattatctagctagctagctagctatctcgagacatgctttcattctattgctcaggatgggaagcagtgggattaccayagctcactgcagccttgagctcctggcctcaagtgatcctcctgcctcagcctcctaactagctagggccacaggtggacacagttacgcctgggtttttgtttgtttgttttgtagagacagggtttcactacattgcccaggctggtgtcaaactttggagtctcgctgtgtcgcccargctggggtgcagtggtgcgatctcggcccaatgcaacctccgcctccccagttcaagtaattctcctttaccagcctcccaagtagctgggactacaggcatgcgccaccacgcccggctaatttttgtattttttgtagagactgggtttcaccatggccaggctggtctccaactcctgacctcaggtgatccacccacctcggcctcccaaagtgttgggattacaggcgtcagccactgagcctggcggagcactttcttatgttattaagtagcctaacccaggtggggcgcggtccctcatgcctgtaatcccgacaactctgatggccaaggtgagaagatcgcttcaactcaggagttcgaaactggcccgggcaacatagcgaggccctccccctatctctagaaaaaaatacgaaaattaggccaggtgcgcaccgcgcccggctaatttttgtatcttttgtagagacggggtttcgtcatgttgcccaagctggtctcgaactcctgagcccaagccatccatcctcccgcctcggcctcccaaagtgctgggattacagtagggcccagccagcctcatgttttatttagtagtccctccctgttgcacacttggatagatttttaatttttttagacagggtttacctcaatctcgcaggctggaatgctgtggtgggatcatagctcactggagccttgaacctttgggttcaagtagctgggggtctgaggtaggactacagagatggggttgcgccatgttgctaggctgctcttggcctgaagggtcctcccgcctcggccacgccagacatagttttctatttttgaccaacataaacactgtgctgggtctgaatttttcagctacccttcttcagccggcaacacacaggacctggcggggaggtcactgttattagtccccactctgatgagaagactgcccagctccaggtactgtagcgccccagtgacgtaggcgaacacccgctcctgtggcgtcgcggaaggcccacctctatggtgtcggcgaagacgcgcccttgtgacgtcacggaaggcgcgctcttgtgacttcgcaggagaccgccactcacgcggagccaatcggaactcgcggcggggttgctgggtcttccaggatcgcgcattagcggacgctggctacgggtggccgggcgggatgtaaccggctgctgagctggcagttctgtgtccccaggcttcggcccggccgccgccgcacataaactgcgaggaggagctttacgacttcycggtcttcggggccgggcgcagcaagggccagactctgcgctagcaggcgctgcgcgccaaccggccggcccctgtcgcagaaggtgcaaccgatcgcactgtcgcgcagaagctcctcaatggccagcgccagctgcagccccrgctgcccactcgcctcacctgagcctgggtacgtgcgccccacaacacctccaccagccagggcccggggactcccggtagcgtccccggctacctggcgccgttcatcctgggcagggtcggccccctctgaggctgcccggcatgagggagctgcacccctgagcttgacgtctgacggccctttgtaatagcattaagtctttgaaactttgtagcggggtagaaggggctaggaaacgaagaaaacatctttttaaaaatataagcgatcggctgggcgaggtggcccacgcctgtaatcccarcactttgggaggtcgaggcgggtggatcacgaggtcaggagttcaagaccagcctggccagcatggtttcactgaaayccggtctctactaaaaacacaaaaattagttgggcctggtggcgggtgcctgtaatcccagctactcgggaggctgaggcagagaattgtttgaacccgggatgcggaggttgcagtgagctgagatcgcgccactgcactccagcctgkgcaacagaccaagactccgtctaaacaaacaaatatatgtgtgtatatayatgcgatcgagcccrggaggttgagattacagtgagctgagattatataagcgatcaagcacgggaggttgaggttacagtgagctgagattgcgccattgcactccagcccgtgtaacagagggagactctgtctctaaaaaattatatgcaagtgagagcttttcttccagccctcatgctcagactgaagaaagtaattgggccaggcccggtggctcacgcccstaatcccagcattttgggaggcrgaggcggaagcrggtggatcgcttgagctcaggarttccagactagtttgggcaacatggtgaaaccctktctctacaaaaatacaaaaaattagttgggcatggtggcatgcacttgtagtctccgctacttgcgaggctgaggcgggaggatcgctcagctgcagcctcgacctcttggggcaatccatttcagccgcccaaagtgctgagattacaggaatgagccatcgtgcctggctttacactatattttaatactttttttgaaaatggaaagttttacaggcaattcacttccttcaaactaatgataaggaagtgatgctgttctgttctgttttgttttttgtttttgtgtttttttttcttttttgagatggggtctttgcccaggttggagtgagktggtgcaaacaaggctcactgcagccttgaccttcgggctcaaggaatccttccctgtcagcctccccggtagctaggactacaggtgcatgctaccacgcttggctaattctttttttgaaatggagtctcactctgtctcccaggctggagtgcagtggtgcaatctcggctcactgcaggctggtctcaacctctgacttcggctggtccacccacttctgcatcccaaagtgctgggattacaagtgtgacccaccgcgcctggcgattttgctcattttagatactagaactttttaatttaaattttttttttcctgagatggagtcttactttgtctccaggctggagtgtagtggcgtaatctcggctcactgcaacctccacctcctgagttcaagcgattctcctgcctcagcctgccagagttgctgggactacaggtgcgcaccaccacacccaggagttcaaggctgcagtgagccatgatcgtaccactgcactccagcctgggcaacacagcgagaccctgactccacaaataaataaatcaacatcatatgatctgtaccagggtataggcaggtgctatgatccccacttttcatcctcaactctaagttgagtcatacatcaacctctagtaaaaagtggcatgctctcagtcaaaggggtaagcccaaaccacgtggagagaatcttatctcttttgagagctaatataaaaagaattcctcctaggcataaaaatattgtgacaccagttacttaggctaaacatgcctattatgctaagtgagttattaacaataaatactttaactctgtgccatgttaattatcataatctgatttataatttgttttaascttaggttatatataccttgaagccatttatattttggtatacttgtaatagttactatacactggactatgtatattggactaaacatggagagtcaaaaaagwgtatgtggtcagagtagaaatcatgccctagcttccttcgtgtctacctcctaccttgagtagaagcggtagaaaaagtaattacctaagattttttggattctggtttgtggagaagcacccttatatttaggctgatgggtggcgaaattagaaagtattttttgtgatttagaattttatacggagatgttcattgtgattaattattctttgtattagcagatttttgctttttatagctgcatgatttcttgtttattattcattcattattgtctattaataaagaaaaactttatttcactgaagcagtgatayataatccaacttggatttttaaataatgacygacttttttctttgggaatacattactgttaaaaatgtagattattagatacattacttttaatgaatataagtggtataattagaaggctgaaaagaatccttggaaacgtgagtttaatttgatagctaagaaactgaggacaagatacttattctttgtagcrtattttctaatgtcatttcattgtctcaccaagaaatacttgcataaagcaagttcaattayagcatctgttgaatatttaaggttgrgtaaagtgggtgagtttaacagatattttcccttatttcttttaggtgaatctggactgggaaagtygacattaatcaactcattattcctcacagatttgtattctccagagtatccaggtccttctcagagaattaaaaagactgtacaggtctagatattagtatttttaattgatgataagctggaataatattaatacacacaaagcacatgttgtaacttttattatgcttccttagaggtaagatgcaaatttgcccttagccagtgtaagrtggtaaatatgacttcataaaattaaaaaracagaagaagtacagttaatcaaaagaattatcttgactagaactttccaaatttgtcctaaggattctcctagagatgacactgtgacatagtaaccaattcccctggagttgtgctatgtcgtatgatagtcatttgccacatgtttaaatcaattaaaattaattaaattaaaatgcaatttctcatttgctccagatacatttcaagtgctcaacagccacatgtggcaagtggctgccattttgtgcagcacatatatgaagattttcatcattgtagaaaattgcattggacagtgtagagaaaacatgattcatagaaaagctattgttatttaaatacagtgttctatattagtcggtgggataataccatatcatagttgaatggcaatagcaattctgtaagactcccaaggtatatgtgatctaatttactgcttctcagtctttgctatgaattccaatcctgggtatcctgttaaatttagttcttctagtagttctgagatgggctgcctttctacatttctaacaagatcccaggtgatgctgatgytgctggatggtagatcacactttataaagcaaggggctagactctagatatgcactttttattaaatagtacagcagcctgtagccacatgtggctattaatctttgaaatgtgggtagtctgaattgtgatgttctgcaaatataaaatataccacagatttctaagactgagcatggaaaagaaaatctccgtaattttttatattgattgtatactgyagtgataatrttttggatgtatcgggttaaataaaattgactgatttcacctttttcctattttaaaagtggctactaagaaaattttaaattrcttacatgattgacatggtatttttatttggcagcgctgctctaagctgttaatgaaaaatattgttggtgagctctgcttaggtaatatataggacacgagcagagaggaggcacgtgaacagttctggcgggagtaggcttcattgaggccgtgatgcttttagctggatttgaagaagtggtagtgatcatcccagtgcacaggatagtagggcagtctatatattctgagcagtaactcatacatatcatactgcaagaccccaaaggagtaattttgtgaagtaaatatcttatttctcctttttaatgtttccattttaggaatttttttttttttttttttttttttagtaaccttcatagggcttgagatttaaaattacctgcaaaattctactctaaaaacttgatcctacatgcttatttattttgkgataaatattggaaattttaaacctaagtaaraaaatgaactttgaactatcttaatttgggtatctgttatgaataccttcacttaagtatttatgaatttagatatgaaaggtaaaactaaccactatccaaattaatatacagttcatttccagaaccctagtttcttccatgtgctcactctcattcagtattacaacccccaaagataaacaccatastgactgccttctccataaatttgcctgttcttgaacgttatatacatatacttttttgtatctgttttctttcagtgcagattatgtctgtattatttactcatgttgggtgtagttgttttttcatcgtcgtataatactccattgtgtgactgtatcagtatatatcctttattatttattgtagataagcctttgggttttcagttttttactaacgggaacattcttgtgtatgtcttagtagacttaggcactcattgctgttgtgtgtgcataaagatatagaggtatttgagtttattttatttgatttctagtgaggttgaacatgtcttttgtactcaataactgttcagatttcattaaagtgttttggtaatcttaatattttctgtcattttcttgctgatttataggagtttgaaaaatctaataatcccctacattttagatattgcagacattttctccccaggtgagcatctgttaaagatgtgacatgccctcaatttactagaattcttacattggcttagcttcaaaataaattgcctaaacccattttaccttcctttaaagtaacacttcaaaaatatcctcttctgttttgaatatcttctcggaaactctctttatcttgaaaacaaaggggtaatggaggtgagaatatctctggtaggatttttaagacaggcctgtgcaccactgttaaatatcttttctttaccaaaaagaagacctgtagcatttgagaaccagattgatccttagtagaatcttgtagaagtcctctttcctgattgaaccatggaggtgtattcctttatatactgaaaactagctgaagataatgtaaactcttttgcccagttaggaaagaacatgccatattacggacagggtcagagtcattcaagaagcctgaatatagttagaaaatgagaatgtaatctttttaatagttggctggctccttaccaagcccggtcgtcttgaagatataggggaaatagtgtaaacggttgtcaagataaatctaaaatggaaattaatcagtttcctagaatagattgagaaattagctttaggaaaaagataaatttcacacacactctaccatggaaggtacagtgctgattcagacagactgggaatggtctcatttttaagtggtgatgtgaggtacttcactgagcattgtgacaggcacgggcttgggaagagcctattaggaaatgggagaggcatgagattaaggagcacataagaggaatattagcagagaaattcttgttgaggttgaaggtcatgaattttatggtataggaatagaaagatgggttaatccagaatgggatttgagttggaaagggaaagaaataaaggttttgggaaggaggttgctagtagaaattaagaggggcaagggatttgaggctcagtgtaaggagacagggatatgaggagtggagaggttcagaatagaaagccaaattagagttttgggatcaactttcttctyagtaaagtagttctgggtcttcatgagaagaaagtattctttaggcataactgttctactattggttacttcctctttcattttcttgtggaacacsatgaaatatttaagatgatatttgtcttttgagccaataaataagggaaatagatagtttttgtgtttgagctaagtggagtatctcaggccattccaatgtcttcagagttttggctgtaatgctacctcttgagcaagtgtaggtagaggtaagctcttgaaagaaaatrttaaccctctcttcaaaatgttatatgcttaattaaataacttcttaatttaccttaataaatggcacgtaaacattaagttagaaaaggttagtgyatatgaagctgtataatcaacattgtttgactttttttcctcagattgtaaaactgaaaactcggtatactaatactcttgtatactgtatacactcagtattagaaaatgagtaccttggatttctggaatctcagattccaaaagaggtctcaatagatgaattatacatagatgattcatagacgatagttttagttttatttatttttcagggaaaaacagttgaaaatgcccttgattcattcttttggtattagatgatgcagctaatcttagagaaccctgagtgatgccataaaagatgttgatgtgacctgcttaagggaagtgcgtgggaaagtgaccatttggaatagatttgttagaaaagtttgaaattcttggacttgaactaatttgttttccatggatcccatgaggatacttgtaaaagcagatgataggatacagttggatcctgtgartggcactagtttacagttatgttttctggatctcttccatatgtcgctgacttctttgtatttgaccatgtatggacatacagaatttcataggccagagaagaaaagaagctttataaacattccttatgtgtgtaaaatacaaatcttcatttgtcttagcaagtcaataagtaattaagttgttggactgatttttttttttraacagggaaatatcttaaaatttaagctgttaggttaaaatgtgtatttggtatacagcatattactgaaggtagaatgggcttcatttggtaataaaggaaccagaaatatttttaagtaaaattgggagatgattcatgtarattaactatgttgttgtatcwctttctagaatacagtactatgttgtttaaaagagtaagtacgtaaaggagtggtataattactktggatatttcygcktcagccacagttaccatgaataaatgatctgtctttataaaggagagggaggtgaattcaagatattgagatgttagatttgactgggttgtcctttgactagaagatcaccagataaagaaaatgtaaacttcctaaaccagataagatgatattgttaaaaattttttttggccyagcactttgggaggctgaaatgggaagattgcttgaacccaggagtttgaagctgcagtaagctatgatctaccatgcactccagcctgggcaacagagtgagaccctgactaaaaaaaaaaattttttttcctttggttctcatgatttcacactgatgaatctgattgttttctctgagtcattttgcctctctcatgttattagggtaacctgataatagacatgttatctgagttatgtggtatgtaacagtgatcttctaaatgatgtgcatccatcactgatactgaggatgatcagaaactattacaactcttatttattgatstttacttttaatctacagataaatgataatacatattaatacttaatattcagattgccaatagtatatatttggtgggtaaatatcttttggatctgcaaaattttcactgatagtttgtatcaggatcaaagcagtttgaagaacattaatctaaaagataagactttggcatctcatttctctaaaagataagtcatgcatgtmcacatctcaggcaatttttttcagttttataagttttattcttgataataaaattcttttaacagaaaactcttgattgctatagacctctgctgtgtattcagtagtcactagccacatgtggctatttaagttaattcaaattaaataaaattaaatatcagttccttatttgcactagtcagattttaaggagtaagtagccacatgggcaagtggctaccatattggacagtgtggatacacaacaattccatcatctcagaaagtgttattggatagtgtggctacagacttttcttgctcagcaatcttagtctccgcatgttagtctcttcatgcattaggtagcatytataaaacatgccaaaaggaaataggctatctgtaaaagtgtcccaaactttttgtcttgtaaattagcttatcagcatacttggagcctcttgccttaataaggacttgatataaatrtgtatcaggagaaagcctatcttatgaaggaattattccctttttatttgaatccrtgtttgctttatcttsggctcctgaaaactgatactttgcatttaayagcagcatatgcccaggatgaatgataatacatcttctgatacagagcttgaggttacagaatatcttaaattgttccaggaactgttgttatcatttaagtccaataatcagtaagrtttcaccctaccagaatacacttttttttattaactgtctggacttttgctgattacattgtccagaatgtggagtatcgcatttgagaagaggattggatcctagccataacataaatataagggtaattacatccatgctgagaaagatttaggaatgatagtaagttcacttgagtgagtggtttgggccaaacttgatagagaatagtccaggaagacatttactataaacagtagattaaatgttcttgcctgattaattacatttgaactctgtkaatgactgaatcactcaatctgcttatttgtattattagatgcacatttaagttatgtattacatgtctttagtggtgatcactattttatcagttcctctgtctttctttataccaagtatgaytcataaacccagtattaatttkccaagagattggcatactatttgtatatacgcttttctttcaaataatctggattcccaatgcccacaatcattgatcctaaagaaaatgtgggagtaggtagataaactcaaacatccctaccatcacccctggtaggaaatcactggtgtratrtatgatactaacatctgcaccaattactcttataggtggaacaatccaaagttttaatcaaagaaggtggtattcagttgctgcttacaatagttgataccccaggatttggagatgcagtggataatagtaattggtaagaaggatttgtcctcacaactttccagtgtatttggggtactggggtggttaaactttctcttcttaacattttaaaactcttcttagcaaaggtcaccaaacttcaagtaacatgacaggtttgtataccagctttgccacttatttgacaaagtttaacttcaaagttaaacaaagaagtttaacttctttgaacccatttacttttctataaaatggagataatacctatcataaaaattgtttttaagacatgttccaaaataacgtagctagatagaagaattctcattattgtaagaaatttaaaactgtttgctttaattttatccatttgtataaattctatctcaatcctaatttaaacctgatatttagaccttcagtttttccataagtcctaagtgaagaaaacaactatgaaattttagtctgaagtaattatcttagtattttataaataacttttatttttgtttgaattcacattgtttttgaggtatttttctgtcaactcttaaaactcctaagttcatcatgaagtttttatattatttaaagtaatctctcatttgaaatttgaaactgaatataattgttttcatattatgaagtgtgttattaatacacttactagtgccagtaatatgctaataatttagctgtgtttcaacaataaatattttctttcatttggaaagttttgaaataataaagayttattcaacataatttatatttttgaatctttatatagaataacttgacatgtcttccattggtaaattcattttgcctatttgaaaatattgattattgttctttaacagtcatcagttaattcatatatagaattgcaacttaattgttttgtttatttgcattctatagctggcagcctgttatcaattayattgatagtaaatttgaggactacctaaatgcagaatcgcaagtgaacagatgtcagatgcctggtaacagggtgcactgttgtttatacttcattgctccttcaggacatgggtcagtaacctgatacttctgattcctttttgttgttgttgcttactgttacctttatgtgcatatttgagtaatctttaagtttgtgaagtacatacaactatacccattattaagtaccaaatttcatgtagaaatgtcttagttgaaaagcctttttaagtcctgtgtaagctaacagtgattttactccttagttcttcattcatgaggattttccctgcttcatggaaataaacagtgttgccaccatggtttgaggtctcagtgtggcaaatttagctttcatgttgaactaccaaataaagagaagcagccaaaccagttagacatattcaaaataaatccaaagatgctatttattataagtctcataagagatggttatcaaaagcacttgcatgccaatgttttcttgtgccatttctttctgcaagaaatctgtttggcttctgtttcaccttagctgtcatagacatgtcgtttaagtatcatattgtcagtactaaccttttgtttattaggacataagatctaagaatctagacattaatctgatgtgattgttctgtttgttatagttagcctgtactccctttttttgttcttcgtacttcccctttcattttgagtacatatatgtgtcatttgtaactgcagatttttccaattattcttcctcagtcttttcctttgggtaagtaactcagcatacataattcagccacctggtgattgtaactccaccatctctccaccaaaagaactgtagtagcatcaggctaaatagcattaagttatctaacactcacattacagtagagtaaaccaattccttcaggtatacctttctcttccatttttggcttctcgctctcttttttttgtttgtttttatagatgggtcaatgcccattatcactgtagatggataagggagccttaattatatacttatatttttgcactgtcagattggagtggggtaaaaatgtttcttcttttatgtctaatactcttgttttttttkgkttttttgctgtgccctagaccgttacataactgaagactcccaccttcaggcaggattgggtagtacatgtttgtaactacctggcattgccttttgttgaggtaatttcagtttttattattattattagtagtagtagtatacttctacggtatatgttcacaatgtgcaggtttgttacatatgtatacatgtgccatgtttgtttgctgcacccattaactggtcatttacattaggtatttctcctaatagtatccctcccccatcccccaccccacgacaggccctagtgtatgatattccccgccctgtgtccaagtgttctcattgttcaattcccacctatgagtgagaaacacctatgcggtgtttgggtttctgtccttgcgatagtttgctcagaatgatggtttccagcttcatccatgtccctgcaaaggacatgaactcatccttttttatggctgcatagtattccatggtgtatatgtaccacattttcttagtccagtctatcattttatggtgttctcagtttacatatttaaatcactaaactgactctttgacttaaaaggctcaaaaaaagtcatctcaaaaatacaacacactgtataaccttttataagtatttgtgtagcttcttgaatttatatttttaaatcattctcatttaacttgtcagggccttttcctgaaagccagcagagtgaaatcttaacctgcagttaagtcaataaaatttgttagcttataaccaattttattattttagattttccgaactctctccaactagggtaattctcatgaaatcacattcctgccatccctttggggaaaattttatttcttaaaattgcatgggaaatgagagcttttttaaaagaaaaagatttttatattcaaatgatatgtagtggctttgtgccatttcttatttgtcacaaggggtaagatgtttaaaattgctatatcttatatataaaaatgtacctttgaataatttcttagtttaactatttttagaaatgaagcaaagttttgcccattggtacatgatattgtggattaagtgaaagaatatgaggctgggcatggtggctcatgcctgtaatcccagcactttgagaggctgaggcaggcggatcacctgaggtcgagagttcgagaccagcctgaccaacatggagcaaccccatgtctactaaaaatactaaattagctggccrtggtggcacatgcctgtaatcccagctactagggaggctgagtcaggacagttgcttgaacctgggaggtggaggttgcgatgagccgagatcacaccattgcactccagcctgggcaacaagagtgaaactccatctcaaaaaaaaaaagaatatgacacagaattttatgtatagagttccaggtaccctgctcactacagactgaaattctatgcagtctagtaaatgaatcagagcctttccatcttgtctaggtagtccctaggttccctttttagagggttttgtttttagagtgattataaattcgtccaacagtgcactttcagtgcctcctacctccctctaccaagtatgaactgcatgcacggctgatttatgattttggctattatcgcttcatgtgtgttcttcactattttgtaactgttattaaagtaaaatactgacttggaacatgaattttaaaatggtgttttatccttctagtattgattcccacttttagaaaaattggtgtcatccagtgagttttatacagaaggattttttcccttagaaatacatacatacaaaaaaaatttgtcactttccctgtagttgtttattatgctgtagaatttgaggctaaatagtcttttctctctactgtgggtttatcttctagaaatgataaaggattttctatttcttaaaaacaagatttaaagactaaatttgttgatgaaaagactagccaatataaatctaaatggacagagggaaaaaattcaaccggaatgtaatacacatgtgaactaaatgttttctgttgctgacgtcttgtaggcttctgaaatttaatgagacttttacaaggtttaccttttttcctaaagtttaatttctaaactgacttaaatgttttttgaccctttggttatatttaagaagttgacttctctaatttccttgtcacgtttatttttaaatatctttctctttaaaagttgggatactataataaatattcagcaagtattttgcatttaaagataaaatcttcttatttggattttaatactttatattaaatgcctttaagatttattaaaattttaggttaactgaactctgcttttttgtcactggattaataagcaggcttgtatctgacataatagcttaataaggcagtgacaatttaaatttgtcatgagtataaattgaaaaatcataacaatttagaaatcggagattgaatatttcatggcatttatatttagtgttttatataatgattaatgaaaagaagcaaaacttaaattttttttcaaagatggataggttcaggccagatgcagtggcttactcctgtaatcccagcactttggggaccaaggcaggaggaccattgcttgaggccacagactaggcaacatagtgagatcctgtctctacaaaaatttaaaaattagttggggctgggcgcagtggcttacgcctgtaatcctaacactttgggaggctgaggcaggtggatcacctgaagtcaggagttcaagaccagcctggccaacatggtgaaacctcgtccctactaaaaatacaaaaattagccgggcatggtggtggatgcctgtgatcccagctactcgggaggctgagacaggagaatcacttgaacccgggaggcggaggttgcagtgagccgagattgcgccactgaactccagactgggcaataagagcgaaactcaaaaaaaaaaaaaaattagttgggcatgggggtgcactcctgtagtcctagctacccaggagtcgaagtggaagaattggaggctatggwgagctatgactacaccactgtactccagcctgggtgacagagcaagaccctgtcaaaaaaataaataaatagaaatggataggttcttttagttaacactagtgaggcaagaacacagtttacagataatctaaacagtgttattccatccacacactctttttcattgtgctccctattctctgaatgccagtgtcaaatttcaagggatttaagataaggagaattagaataggaggcaactatcttaattctccatatttgcattctccccctcactgtctctgtctttctgcctgtcagccttaccgccacagtgaagtatatgcggtaatctttgttagtaaaaaggactggactatcttattagttttagggccctaatccccccaattttaatatatatgtttctctttcttcattttaaaatgtgagtcaattcaattattagtattagtcaataaaattaataacagaatgagacttttgtttcatttttctcatgtttttataaaagttaatgaatacctccgggcacggtggctcacgcctgtaatcccaacactttgggaggctgaggcaggtggatcaggaggtcaggagttcgagaccagcctgaccaacatagtgaaacccagtctactaaaaatacaaaaaaatcagctgggcatggtggcgggtgcctgtgatcccagctactcaggaggctgaggcaggagacttacttgaacctgggaggcggaggttgcagtgagtcgagatcatgccattgcactccagcccgggcaagagtgtgagactccgtctcaaaaaaaaaaaaaaaaaaaaacagtcaaggaataccactttagaatgatagtcctttgcaaaatatttctagtatcttcatttattcttgtgaaacattaaattttagtccacagtatattctagatttgaggactttgattctcatttagaattactaaaggaaaattacagcagcttactttttttgtcaacaaatatttgggcaccttctcgagtgttagataccatgctaagtgctgaggatacagatgaatgagataaagccctcactgtaaagggtatttcaatgagaagatgggagaaacaaatacagatgctccttgacttgggacagggttacataaacccatcataagttgaagatacgtttgatataccttgcctactaaacattatagcgtagcctacagttgggcaaaatcatctaacataaagcctatttgtaataatgttttgaatatctcatgtaatttattgaatactgtactgaaagtaaaaaacagaatggttgtatggtttctattcaatgcgtattgcttgcacactatcaaaaagttgaaaaattgttaagtggaaccatagttggtgaggaaccatctgtatgcaggcaggcagttactgtacagcacattaagtgttgtgaccacatagaaatatgcctagtcttaggttagaaaaggattcccagtggaaattggatcgtaagccagtgtcctaaaggatgaataggaattagccaggccaaggagaaggaggatgagaatggagggtgttccagccaaggtaatagcctgtggccagatgccaaagtatggtgcttttaaggaattgtaagaagtaaaagtaaaagaagtaaaagsctggcacattggaagtaggaggcaaaggaaaggccaggaatgctaagagatgaggtcagctggagaatctaggtcttcacaagcctcgtaggccatactagttaaggcatctggtcttgataagatttttggtcagggcataactcagtaagatttggatttagaaagaccactctgactttagtatggatggtttgtattatagttattcattccaaaggtcttggtggcctagactaaagtaatggaattggagatatgcatacatacatatatacatctatacacatactatatatatgggaagaggattagaggaggggaggaatgctaggtttcacacttgagtaactgggtagactgtagtgccattcactgagataggaagcacagaagagggaaaatggggttcagacgagcttttgattttaaggagcccatggaacacctgggtagcgtatccactgggtaaacacaaatgtggaacttaacagtaagatatgggctgcgtatgaagatttgagagtcagtcgaccaactgaagataattgaaatctaactggggatgtgaagaatcttgttctctcaaactgattaattcagtcatataaaatacgtctatttcagacttaaaccattggatattgagtttacaaagcatttgcatgaaaaagtgaatatcatcccacttattgccaaagcagacacactcatgccagaggaatgccaacagtttaaaaaacaggtgagcaggatgtgttaactcaggtttcttataccattctcataatttgcaggttttactatttttagtataatgtgttgcaatccattcctcttactgctttactgtattgtcatttatactgtattaaaaataactcttgaatcttctgccttagttttcccctcaaagctcttacccattgtcatagtatccttatcctttgtcagtttttaaatatggctgttttaagttttkttttttttttgaggcagagtctcgctgtgttgcccaggttggagtgcagtggcatgatctcggttcactgcaagctctgccttctgggttcacgccattctcctgcctcagcctcccgagtagcctggaactacaggcacccactaccatgcctgactaattttttgtatttttagtagagacagggtttcactgtgttagccaggatggtctcgatctcctgacctcgtgatccacctgcctcggcctcccaaagtgctgggattacaggtgtgagccaccacacccagccttaagtgttctttaataacacctccacacagataattttgacccatactctttagaattattttcttagaatgaattcccaggaagaggattattctttcaaaggctatgattgtttttatgggtctttatcttccccactccccattttgtcatggtgctttcccaataaaacaaattcattttataaagcgtacatctgtttcactgtgactttgccagcattgtttgttatttttattttgaaaacctttttggaataaagtggtacctaatcatttctttatcttttccttttattttccagaaaggctgaacatttaaaaacaaagtttttttttaactttttgtaaacacctgtttaaatcctttgtctttttgaccggtagtacttggtattgcccgtatttattgatatgggttctttttattctgggtatttagttgtctctcattttcacaatattttttatgttttctcttttgctgcttatatcctaattttgttttcagtgcactttatgggatatttatagtttaagttattgttcaaacccgtgaccctaagattaagagtctcatgctgtatgactgagctagctggaagaccactaaactgtttttctagactcatgtctagttgtctcaataatattgagttatacagtcacacatatttctaatttaattgtgtttggttcattatatattacattttatgaaatgtagggtcaattctggaaactttctctattccagtagtctttattttcagccagtattatattgtttaaaccacaacaactttgtataatatttaaaaatagatggtaattatctctattgtccatatagtcctgttgtaacaaaatattttgtttttcacctttttcaatatgcatttcagaataccttgaaacctgttataaaaagcctgttaaaatttgctttgaagttacgctaaattcatataaattttcagaatgttttagtacattgtttttactgtatctagtatttttctgttttacacttatccattcccatttttattttgtaatgtgctatttctaagtttcaagtactataatacatttctcttcttttattatatatttctatttggatttttactgataactttaaggtaaaaaaagatgaatatgaagtgacgtcttctttcaaattggtcacattctggtggttgtactcaggtcattttaatatacaacctctgactaaaaccactgcttttaaacctagctacaattattcgtttttctcttcattatgtatatgttgcctcatttattctgttttttttttaatatatatgtaggtacataccctaattataaaagatatgtggtcctatttttcttcagtgacagttttacttctgtttacttctatctagtatagtaaccatgtaacacaatttgttcagggtccttttatagctgctgggaagctttgccatgaaaattgcaccaaaatataagtataggcagggaagctagttttaggtatatcagccattggtttgttatgggctcaaagaaggataggtagttgaaaattatttggatgtctgtattctgtttagaatttggagtggttttggacatgataatttaatttgaactaggtcattcctgatgttattaataagttgtcttctttagttttctgcattcttattaattcttgatttctagggtgtgttttctccctgtgtcctcccctaatcttatacctgctgctcctcagtttgtgtgtatgcacatgtacatgcaaggatttttctgatgaatgtgcagggggcagtgttgtacttagtttcactttacttttgccagattctactaaaaattttaggtgagtttagccctgtttattcaactaaataagatacttggagatttatatctaaaggaagaatctcagtcattgtaaataaatgacctaaagtcattattctggaaatcaaccagagaaattcctttctggagttttacatcttttttggaactcttttgatatgatagctgtatgacttcaacacttctgaagtaattggatttggtgtttatatatcaactttacagtttaaaaaaaaaagaccagcatagtactttgattttagattacaactttgcatcattaaaaaaacagtaaaggatgtggaaacaaggagccatataggaatctaagaagcatgtaataaacataagactaatgtactaattatgtatggtgctcttttgctgactacttccattttagataaagaaatccaagaacataaagttaaaatatatgaatttccagaaacagatgatgaagaagaaaaaaaacttgttaaaaagataaaggtaggttcatccctgtacatacactaaagtaatctgaggccttaaaaacatactacagcgtccacaggaaagatcaaaagtatcggtgttttaagtagttggcttacaaaatgcctagggagatttaatgttgaattcaactttatagttaactttgaagattagctagtatatataacaagcaattgtgtaaactactgaggtgaataacacaatccttatttcaaattgtttttaattaactggctttcatattatgtaattttttccctcttaagaaacaagtgatgagaaaggagagaattccttctgttatgttttaattgccagacaaaaactgtatttcttttatctttataaaagccaaccaaaattacagctagataggaggaataagttctagtgttctgtagcattgtagggtggctgtagttaacaataatttagtctatattttcaaatagctagaagagaggattatgaatgttcccaatacagaaaaataagtgtgagttgataaatgtgctaattaccctaatttgatcattacatatttgtatacaggtatcagaataccatactctaccccacaaatatgtacaattatgtttcaattaaaaataataaaaaccaaccaaaaattcacatcaacacaattttctgtattttaatttatygtggttttctaagtactttgtccctaaaaatggtatactgaataatggcattatgtaggcaaataccttggaataatgaaatgcttatacctcgccagtgaagaatttctgcagttatataaaatagctggttagatatttccaggagccacagaactgtgaagggctacacatggatgaatacaaatccagtcacctggatttgaagttccaaagttagagcttagcaaatatactattccctgtttaggtactgttacagttggtttgtgatcaagtagtcaggctagtcattagcctccttttattttcccagatgctaatatattttttacctttttccccccaagyatgggacaactttctgtagtgatttttagtaaatartttgaccagtatatgcttgaatattcttaactttaaagagaatatttaattttatttattatttaccttggtggtaatatcatgtgatgtcaatttactaaatattggttaaatggcctataaaagctaatgcagaaactatcaaaagtaatttttttttggctaatctgttgagtcatgtaactttttttattcttgaaatttgtgaatactatagagatgtatttgaacaagaatactttgttttataggaccatttacctcttgctgtggtgggtagtaatactatcattgaagttaatggcaaaagggtcataggaaggcagtatccttggagtgttgctgaaggtaaggttttcttcagtgaatgagtttctataagatctcaaaactgtgattaaaaatttgtatttatagtaaggagtataatatgcatactgtattgatataatctagatttcaaggatagtactgatttcaggttcttgtagtctcattttcctcttaaatacattcatggttttcaaacctgtatcctactaagtcaggcaagtatgtgttaagtcctaaagttgtagtataggttgaacattcaaatttttttttttttttttgagatggagtctcactctgtcacccaggctggaatgcagtggcatgatcttggctcactgcaacctccgcctcccgagttcaaacgattcttctgcctcagcctcccaagtagctgggaatacacgtgcgtgccaccacgcctggctaatttttgtatttttagtagagacagggtttcaccatattggccaggctggtcttgaactcctgaccttgtgatccacccgcctcagcctcccaaagtactgggattacaggcgtgagccactgtgcccggcctaggttgaatattcttaaagagaaaattcaaaatatgaattgctccaaaatctaaaacgttttgagcaccggcatgccactcaaaggaaatgctcagtggagcattttgaattttggatttttggattaaggatgctcagccagtaagtataacacagatattccagaattccaaaaaaattcaaaacacttctggtcccaagcatttcaaataagggatactcaacttgccccaccctggctgacatccctgcctcattattaagtctatttctgttttcttatttgaaaacataactaaaattgaggggttctttacctggggccctaagtttgctcccagggaatctaatgaacctcctggaattaaacattttggagagaaggctagtcacttttatcagaatgtcagatgggtcatggaccctcaagaattattttaaaaatgaataagcccagttaaaacattcacagtctcctttcctcagtgcaaaagttgccttttttgacatcgcatatttagagtaaaaaaatttcattagtaagagatactctttactagttttgtaaggatttttttgttttttaacctgctatcttaaattattaagggttaagtaaggagttttaaataccaataaaatcttatttataacaccaaacctcagaagtccttcctcttggcaataggtttattgtattggtttaatctgatatttaatcttctgtattatagtaagctgaaaccaaaattgagacatgattgttttatgtttgttgctattatttttgaaktttttttttttttttttaaagacaaggtcttgctatgttgcccaactggcctcaaactcctgagctcaaagtgatcctcccacatgctcctcccacatcacatcactataggcacacaccactgcccctggtttattttgaacagttctttaatttttaggatattgtttcaagttactgtccttattgacaattttcccgccagtgacccctgtaccttgttcccagctctctctgtcatgcccagssaactttcagttgctgagttgaggctttagaacttacataccccttaaaaataggcaccagagaaattgatttgcatctctcttttgtagtttacccctctactcccaagtaatattcctgtttgtgatacattctttaaaaataaaagtaaagaatcttaaagttcttggctccctttttcattttggttaccttaagatttttttctaaagtgattctcccttcacttacaccactgaattttttaaatgtattatataataaatatattttttaccaataatgagaaaatacgtgatttcccctttcaaaatttcaaagttgtttccggagagctcattttagttaggttgacatatctgtttctgaggattaaactacagtaaggtaataatatagtacacttctctgtcatgcccttacactgagtactatgttagtgttaaatctcaaaaaaattgatctgagctgttttgcatttcccctcccttgtttttaccccccaagttcctgtgaaatattttttgaaaagactaggcttagtgaaaatataatatttgtggtctatttttttcttacagttgaaaatggtgaacattgtgattttacagttctaagaaatatgttgataaggtaagtgcaagcaatgatggaaatagcataagattttctttccctaaataagagttggatagatttactttttgccttctataaatgtagctaatttaaatttatatcttcagtctagtaatgaagtaagcactacaggtagacgattctttctccaaggttttgaagtcatcagcaaaagttacaaaataatttgtgtgtctagggatacataggaaaattagtctctttgctttatcgttatactttgtgttgaggtttaatactgaaataactatggaaagtgaaatagaagaggctctttttstttcttaatgtgaaaaacttgtgaaaactgtataagggaaggctagtttttgagtcaaaagctagaatttgaatgttaaaaggtgcacaacctggtagctggtgagtagggcatattttatgtactggaacatagtgaacaaaaccattcttcctatcagatgagaaaaaaaaaatccctacattgtgtcttgcacacctgctgaaagagaaggaaagcctatgggagcaggacattgagrccatcccgattagaggaccaggactagtaaagaggagctcttactaatgaattagaaaagcagcagcagagaggaaatcatgaagaaaaagtataataggactagagatgttagtagacaaggaacagaaagggcatcaaaatgatcctcagtgttttcatattgagacacattccttcctctccctacctcactccccatttcccacttctctctcttgcttctctatgcctttaccacatactctcttcaacctccagttttagatgtctgtcttaagttgatatctattcattttcgtacctcttacccactttcccaaaacgcaagaatctctttagctatgtaaagaaaggtagtaacataaatatggataataattggaaatcatggaataacaagaaggtaattctcacaagtgagaagtgagggggaaaatttaagagagtcaaactgctacctcaagaaatacaatagagatgagagtgaattttgaaatgaaagaaattgacatgtaattgatctttattttcaaaggagcaggtgtttttggtaggaactgcatgacagggttgattgagcagttggggttgccaggcctcaattaggggagaagagcaaaagcacgagaaggtcatcctctgggttttgagaatacaacacttcaggctctattatgaaccattcccttcctcttccattcttaaggtgtgacttcaaaaggatacatattaataatataatctgctgtgacagtatataagtagagaatgtttaataaatactaattaccattgcattcctcttatttttaaatcttctatggtacttgcccagtgcttgacatggtggcattctataactttttcttgtgtattttaaaagtatacaatcaataatttcctacatacctaaaacactgtagaggggaaagctagttactaagccagaggctactttgttgagatagagtctcgctctgttgcacaggctggagtgcagtggcacgatcttggctaactgcaatctctgcttcccggcttcaagcaattctcctgcctcagcctaccgaatagctgggattacagacatgtgccaccacacccggctaatttttgtatttttagtagagatggggtttcagcatgttggccaggctggtctcaaactcctgacctcaagtgagccaccagccttggcctcctacagtgctgggattacaggtgtgagccaccacgcccacccagcccagaggctactttgaatatttgaaagttcacagcctggcagctagtgagggtcctccctagtataagcattacagagcaaattgaccatgcctgcaggaagatttaatacagcagagcagcaagccttttatgcctaaaaattctaaagttatacattattagaaagatgtatatttaatttagctcatgtctttaagacaaaggcgtttactggatatttagtaagtacctgaaggaaggaaatacaatatcagtattgcagatgtctgtaaatcccaagtaattgaaatcttcaggtcaaaggagtagtgattgcttctaagaaagagtcaagttcaaagaagtgtttgctaatcaagagaactgacttactccaggcaaaccaaagaaggcaatggaaaggaggaaaactatacaaatattttcagggtgtggagatgggtgtttcagaaatcaaatacggaaagaaaacaaaaggagaacagaaagagttatggtacagcaatgggaaatggaagagacaaattcctgaaactgtggggaaactgtattgctaattaccaaattattttgagaatggaggagtgggwtgaatcataaaaggttaaagcatatttaattaaatggaaataaagacwtatataacctgaaaaaatcagaattatgtagtcatatagaagtgaaagtgattttagtgaaaggaaaatcatccattatctaaaacattagatgacactaacaaaaatagcttaacaattagtaaattcaccttacctttattttacacattcatgcaaacatttcatgtaagtattcttccttagaacctttaatgatttttcagggatgtagtgatgatatgtaatatataataattaaaattaggccgggcacagtggctcacacctgtactcccagcactttgggaggccaaggtgggagaattgcttgagctcaggagtttaagactggcctgagcaacatggcgaaactgcgtctctactaaaatataaaaaatagttgggcgtggtattgcattcctgtagtcccagctactcaggaggctgaggcaggaggatggtttgagcctgaaaggcagaggttgtagtgagctgagattgtaccaccacactccatccagcctgggcgacagagcaagactctgtatcaaaaaaaaagaaagaaaaaaattacataaactttttttatattggcataggtgtttattcttattattcgccacttagagaaactggtaacaataatttattccaaaaagtgtttatcatatcttagcttcaatcttgagtyaccaattttgttaaaattcctattttctgctatctgcattgggacacaaaaggtaatggtgtgttccttgtaaagggggacttatagttgaagaggtatgatgtcacctgtgacatatacttgtaccaaaaatgaatgacaaccaagaagaaaatgttcatggttggaatgctttgatgtcaaggctgggacaaaggtttccaaagcagttgaactctttgacgagagattgacaaattagcatgaactgttcagtgtcaatcaccagatatgccaggagtagggagctgtctgacttgcccgaagtggagtagtagagctttagaagtaactgttgtggctataagagaacatgaatttatcaagggacaaagtctgggagatgagatttttggaaaactcagacttaggactaaggggagtcaactatcagagaattgcatggaaatgtcagtacgatatgaatcagagtaattgaatatcacattttattcycaaagggggagattcaagaagctggattgtgaagtaacagtaaaggttttctggatgtaaggaatgataaaaacagtacaacaatacgcttttttttttgagacggagtctcactcttgtacccaggatggagtgcaatgcacgatcttggctcactgcaacctccatctcctgggttcaagcgattctcctgcctcagcctcccaagtagctgagattacaggtgtccgccaccacacccagctgatttttgtatttttagtagagatggggttccaccatgttggccagcctggtctcaaactccttgagctcaggcaatccacctacctcggcmtcccaaagttctgtgattacaggcatgagccaccacacccagccaacaatacacctttgtgtttgtctcccagaagggagttttagtaaagtggtgaagatgaatgatggcagatataggaagtttgagacagaatagatgatgggaagagggagaactgacaatacagagtattgccacaccgtgtatatccaagaacactacattggtaaaggatatccatggagcagctaagggtatcttcggtgtcttgaataattaaataatgatgacatcatcccgtatttattgtagatttatctyatrtgtattgattttatatatratagaaatgctgtaagcaaaaatttgtttaaccaaaataccacattcacctagacagtttgaagaaacagaaatttactctaaaattccctagtttgaaagcaacttgatatgtcatctgaaatgtattattatgtcttaataaaaactcatatattaccttagtaatattgctaaaaggcaattacttttagattttatgagcttcagtagtagctaatctacactctcttgtctagtatttaaatagataatataaaaatgaatactctttcatagaaaggtcatccttcagttactgctttgggagatttgtgggttttttttttttcttttttgaggattcattttctttatttaaaaaaatgtttttggccggtcgcggtggctcacgcctgtaatcccagcacttcgggatgccgaggtgggtggatcacaaggtcaagagattgagaccattctggtcaacatggtgaaaccctgtctctactaaaaataaataaattagccaggcgtggtgacacgcacctgtagtcccacctactcaggaggccgaggcaggaaatcgcttgaacccaggtggcggaggttgtagtgagccaagattgcaccactgcactccagcctggcgaaagagggacagagggagactccgtctcaaaaaaaaaaagaacaaagaaaaaaaatgttttcccctatgttattttaggaatcaagcaacatgggacgtgttgaggagacagcacaatcgggcaggaaggagggttgaagagcagacaggctcgctgggagagcagaggacagggacggggagagagggtgggatggagagggcatctgaggggagatggtcagaggtcgactgctgtctcaggccctttttcaaagtcatcccagctctttgaaaggggcttatttgccatttaagagctgttgatgtttctttaaaaatgaatctcagggtgtgtggctgggcagcaggcaccagcaccaagaggagtacaaacaaggtccctgggctgaggatcccactgtgggcaaagcctgtagtgcagagaartggcggaaaacttagggctccaagaggcagacctacagggagctggccatttgcactcacccttcctatcctaggcaaaagagggagcgagctgaggaaaagttagaactaggcttctttaaagtaacagattaagcactatttaatttctgctctagacctcaaaggagttaaaccaggcgacttccaccagattttcttgattctgtgtttattccatgagaagctgtgggctcgatcctgtacaagttctagaacttcgtggaacctgcagaacctatatgggcagttgaagtgagtggagaaaccaggaatctcaaaatatctcaatataaagacaccactccttcccctctcttcactgctcccgcaaaagcaggtcctccacgccactgctgcctacccagascgctgcactctcactaatgaggccatttctttcttgacttcgctgtgctcttggcccagtgacaacaatcagaaataatccggcgcgatcaagcccatgctaccctggacagggagtaatatttccatccaaggcctccctagtggctttccctctctgagcagcggggacatggagcagctgtcaaaacaccaagggaggcccaggaaagatgctcatctccggggaggagcggaggggacagccagcatgtcttcagccaggaaggggcatgacagcacagggcagcctgtggggggcatggcggggtgagaaatcttcctgtggctgtggaaatcttgataaggtggcgaatgtgttgtatagtggcatcctgaaggctgcctgccctcccaggcacccagggcaggcaggcaagctgcacgctgtcatcgcctaagtcagaggcatggggcacacttaattacaggggaagcagaatctgactgcactttctgtgccagctgctgagttcgtttgcatcgtcatttttttttcctttttcatacctcaatggaataaatctgaaagatgtttagagctagattttcaccagcaggtcttcagaaatgaatacagggatgaggaatttcatccatttatccttgcattggctgagcaaatatttattgagtgcctgttgtatccaggtactgtgcttggtgctaggggggttctcagatttgttttctaaggtgaaacaatcggaatttggagccaccgatattttccatgctcatcacaagggagaggggagctataatatttggacatcacaatgagataaactggaagtaatcagcccagaagacactgcctggtttctggaaggtgaagattgagatgcaggctcataggtgggaagctctgcctttgatctgggcattgtgatatttccattaatgaggcataaggtggaaaggtggtgcctgtcatctgggcttgacaatcttctcaatgccctagaagaaagtcttccctcctatggccatttctctttttctttttttctttttcttttaaattatactttaggttctagggtacatgtgcacaacgtgcaggtttgatccatatgtatacatgtgccatgttggtttgctgtacccatcaactcatcatttacattagatatttctcctaatgctatccttcccccagccctccacccctgacaggccccagtgtgtgatgttccccaccctgtgtccaagtgatcttattgttcagttcccacctatgagtaagaacatgtgatatttggttttctgtccttgtgatagtttgctgagaatgatggtttctagcttcatccatgtccctgcaaaggacatgaattcatccttttttatggctgcatagtattccatggtgtatatgtgccacattttcttaatccagtctatcgctgttggacatttgggttggttccaagtctttgctattgtgagtagtgctgcaataaacatacgtgtgcatgtgtctttacaacagcatgatttataatcctttgggtatatacccagtaatgggattgatgggtcaaatggtatttctagttctagattcttgcggaatcgccacactgtctcaatggttgaaccagtttacagtcccaccaacagtgtaaaagtgttcctattactccacatcctctccagcatctgttgtttcctgactttttaatgttcaccattctaactgacgtgagatggtatctcattgtggttttgatttgcatttccctgatgaccagtgatgatgagcattttttcatgtgtctgttggctgcacagatgtcttcttttgagaagtgtctgttcatgtcctttgcccattttttgatggagttgtttgtttttttcttgtaaatttgtttgagttctttgtagattctggatattagccctttgtcagatgggtagattgcaaaaaatttctcccattctgtaggttgcctgttcactctgatggtagtttcttttgctgtgcagaagctctttagtttaattagatcccatttgtcaattttggcttttgttgccattgcttttgttgttttagtcatgaagtccttgctatgggtctcaaaatctctatggartctaaatttggtgtcaagttagcttattttttattctactttgggtgtaaatgaaagcagatgaatgccaccttccttaacaatagtcttttgttcattttaaatctgaaatttttgttttggtaaaattttgaatttatattaaagcttttttagctttatgccccctagctattaatagaagcaaactcttgccgtttatttatgacagaacacacgcaggacttgaaagatgttactaataatgtccactacgagaactatggaatcagaaaactggcagctgtgacttatcatggagttgataacaagaagaataaagggcagctcactaagtaagtatatatttttttctccaaaaaaaggtattctttctgtagtcagtaatcatattgtttcattttcattaaatttctcctggctactcagtagaaaatttggataacattctctatgcataacagcataaatttatattgttatgctttgttaatagtagaagcttttttgaatgaaccattttgataagagttttcacttacagattgtgtggaaacaaaggacaggctttaagaaaaggaatatttagggccgggcgcagtggctcacgcctgtaatcccagcactttgggaggccgaggtgggcggatcacgaggtcaggagatcgagaccatcccggctaaaacggtgaaaccccgtctctactaaaaaaaaaaatacaaaaaattagccgggcgtagtggcgggcgcctgtggtcccagctacttgggaggctgaggcaggagaatggcgtgaacccgggaggcggagcttgcagtgagccgagatcccgccactgcactccagcctgggcgacagagcgagactccgtctcaaaaaaaaaaaaaaaaaaagaaaaggaatatttagatgaatttattcttggttaccttctctattcctattccagggagtaaattagctggagtttcagtttcttcttttggttgttagactggtgtaagtgactacgaagtgtgtagctttgccctattgagcttatatctcaagctgtggtggtttcatgttggagtcaaaaaaagagatgtgtgaggaagctggtaaccatgtctgtgccctacttttaaaaaatttgtcattattgaagatcacaattacatcatatgtcacttagcaatggggatacattctgggaaatgtgtcattgggctatttcatcattctgtaaacatgattgagtgtacctacataaacctagatggtagagccttctgcacacctaggttatgtggtctagctatcgcttgtargctgtaaacctatacagcatgttactgtactgaatgttatagacagttgtaacataatgttaagtatttgtgtatctaaacatagaaaaggtgcagtaaaaatacagtgtaaaagattacaaatggtttatctgtatagggcacttggtgtgaatggagcttgcaggactggaagttgctctggatgagtcagtgagtgagcggtgagtgaatgtgaaggcctgggacattactgtacactactgtggactttatgaacactgtacacttaggctatactaaatttactttctaaatttgtctttagtaatcttattttgctgtaacttttataataacttaaattttaaaaaactttttattcttttgtagtaacacttagcttaaaacacaaacacatgaacagatgtacaaaaatattatctttataatctttataccataagcttttttctattttaaaagttctttcttttttcacttaaaactttttttttgttaaaaacgaagacataaacttacacattagcctaggcctattcagggtcaagatcatcaaaatgctactgggcagtaggaatttttcagttcctatgggccaccatcatatatgcagtcccttgttgactgaaatatcattatgcagtgcatagctgtattacgaaaccattttaaataatgtgcatttgtagctcggtgttatctaccattagacaataatcctgacggatcaactgtataaatacataatacaagttctcaaagtagctatggtgttttccgtagtggttaacatgctttatcatggaatagaaaaatgtcccttcttaaatatttaaaatacaagattctgtttgaggtaagcctcaatacatgaacaaaaggaaggctttttatctcttttttagccaaatgtttattgaacaactttggcacaaaaatttaaggatccatcatagtgaatattgttcataaaatcctaattcactttaaactcattctcattaatgatgaacgttttaactcattaaaagaaacacatacacaaagctactgatgattttgtatattaaaagaaaatatacaaaatatacaaaaaatatatgtacttatacaatatattttttaaaacatttgttatgttgtcgatataaggaactgtttaattgttcccatgtctcaaatgtaaggctttttaaagtagtgctgttggatgcaggtaagataattcagagaaaaatagtaaactttacagtatcattwggtttttttccgcatacacaaaattctgtgtggatacgtgagttaaactatatcccaggtgaaaacataaatagtagaattctactggaaatatatctcttaaagagaggaatcataccatactttgtctatgcgaataagaaaagaaatgtttgcattgctaaaaagcaaattgccccaggagctagcataatattttattttatgttaataataagtagaacaataaacatttgagaaagatcaagccaactagggaatggctgtaattggaatagatatttgatatgatttgataaattagattgttactacttcattgaataacacatactgaatctgaaagaaatcgcttagaagtttatctattggttgtatcttacattgtcttgaaaatgttagcaatttcaaaaaatatttttgttaaatttttctttaaaagtcattaacaacttatggtgctttagctgatgtaaggtgcttttcctcatagctcagtacatatccatgaataactgaaaagaaagactaatgtttaaataagtgaagtaagcaggtatgagttaggcttcttttaatcttctttttatattgctctcatgcgactctccatagcaatgtattctttaacagtggtagtggggaggggttgagagttgcaagaattttggaatggaacatgaacctattgaaaatttatagttaaattgatctttggcaatgtatgcttcacaaagtgctaatcacactttggttttagaatataagctaaactttttaaagatgttagacattgaatagtaaaatacattcatgcgccacataacgatgttttggtcaatgactgactgtatataygacaagatcccataatattataatgtctataccatagagcctaagtgtgtagtaggttatactatctacagtcgtgtaagtacactctgtgttgttcacacaatgacaaatgaatttctctgaatgtatccccattgttaagcagtgcgtgactgtagatcaatttatcttatatttaaattttctgaggtagttttgggcaaactgtagaggctattgaaacatgaaataaaaataaaaattaaaaatatatgtgtagatgtctgaaaatgtgcctttctgttaatagccctggaacaattctattttagagggacttaaaacaagaattagatgtgttgtttaaatctgaagaatagctgaacttgtccagtcagctrtaatttgtctcaaggttagatctggagaagtggatgctgttcttagcagctatccagtaattacctgtttctgacaaagaacgtatggagccatcaaagtacttcttaattccttagagaatgtatcttgcatcccttatggagggtagtgggtggctgaaagccacagaaagggtagcctttcaaatcaaaggaaattcagcaagggtctgtaaaggaaaggggagaagagttggtcatatcagattgctgatctcttaaaggaagtgattcccaataagaggagggccatcttgttaaacttccttcttgaacttttatctgcctccttttttcttgatcttcattgtaccttttacttaaaatcacatttgattggtgactctttttcagaactgatgtgtatcattggtaccaattgtgacaatagataccttgctccaagttggggcacaccctagtctctctttcccttatgttaatttatttttctgttctccatagccttttccatcagtcatcttgggaaaactttataagtaaatgactaaaaatacaggttccaaaggcagatcctcagaattcttcatacaagagttctcattgatctaaatagaaataaagacaattttctgaaaatttcaagttgtttcaaaaaattaaacttatttatttatatcttttactctttattcaagtgtcctttcataaaattataatgatagtagttggagttttgtttatgtttggttttaatactcttacttggcaaaacaagatgttggcaaccattattacttaaaatttttggaaatttttattgatctttcaaataatttaagtgaaattcctttggaaaattttgcacatagtgacctactaaccactggagcgaaaaagtatgtaaatctacttgcttaatgtattctttaggaaagacaaccacacataatttaaatgaaacatgattgttttttattatactccaagggtgggtcacgtgtaatgcagcaaagtagaacttgactaggtcatccttatgtggtggctgtaattctcttattagtcacatgaaggggtgtggcttgcaggaattttaaccttataaagacatccctagaaggagctaaatctttggggatttagtttcatattcgggttatgttgtaaccatttacttttgcttgttttactaggcttttttcatttctttgggtttttaatttcgctgataggtttataagctttactactatatgtgtgtgtgtaagagtttcctatttaaaagcaggcaggcaatgatataacttaaatggtttttccagctgtttaataaaaggttttacttggaaaaaaatagtaaatrtgaagacaaaaagtgatttccctatattttctgccttgtaagcataattctttatttcaattttctaaaaattcataaagatgtctagaagtgaggtgttaatttacaaattaaaaatgtaaaatatttttactggtgagagacttcaaaaaattcattttaaatatgcatgaacattttttcacagtatttgagtatgttcggtcagattatttttacaagcctaaaaacttacagtatcttaactgttaaatattgcaaatttcttttagaaagtacacacatttagcaggtttagaactttgaacagactgtcagaagataattgcacagcatatttattttcatagtgatttagtgtaatgattacaaacataatttgggaaataaattagctttagcgaattttactgtaaattttttatttatggcacataccttcataatttaattgtgaaagctacgcatttgccttcaattgaagcttttagcatgctttacttttaatgtgctaaatcgctaatttttgttcctttagatatgatacagttgaaggcatgtaaggcggggaattgtttttccaaagacatagtagttttactatacagggatttttaatacttaaattttgaatttaaaagaagtgtttttttttcccttcgagatggagccctgctctgtcacccaggctggagtgyagtggcacgatcttggctcactgcaacttttgcctcctgggttcaagcaattctgctgcctcagcctcccaagtagctgggattacaggtgtgcaccagcacatctggctaatttttgtatttttagtagagatgaggtttcaccatgttgtccaggctggttttgaactcctgaccttgtgatctggmggccttggcctcccaaagtgctgggattacaggtgtgagccactgtgcctggcctaaaagaagattttgaaacatcattgcatgttttctctgcagtctcttattttccccttgtagttatttaaataataatttaggtagcaaaattacctgctccttcccaaggataaagtaaaataaacattttatagatgagttatataagtaggastagatatttaattatatctgatttctaatttaatgtatttacaatcacaattatgttgttgaataatcttaagttgcttaaatatacatattcggttacttaagatgagcaattaatcgtttttagattatttcttttctagagcctaaaaaagatttgtggggtgttaggggacagcgggaattacagactctttgaaaatgtaacaaaagctttggaccctttcactggaagaatgctggcaaacacatttggtatgctgtttcagggcagtcgctgacactgtgtgtgctcaggagatcagaggcaactatattaaaaaacacctgccattaatatgaggaatatattattaagaaggatctcatcaacttttaaccaaaaaaaaaaaaaaagatatttacacttgaaaatgtatttcagctgactccacttttttttttttttttttttggagatggaatctcgctctgttgccygggctgtagtgcagtggcatgatctccgctcactgcaagctccgcrtcccgggtgccaccacgcccagctaattttttgtatttttagcagagacgaggtttcactgtgttagscaggatggtctcggtctcctgacctcgtgatccaaccgccttggcctcccaaagtgctgggattacaggcatgagccacggtgcccggcctcagctgactcgcttttaaaatgcaggttcttgttctaagttaatatgtctggttactttcattttcagaacttttgatccattgcttaattggaaaagtatatggcaggtttacatgtagaagtaagttttctttcagtgaagaaatatccttgagttaaataacattttattctaatttacgcaattgcgaaaacagatcatcttaattaagaaaaactggtagccagtatgctgtcttttttgttttgtttttaacattttcactctagctctcttgcctgcttcctttatagaaaagattgctatgatggtcagaaatatttagccaaataaggagaaaagacaccataataagagtgtgtcaaatcagggttaaaatgaccagccttaaagttatgggtgaaatccaaggtctggtttttgtttttaagccatgagttaattcttttcttaaaattagtgtattacaataaaatttacccatttaaaatataaaccttaatggtcaaagcctgtttttatggagacaaaacaagcatgctttattaacaaattcaaagaaggatctacctcatttaatttgtcccagggtattgaataattttcagagactctcaaagcaaagagcccacttctctttctgctcctgggctgaaagcattaggtactttggtattctcttgtgtctctgtgagtaagtatattggccttaacataaatcccacctgtaaatatatctcagtgtgaaaaattttgaacccaattgtccaaagagatttgagtccatggactttaacatcaacagagtgaacatttttttttatttaactatgcttatgtgtatattctggcatttaaaaaaatatttgcttctgattatctctaaagtatgtgtgtgtgttttaaatcattgaatttaagactgaaatatttaagtggaattattattattttttttttttgagatggagtctctctctgtcacccaggctggagtgcagtggcgtgatctcggctcactgcaagttccacttcccaggttcatgccattctcctgcctcagcctcccgaatagatgggtctacaggcgcccgccaccatgcccagctaattttttgtatttttttttttcagtagagacggtatttcaccatgttagccaggatggtcttgatctcctgacctcgtgatccacccgcctcggcctcccaaagtgctgggattacaggcatgagccaccacgcccggccaagtggaatgaattttcaagagcattgaagttaccataaggggcctagaaatactctgtatacctatatagtgctctaggtattgactagtagtgatttccagcatatcagttcagttaccaaaataaataataatattgttcatttttgtggtgttagtagctgtcttagaagagattgtaacacttgaaattttggtaaaactaaaaatactctacatacattaacttcattactcattttctgtttttcatgttaaaatgttgtttaaagaacaaaattaaatgattttcttctgatattttattctgtgaatgtattttgggaatttttttccccattttccttctacactttatttggtatgtcatcatccttagatttgatatgtagtaggtttagagaatatctttgctttttacatttttttcataagttttatatatgaaatatcatggaaagaagttctaggttataaatatattaataatggcatatatacatttatagcatctctgttttcatcaaactgtttcatagttctattataatttttattcacagacatttaatgattacccttaatattcatgacaggagccctctggcacaaatggaagaagaaagaagggagcaagtagctaaaattaagaagatggagatggagatggagcaggtgtttgagatgaaggtcaaagaaaaagttcaaaaactgaaggactctgaagctgaggtaatcagtccaatattccatctcttagcagacatkgtgttcctttttaaatagtatcttcagtaaaatttatagataatataaccttcttatacatattttttaaaaattaataccctagcataacaaaatggagaaatttctacaagcaagcactgtttacaataaaataatatagacttcaatacataagtgcttggacatagtgtattaggtatgacagcataatagagtacttacaatgaattattaaagttataatgaacaagtgtgagttgggaaaaataaaattataagccattccatacaggtggcataagaacactaaaaatgagagtttggggtggatgtatgcacaaaaactagtgttaggataataataattgaccagacttatttgtgtatgaatgaaaaagagggaaataacctttactgaactaaagacatgcctggataaattacacacagttaaaggagagaaaattagggaatgtgatatttttgctaacaggttgggccttatttataatgtagtgtcaaggaaactcctagcgtcgcaacattgggcagggtaatgacaaaacatcccagcagacatatctactatcttgaaacccttctagatgtcgagttatacatttagtttctattartcaaaaagaccttggagacatttccttcattaggtggcaagaaagaaaagatggagaaaaggataaacttaatataagaatccacagagcagtagtttgatagatatctgagaatagtaggaaaaaaattgggtaatcccaaaataaatcagtgatttcagtatgaagttttctcaacataaatctgctataattaaaaattacaggccttcaggaagtgtcgagtcygggacgcccagcgcgggcccgagcagggggaagggaagcgcagctcggtccgcgtgggtggaggggacgtgaagccgccctgagatgatggttgaggaagggctctacggctcccaagctaggccaaatgcctccggcggccgcgcccrggcgccccttcccctgtggggcaaccctagcttgggacgcgtgaaccacctccgtagctgccccaccagcacccccagccgtgcgcccctgcaccatgcagctgccctgcgcatggagccgcgagggacagcaggcccagccctcagcaccacctgcctgccaggaggttcgggaaactggcgccgcagcggagagggcatctgtccaacgcctcccccggggctcagctgcgggcccccaggcataggcacccatgacccttctgtgttgtttgtctttgtatagtctgcagatgtggatcctgactcctgagagaagtagctcaccgtgacgaagctgcgtttgcttttatcgatttgcaaatcaaagaagggggacatattgggagaaggccccccaaaatctggccataaactggccacaaaactggccataaaatctctgcagcactgtgacatgctcatgatggccataacgcccacgctggaaggttttgggtttaccggaatgaaggcaaggaacacctggcctgcccagggcagaaaaccacttaaaggcattcttaaaccacaaacagtagcatgagcgatctgtgccttaagggcatgttcctgctgcagataactagccagacccacccctttatttcaggccatcccttcatttcccataagggatacttttagttaattgaatatctatagaaacaatgctaatgactggtttgctgttaataaataagtgggtaaatctctgttcggggctctcagctctgaaggctgtgagacccctgatttcccactttacacctctatatttctgtgtgtgtgtctttaattcctctagcaccactgggttagggtctccccaactgagctggtctcggcacttctctttgccttaaaaacaggtacagcggaccttcctggcatcagaaaaaggcctccagaaaaagagacacaggtactagcaattccaaattatccagagcccttctaagttgtaagatctgaaagaaatgtctgccatctatattctcagccacacttagtttcttaatctgcaagatggaattaataatagtacttactttatgatgctgttgcagaaattcactgagttgctacacgccaaacactgagaacccagctgggcatataataagcattctattgcatggcattattgccatcatttttacttctattactgctactgcttgtaactgcttgtaactgtttgtgcttttttgatatgaaagtccaccatcagggagcactgtagtggaaaakgtattaggccaggcatagcctttagttctctggccttgggtccttcatctgtgatattcagttaacaatacctagccagtaggggtgttaaagattaaataaatgtgagaatgtgcctgttgcttaatcttcctcaaagggttatggactctcagagccagaagaaggtcatctctcctttgctcctcgtatgctgggatctgccacatcaatggcaacmgctgggcctccagaatttgctccagggtgtttggaagtcctgacaccctcctgatcttctctgtaacatgcacactttggcctgtgtcagtttgctggaaccacatcaggccggccctcttcctgggacaaaattctttctttttctttctttctttttctttctctttctttctttttctttctctttctttctcttttcccttccttccttccttccttccttccttccttccttccttcccttttcttttcttttctttctactgtgacataatcttggctcactgcaatctctctctcctgggttcaagtgattctactgcctcagcctccaaagtagctgggattacaggtttgcaccaccatgcccggctaattttttgtatttttagtagagacagtgtttcaccatgttggccaggctggtctccatcacctgatctcaggtgatccacccacctcagcctcccaaagtgctgggactacaggcatgagccaccacgcctggccgagagacagttaagttatactttaaatgataataggcctcccccaaaactcagctgcttttgtaaagctaatgggaggccatcaggctgggggcaaggaggagagcccggatcctgctaaggtgcagacataaacgagtatcagccattattctggaggttataagatatgcaccttccccaattacccctgcaatcacaccattattgtagattggcccttagagtatcttttcaggttttttggcatgtctgacactcatggctctacttggacccaccaaccctgctcctatggctccacccagaagccattcagcctagaggacagctctgaccccccctgtgatttcatacaatcagcagcaagtaactgttacctcaccatccccaccccttctgccagactgcctttgaaaaacctctaacctgtgagcacgagatgattccagaacaaactctgtctcccatgtggcatgaccagccttgggtctcttaaactttttctccactataatgccatggtctttatgcagcaggcaggaagaattcaggtggttataattccgtatgtgctttttgaacatttttctactgggctattgctctcttcataatgatttttttaacttctctctataaggaactgatttcatctgaaattgaagagacaatcagagaaaaactatagaccactcatgatggttgttatatgtgcttggctgggccatgggtcccagtgtttggtgaaacacagcagcagatgtccctgtgagtagatgttgctttgaaggtatcttttagatgtgatgaacatttgtcatcagtagactttgagtaaggcagatagcccgtcacaatgtggatgggccttatccaattagttgaaggcctttgaaaaaagactgagatcccaaacgaagaaggaattctgcctccagacagccttccaactcaagtagcaacattacctcctccctgcggctctagcctgctggcctttcctatagacttcagacttgccagccccacaatcatgtaagccaattccttaaaataaattctctgtcctgtttttgccccctctctctttctgacagcacacacatgccctcttggttctgtttctttgaagaaccccaggaaaacacacaaaggaaaaacaactcgatagacagaagattcttcaatgacaacaatggaagccatcttcaccattcaactaaacttgaatgggatattatcaaacttaaaaaaaaattatcaactgatcgtgtaatcagtttcatcttttaagacaggaaatgaaataaagtatttacagatgaatgtaaaatgaacttatcattgcatcctgagctacagtaacttctgagagaccaaaaaagcaatactgtctcagcaagatattctaagatacaagaaaggctagtaaaatggagagtctatattacattttaaatattatctaaaatgtaattgtgagattcaaaaaggcacaagatgaaaacactggataggaatagcatataatgggctgggctcgggggcccacttgtaatcccagcactttgggaggccgaggcaggtggatcacctgagctcaggagttccagaccagcctggccaacatggtgaaaccccgtctctactgaacatacaaaaatcagcctggcgtggtggcatgcacctgtaatcccagctacttgggaggctgaggcaggagaatggcttgaacccaggacgcggaggttgtagtgagctgagattgcgccactgcactccagcgtgggcaacagagccagactctgtctaaaagaaagaagaagaagaagaatagtatgtaatggggggataacagttcatgtgtggtttagtctaaatggggtcacgtagtatttaatactttgaataataaaacttcccccagaagttatgtgaaacaggcaggaatgtcttcaaaacatccacataaccatttatttttcaactgaaatggccacagagtttagtcaagcaattttttycctttatttttgttaaataagattccagaaagtatagtgcaaacactcagtagaaaagttgcaattaagaaatgtacattcacatttaacatttcagtccattcactttttttaaaataaaaataggacaaattattcaattacttgtctcaatttaacaatcttgaaaaagactggaaggtaccctacagtgttcagttgacataaaaatagacccgtattgatcatacaaatctatcatgagaagttacccagtgagagtgagttattgtaattctgaatgtactcatcgtgtttctcacttctacagaagcatcctcagtgagttgtattgtgcgagaaaatgacacccttgcccacatcactctccattccatagagggacacaaccctatctagccaaacccagaagaacgcaggcgcttacacaacttttctcggacagtcgagaaaatccaaaagtgggctttgggcttaccttaaataggaatggaatgtaccactacgagatggtcatcataataaggacattgttgtttgagcggggggtgtgcaatcagtataaatgaggatggcggaggaagaggagtggtgactgaagggaggtggtgcataataagtgcacgagctacacaaagctcgagctacacaaagctcaggctccacgggcctcgccttggctcccagggatgctctgcagccagcgggcggatgacctgaggtcgggcctgggcctgtcccttkgtgcatgcggcgtgatttcaaattcaaactaagttccacaccattaggagttttcacggcatgcagttccagagtgcaaatggcttgcatatgtgcagtttttacaggtggaaggcaagaccatacatctctcccacactgggcgtgcctcctagtggacagttgtatgcaagaggcggtgatgggctccctcaggatcccccaatgtgggaatggtcccctgagacttgtgcttcgtgtgcctggggcccagagttgggtggggggttgctggtgggaggtgagaaacaagttctggctgccgtcgggccagcttcccactgccctcacctgggaggtggatgcccacaggcaggatgctctgggctactgttgcacagtcctgcacgagatatttattcagcccacaagatttaatagatctcttgggagttcatctaggctattatgtctgtttaaacattaattctcaataagtgcctgaaagctcttttgaaagcaacctatttgaaggtctgaaccgcccggtaccagcaggaaccaatgcccaggagagggtcagagcacatgtgctctggtggttgtcaaatctctcaccatccatcataagccctctgaactcctgctgaaatcggccctttgaacatcctctaacccctgggaaggcacccggacccacctttacctcaccagcagcatatgacaataacattaaatggctctacagcagaggaagatgaaagtaaaagtagcaaatacaaccaatggccttcccatagctcacagaactcctgagcagaagctgagcagggaagaaatggtgtgtagtttcagggtgtctggaggtgccaccatttctccccatttgatgtcagagaggctttacaaaaaaataaggcaacagctcttaaggagattctgtatatttgaaattagacgcaatgacaggtttcgctcaaatatagttttagaatatagtctgatatgacaaagtagggatttttaaagcctaacattttatttccttgctggggatcagttagtaaagaaggaggaattcctcttacccaagaggaattgcattgctttaatttagcaatgtgaggtaaggcctgccagtgccagggaggacttagg

SEQ ID NO: 94519 - DNA, 29462 bp, Homo sapiens
actctacctcaaaccaataaatagataaataaatttcttatatcttgctgatacgacaaaagtatccctattacgaatacataaagacaataagaaagtgcaattaaaaccaatagaaagtgggaaaagtcaggaatttactttctgtagaaaggagtcacatagaggcaagcatcattgataatgaagacattaaaataaaggtcataagataaaattttatgaccatttgatggagaaaattaaaacatttgaaaacatcagatgttgaagtaaatgctgaggaatgtacaagtatccattgatacaaccacactggcaaagagtttattactgtatgattttataaagatgaggaattacatgctctataccttaaaatactgcttccacttctttatacaagaacaattctttcacgcattaactcagagatttatacaagtatattcttatcagctatccacagtagcagaaattaagaaacatagaggccatcaagaggagattgttacactcaaataatgtgatttgctacatttatccaagtgaaagaattacaaagcaagtactctaatataaataaatatttatgtacataacattaagtataatattaacccactggaaataaaatcagcatataaactcatataaatataacataaaatataatatatatacatataccctataaacaaatacataaaaattatatagacaaattcctggacacatacaccctcctaagactgaaccaggaacaaaatgaatccctgcatagatcaataacaagttcctaaacaactgaggcagtaataaacacctaccaaccaaaaaaaaaaaaaaaaagcccacaaccagagggatttatagctgaattttaccagacgtacaaagaggagttggtaccatttcttctgaaactatttcaaacaattgataagcagagattcctccataactcgttttatgaggccagcatcattctgataccaaaacacagcagaggtacaacaacaacaacaaatttaggccaatatctttgacgaacatcgatgtgaaaagcctcaataaaatactggcaaactgaatgcagcagcacatcaaaaagcttatccaccatgatcaagttggcttcatccccaggatgcaaggctggttcaacataggcaaatcaataaacataatctattacataaacagaaaccacattattatctcaacaggttcacaaaaggcctttgataacattcaacaaccttcaagtttaaaagtctcaataaactaggtattgatagaagatatttcaaaaaaataagagccatttatgacaaagccacagccaatatcatactgaatgagcaaaagctggaagaattcctcttgaaaaccatcactagacaagaatgccctctctcactactccttttcaacatagtattggaatttctggccaggccaatcaggtaagagaaataaaatgtattcagataggaatataggaagacaaaccgtctctgtttgcagatgacactatcctgtatctagaaaatcccttcatctcagcccaaaagcttaagctgataagcaaattcagcagtctcagaatacaaaatcaatgccagaaatcacaagcattcttatacatcaacaacagacaagtggagagccaaatcataaatgaacttccaataacaattactacaaagaaaataaaatacctaggaatacagctaacaagaaaagtgaaggacctcttcaaggagaaccacaaagcattgctcaagaaaatcaaagcaggcacaaacaaatggaaaaacatttcatattcatggatagaaagaatcaatatcatgaaaatggccatattgcccaaagtaatttataaattcaatgctattaccattaaactaccagtgatgttcttcagagaattagaaaaaaacaactgctttaaaattaatatggaataaaaaaacagcctgtgtagccaagacaatcttaagcaaaaagcacaaagctggaggcatcatgctacctgaaatcaaactatactacaaggttacagtaaccataagaacatgatactggtacaaaaacagacatatagaccaaaggaacaatacagaactgagaagtaagactgcacatctacaaccatctgatctttgacaaacctgacaaaaacaagctgtattattccattttaacactgctgataaagacatatatgagactaggtaattcctaaagaaaaagaggtttaatggactcacagttccacgtggctggggagccctcacgatcatggtggaagatgaaaggcaagtcttgcatggcagcagacaagaggaatcaaagagaaccaagtgaaagggtttttcccttatgaaaccatcagatctcgtcggatttattcactaccacaagaacattatagggcataccacctccattattcaattatcttccaccggtacctcccacaacatgtggtaattatgggaactacaattcaagatgagattggtggggagtccccacagccaaaccatatcacaatcaatggggaaaggattacctatttaataaatggtgctgggagaactgtctagccatatgcagaaaattgaaactggaccccttccttacactttatacaaaaattaactcaagatgaattaaagacttaaatataaaaccccaaactataaaaaccctagaagaaaaatctaggcaataccattatggacataggcatgtgcaaaatttcatgatgaaaacattaaaagcaattgtggcaaaagcaaaagttgacatatagaatataattaaactaaagagcttctgcacagccaaagaaactatcatcaaaacaaacagacaacctatagaatgggataaaaattttgccatgtatccatctgacaaagatctaatatccagaatctacaagatacttaaacaaatttacaaggaataaaatgaataactccattaaaaagtgggcaaaggacatgagcaaacacttctcaacagaaaacttgcatgaggccagcaaacatatgaaaaaataacacattaaagaaatgcaaatcaaacaacaatgagataccatctcatgccagacagaatgtgatttttaaatagtcaagaaacaatagatgctggtgaagttgtggagaaatagcaacatttttacactcttggtgggaatgcaaattagtttaaccattgtggaagacagtgtgttgattcctcagagacctagaaccagaaataccatttgacctagcaatcccattactgagcatatacccaaagaaatatatcattttatataaagatacatacatgcatatgttcactgcaacactattcacaatagtaaagacatggaatcaacccaaatgcccatcaatgatagatcggataaagaaaatgtggtacatatacaccatggaatactatgcagccatataaataaatgagagcatgtcctttacagggatatggatggatccagaagccattatcctcagtaaactaactcaggaacaacaaaccaaacaccaagagttctcacttacaagtgggagctgaacaatgagaacacatggacacatggaggataacaacacacactggggcctgtcatgggagactgggaggtgggtgagcatcaggaaaaatagctaatgcgtgctgggcttaatacctaggtgatggggtgataggtgcagcaaaccaccatggcacatgcctacctatgtaacaaacctgcacatcctgcacttgtatctctgaacttaaaataaaaaaataaaaagactgaaccaaaatttagggtagcatttacctcaaccaaagaaaatctttaatataaaatgaggtagaatataaaaacaaatataacttcatacgtatgttyatattttcatgccataatggtagtttgggagggatgtttagttcaatattaatgagtctatgatataaaataaagtataaacatacatagataatgtatgaaagaataaagttttagaatccctggcctttgaactagtaatattttttatattttaaaagttttataaaaaacaagaaatgtatggctagggtatatgtgacccacaatacatagattattttatcttttacaaaaatacaaaaaaaaaactttgccaaactcttttctcaacatgaagataacttactcactggaaattacttttacatttttcttcatcctttcatagatattttaggtatttgcaaaaatacatgtatatttattcacttttaataataatgtgttggatattatagttgtattctgaacagtactttttaacaacaatatattttgcaatatttcaaatcattgtatatgaaagtgactaattctttataataattttttgtatttcaatacataaatacaatatgattttttaacattgttctttcttaaaggacatttagattgatttccatgtttcggtgttttaaaacaatgctctttaactatctctcacaggtgagatattgtaaatacaaacacttctggtacaagggttatgtgcatgtctaaattagacacatattagcacactgcatttttagaggctatacaaatttgcacttcactggcaatgaaaaataatgactatttacactattttatgactagtgtactcgttttcagtaatcatctccaatctgtttggcaaagataaaaattccttgtttttttttttaattgacaatcctcaatgaaaatagtttagattggtgctgtttgtaaaaagcagttcttctggtttggatttgttttgatcatctacttctataggaatgtgtctgatttaactttgtttctaccttttaaggtaagatttggtaaattatgtacttttagaaaacagatttcattgaggtgatctacttcgtttctatagcattatcaaactaatatgtcatggccaagtgtggtggctcatgcctgcaatccaagaactttggaaggattcttgagcccacgagttcaacaccaaccttggcatcatagcaatacacagtttctacagaaaaataagctgtcatggtgacctgtgcctggagtaccagctgaggtgggaggattgcttgagccctggaggtcgaggatgcagtgagccatagtcatgacactgcagaccagcctgggcaacgtagtggtgccctgtccaaaataatagtaataataataacaataatgtatcacaaccttttaaatttcctccttattttgttttgtaatcaattattacacattagcaatatgaatttttctcaatatgtaaattttaatctatttttaataatcattatttggattcttattctaatttctaatttattaacttattatttttatttttattagttatgctgttttgttttccttagtattattgtgtttttctaaagaatttaattgattgcatgaatcatgtaattttcttcccagtttattcagttaatatttaatagtgtaacttttgctttcttttgctaacttttgctgttttttaacccatttatatatttttacgtgcataatttatttttatgttctcacttatgatggagtaactggtatctgaatgaccctcttgggaaaataatttataaaattagagaaattatatttgaaaacatatttcagggattatacatcagttatctacctgtggtctctgtgagaagggaaaaatcacaagatcaactccatattttctctggctcttagcctagggactcttcctcaaccatatgcagcaagctgattccaataagagcatgatagacctgctgaagtaaggagacaaaaaaacttgtgacaactgaagcagctagaatgcacagaatgcagtgttgaaggtgaaaagatatggacaggaggcaatctaggggcccctgcaactctgcagcttaggaccaaactgaacatgcatgcacaaagcgagattatccaagaaataccagagaatggcaactctgtagttggaaaccgaacagaaacgctacaggttgggcagtatagggttagactagtgcctaaaagtatgggacatgaaaattttggcttgccataagatctccttaatatccattgctgactttgcaaataaatttgctttgagtaaaacagtgccatataagtaaaatatgctctagatattaagcaaaatgtttttaagtgatctcggtttcaaagaataaatcaaaattagtctgttctcacactgctaataaaggcatatcccaaactcggtaatttataaaggaaagagatttaatggactcacagtttcacattgctagagaggcctcacaattatggcagaagtcaaaggagaaagaaaggcacatcttacatggcaggaggcaagagagcttgtgcagaggaactctcatttataaaacgatcaggtataatgagacttatttattaccctgagaatagtatgggagaaactgcccctatgattcaattatttctgcctggccccacccttgacatgtggggattattacaattcaatttgagatttgggtggggacacagctaaaccatatcaacactgaataatgaaaatacctcatatcaaaatgtaggaaattcggctaaaacagcattcaaagaaaaatttgtagctttaagtatttgtagtaaaaaaaaaaagaagaaaagtaaaaaaaatcatctaacaacagaaaaattagaaaagcaacttagtgaataagtaagcaagtaaataagcagatataaataaatgctaaaaataaagaaaaaaatgaaaaacaaaacgaactaagccaaaaatagtcttttgaaaagatgaataacatttacaaccaaatatacagactgatgggagaaatcaaaaggaaatgtaagggttactaaaattaggaattaaagggagaatatctctgtagagcattgaaatattaaaatattaactgaggataatatagttagctttatatcactaacttcaaaaaaaagctcagaataattcctcctcaatgatacattaaaacatttgacaaaattgartatatccattcatgataaaaaactctcacaacagtaggtattgaagaaaataccatcaaacttttaaaggctatctcaaaaaccgtatggcaaatatcaaccttaatagagaaaaagtgaataactttttcccaagatcataagctagcaaaaaatgctctctctcttcaaggatatccaatcatgcaagtaggtttacttactgtaccatactgtagagaagggtctaggtagtctattaaagttaaaaagaaattatacatattggaaaatataaacgtaaaattttctttatctcagatgacatggctgtttttgtagaaatgaaaagcaacaatcataactgtattcgtctgttctcatgctgcaaataaaaacatacccaagactgggtaatttaaaaaggaaagaggtttaattgactcaccattccacatgaatggggaagcctcagaatcatggtggaagccaaaggctcatattacatggtggcaggcaagagagcatatgcgggggaactttttttttataaaccatctgatctcatgagacttattcatattatgagaacagcatgggaaaagcctgcctccatgtttcaattacctcctaccaggtccctcccatgacacatggggaacatgggagctacaattcaatgtcagatttgggtggggacacagagccaaaccatttctataaccaaaacaagaaaattgctagaatgaytaagcagtttaataaaatcacaagttacaaactgaatatagagmatcaattgcatgtttctacagtagcagcaaattattggaaaataaagtttaaaactgccatttacaataacattaaaatcaaaatgtttcagaacacatttaatgaagtatgtataaacctctaaaatggaaactgcaaagtatgttaagggaagtaaataatatctaaataaatagaagtggcagctagattctaggctgaccctcaagattcatacctactgatatatatgccctgtgtaatccccatcccataaatatgggcaggatctgggaatatgatgggttattactcctgtgggaagatcattatatatggtcacaggcaaatgtgaaggacttttgtagacgtaaggtcccaaatcaggtgactttgactcattaaaaaggaagattggctttcctagttttttctgacttaaacagtgtaaagtatttaaaagagagattagacactttctaaagaaagagatgctctccttctggtctttaaaaagcaaagagccatgctgtaaactacccgtggatctgggaagcctcccagtaccaaaggcctcaatccaatcacaaccaggaactgaattttgccaacaactggaatgatctgaacaagtcccaagctcctcgtgagaacaccatctgcccaacattttgatctcagcctagttaagactctgagcagaagacccagataagtcatgctagggtttctgaatcataaaaactgtgagataataaacatatattgccttaaggcagtaaaactgtgaaaatttttatgtattacaatacaaactaataaaatagagatgtgtcacattcacagaatgaaagacttcatattattataatttccaatttccaaaaatcaatatgtaaattaaggcaatcctaattaaatttcaaaaggtttattctaaaaggtgacaaattggactaaaatattttaggaaatgcaaaaagcctaacatttctgaaatcatgtttgaaaaagaacatacaaaattgagggattcaccttttcgaagktcacaacttaccataaatctagagcagttatcataatatctcattctcacatgagacataaataaatcattgcataaattaataaatacagaaatacaatcccaaagacaccactgattaactttcaacagaggtgccaaagtaattcaatgtaccttgataccttaaagatagcaatgtacctaattaggtaggtgaagattgaagtttatttttccacacaagtgtctacctttaaacaatgtggaacaaagtagatatttgtgcgaaaagatgaactttaatcttcacctatggtgatacacaaaaataattgaaaattgtagacataaattttaaaaccacaaatattaaacacctacatgacaacataggagaaaaatctatgcaatcttggtaaaggtaaaagtttcttaaatagcatacaaaaagtattaccaaaaagggcaattttgataaattgtactttatcaaaataaaactttttgctcttcagaagataccataaaaaataaaaaaaaacatgaatggatgagtcatagtctaggagaaaatatataacacagtacttccatctacaatattcaaaaacctcccacaaattaaggagattaaaaaatcctatgtaatgtaaagcacttgcataaacatgtcccaaaaataatatgtaactggaaaatatttacctgaagagaacaatgacattattgatcaccaaaacactgcaaactaacatccttggaatatatcacttatattaactggtatgctaaagttaaaagggtatcaactgcaacagttcataaggatgtagaacacagagctctcacacattccagagagtgtcaataggtaaatttatttttatttttctctttggaaaactggctgactctctctttaaaaagtaagcctaaacttatcatatgacacaggagtcaaacatctaggtatttttccaaggaaaatgaatatatatgctcataagatcacttataaatgaatgtttggagcccctttaatcataataccaaacaccatatacagactcatgtcctacagtccwtccaaagataaatgaataaataattttggtataatcccccaataatatgtaactaagaagaaatgaaacatagaaatactgatacccatgataatatggatgaattttacagacattatgttgagaggaagaagccaggtatataaaggtatttgttgtttgctttcatttttattaaattctaggtaaaatcaataattagggatccatcgcccaagatggagtacacaggtgcgatcttggctcattgcaacctccaccttctgggttcaagtgattctcctgcctcagccttctgagtagctgggagtataggtccccaccaccatgcctggctaatttttgtatttatagtagaggcggggttttgccatgtgggccaggctggtctcgaactcctgacctcaaatgatcgacccacctcggcctcccaaagtgctgggattacaggcatgagccattgtgcccagcctaacacacacacacacacacacacacacacaaacttgacttaataatatctgcagtgggttcatttttgctggctttattttccctaatttgtcaatacctgattaatttttgaactcatatatagttttaacaacctgtaaggcaatcatttctcatttggaccttgtgataagtaaatcttcaaatgccttaggagtttataagtcaagacaaatactgctacatgcttcttgagttagctatcctgttataatcgcattctcagttgattttttacaccatagcagaacttataagrttcttcgtccatgtgaaagttttgctgccacagctttaaatttgttcagcttatactgaagtttttcagtttattcaatgttaaaaaaatattagtcattatgtcagatttaaaattatttatatttatgcattttaactaaaattatcattttgttgaacgaatcaaatatgaaatattgaatttgctgcacgtttaccaaatgaatgttactatcatttgactcactgtatttacaatatgagatatttatttttttcttatagtaaatgagtcagtttttcttgcttatattcttaaaaacacctggaattttaaaagttattttaaaaagcaggatcaatattcatataatttcatatacccatacataaattcttgctcataataaatgaaatcttacagttgaaagtaaatttaaaaatcatcaaataacagctggtgaaattgaaacactggcttaatatataaatcaaacacttatcagaaaacatttgcaaactcaaggtaggatagtgtgaaggaaatattttttaaaataggactccatgtgaattttagatagattttttttctaattatgtgaagaataccactggtagttttataggagtagaattaaatctataaatgaactaaatctataaatctataaaatgatgtcttttggcctaggaacagagcycctcttaaagacttgctggaaaaagctagagtgaaattctattttgctccatctctcttaccttctgacattctctcagtggctgagagaatctatctttgtcctatttgtttctgtcatatagatcaatactctacaacagaaagcagagtggaaattttaaaaaatacatcagttgtcttagagaggatcatttttcttaatgacatataacgttgcatacaaaatagcaaaacaaattattttgagaacacataaaaaatttaatttgttctaattgactatatgttagatcacaaaatacttttaaattcacaataaaatcatacatttactcatgaatttactgatacatcaaatacttaacaactctccactctataccaaatatgactttagtccaaggggatgaaacagggagtgaactccctctgactacaaagttgcttctctttagcttataccctgtatggagagacagagagtgaaatagctaatctacagaagatcacttagagatagatgtgggaaaaattggagagtgtaaagggatttcaagagacagggtatgatgtgggggatctatgtttgttagattgactragggatgcctctctgattagatggcccactaacagtgtattaattccccagccctgccataacaaattacgacaactaagttgtttaaataaacagaaattcatcatcttccagtcctggaagctagaaattaaaaacagaggtttcagcagggtggtactccctttgaaactctgggtggaatgatcttttgcctcttcctagcttgctggtttgggatgtcagtccttggttggaagatgatacaccaattcagtcttttactttgttgtcacatcgtgttctctgtgtgtgtctctatctgctctcatagtattcccctcctgtgtcctcacaatatctttgtataaggaaaccagtcatattcgatcaagagcccaccctgctccattatgactgcatcttaactaattacacctacaatgaccgtatttcctataaggytatattctgagatactaggggctagaaatttggggggtagccacaattcaaatcataacaaacagtaagcttaagtacagcaggaactgagccatgagaggttctgcaaaaagagcatgacaggttgatattattgctcctaatgcaaaaactcacttggggtgtacatgtagacttaccactcattatagttttcccaaaatagttctagtttattgctgtggtctcagtataaatttaatagatatcgtttaacaaaaaactgcaggcaccctcattggacaagaaattacatgttcttcctatgtgtaaaaaacacaagaagttcagtgtcactgtaacagagtgagtatggaggagattattttacagagatggtgattcaaccatctctgtaaatatgtatatgattttgttttcccaggtaaggtctttgcatataattttgcatctcttgagaggggtttttagcaaaaaggtaaaatgatatatttattgaattataacacatggagaaaatctgcaaaaatcttacctatagcttaacaaatggtaaaaaataaaaagtgaatatattcaggtaatcattactaagtaatggttagtaatgagtaargtcaagagatagagcattactagcaattttgaggtttctccatcatcccttcctaaatatttctccccttcctcacataaacaccaaataatttataaattttaaacacatggaaccaaactgtgggtatcactttgtgtttggataatttacagtcaatatgattgctagattaatgcatattgttataatttatgtatttcactgttgatgagaaattgtattgtttctaattttcaacttttatatggcaatgtaaataatcttgtatatacatttggtgtaaatcagaagtgaaatttctgagtcatagggtatgtttagctttaatgaatgccaatcagttttttgaagtggctgcatcaatgtatacactccatacagtgtaaagtagttttgtggttttatattttcacaaaaattagtattgccatctgtattgttttatttcagatattctgatatttatgaattgtyatcttataatgatcttaatttgtatttgtgttttcataattataagatgtttgattagtgatgtttgattttgtttagtgaacatttggcctggctgatttgggaactgttacctcaatgttttgttttgttttgtttgtttgttttttcagtgtaaagaggttgtttttaattgtgtatatgtaacattagacaaaactatttaaagtcaataaatttttattcagggaattccatgttgtgatttcttccactgtccattaaggtcactttagatcctctaaagagctggagtcaaaagatttatcttcatgttagccatttttaatgaaatgatgcttattttaatccagttgtccttttcagcccataattcttttattttggtttctgtcatctccttttgatatggatatactgatgaagacttcaaaattyaccaagaatctttgggatctaatttcttcaaccaatttactttagggtcctttttactgctggtggtggatctgcttggttctcaatttggcaacctctcttaacatgtatgagttcaaatcatattcattcctaaatgatcacactcaagaatagtacagatgtgtggaagatgccaatccctttaactccagacatcatgttctcaagataaaagcctttaaacaaaaagccatcatatgtatggtcaacatggaactggaatgaaaaattaatactgctgaggatttccctcatattccatgctgtttaactatctattctactatcctagaatcaatatttttttattaagagacagggtctgtctttgttacccaggctggagtacagtggtaccatcaatgcttagtgcagcctccagctcctgtgctcaatccttttgcctcaacctcagcttcctgagtagctgcaactacaggcacatgtcccaatacccagctaatttttaaatttttgtggagatgaggtgtttgttactatcttgcccaggctggtcttgaactcctggttttaagcaatactcccactttggtgtggggattgcaggcttgagccactgtgcctggcctggaaacaacctttatggctgtcaatactcccatcagttaactgtctcaggtgtcataatatcccttcttacatgtatcaaaactcatactgaacaataagttctgggttgcagaagaggatttatgttttgcacctgtccgtaagtctttgtccacaagacctcaatgtttttgactatcattgtagtgaatactctattatttagttagtttctattagtaactgttactgtgtacatgtgaatcctttattggaaataattgttagagtagcttttccaactctgtttcttgcccattaactttatgtcctttaaaattttcctatttcaggccaggcgtggtggctcacacctgtcatcccagcactttgggaggctgaggcgggtggatcacgaggtcaggagattgagaccatcctggctaacatggtgaaaccccgtctctactaaaaatacaaaaaaattagttgggcgtggtggcgggcgcctgtagtcccagctactcgggaggctgaggcaggagaatggcgtgaacctgggaggcagaccttgcagtgagccgaggtagtgccactacactcgagcctgggcaacagagcaagactctgtctcaaaaataaataaataataaaataaaataaaattttcctatttcaaaatttaaatatattctcttctgctatcttgtagaggtcttattgtaatttccatgtttacttctatcacagtaaagggtgttataacaaattatcatagactgggtggcttttataataaacatttatttttcacagttctggaagctgaaagtccaagatcagtgccccagcataattgagttctggcgagggccctctgtcaggttgcagccagctcactttctttctttttctttctttcttttttttttttttttttaatcctcacgtcacagaaagatgacaggctagcgctctggcctctttttttaagggcactaattgcattcattaagggtccacccttatggcctaattaccacccaaaggatccagctccaaagaggatcatattgaggattagattttaatattgaatttttggggatacacaatattcagtctgtaactatatatatattatactgtttatactgtaggattgtttatactgtaagagaaaatttaagtttattttattatagacatcaaatagtctagtatactaaaagtttgtagtttcaactgtgtcataaatcatgtatcttttttttgtgaaagtgtgtactcactggtttattctactgctctgtctactatgataccaataaaacatcctctttgtgtatttttaaaataattttaaagcagatttattggagaaaaattcaaacattttagaatgtagctgtttaaagtgaatagtcagtagtttttagtacaatcatagagttgggaaaccatcactacaataaattttaaaacatttttattcacacacacaaattccattagcagtcactaatcattcaccactaattgtgcgttragaattttagcaacaatattcctaataaatattggtccgtagttttctttgcttgtaatgactttgtccaattttgttatcaggttaatattggcttctttaagtgaattgggaagttttccctttccttctatactttggaaatgtttgtaaatatatgaaattagttatttaaatgttctgtggaattcaccaccgaagccaccygaaccttggatttttcttttgggtrgtttgtaaattgcaaatgcaacgaattttacatataaaatatatmtactttttaattcattcttgttagttcatgcattttaggaatatgaccatttcatctatgttatctaatttgttagcatataattgtttatagaattcccttataataattttcaattttttaagtttattagtaatttcatttctgatgttaatgatttgattttgacttttttctgggtcagtatagctatagattagccaattttgttgatttttttcaaagaagaaaacttttgattcatatatttgattgcttgtctattctctattttattaattttcacactgttattcccctgcttccatgtgctttggctacagtctgtytgtcttcaaatggtgccataagttggaaagttaggttattgatttgagtttgctcttctcttttagtgtagatatttacagctataaattaatgctgtaaacactacttttattgtagtccgtaaatttgggcatgttgtgcccttactttcatttatctcaaagtacatttatctagtttgatttatttcaaaaaaactttctagtttctcttttgacttttccttgaattcattggtttttagaagtgcattcttcaatttccaaatatttgtgattttaccagttttgttctgttaatttgtaattccattttgtgattgaagaacatactctacatgattttgacccttttaaatatatttagatatgtgttttgatagatatgttagatatgttttaaacacatttagatacgtgttttgtctagggtggagaatgtaccatgtgcatttgagaagattatgtattctgctgttattgagtagtgtgttctatagaagtttgttaggtgaggttgatttatagtattgttcaagtcttttattttcttgtcaattgcctgcctaattgttatacccattattaaaaaggaagtatttaaggctttatattgttgttgaattgtccatttctttcttcaattcttctagtttctgtttcatgcattttggaacactgttgtatttgtgtatatttttataattctyatatgcttgtgatggattggcttttatcattataaattgtctttatgtctagttatgtcatttatgtcttatagtgtacagtgcctaatattaccacagtcactccatatttcttatggagaaatatttatattcttatgacacaaattttaccattctttaactttcaatgtatttgtatctttgcatctgaaatctaaaacgtgtcagctgtagatagtatataattaaatctttttaatcaactctrgcaatctcttcctcttaattagatttgtaaattctttcaaaattaatattattcatgtagtgtgcaaattcctctgccatttctatttttatatgactcgtattcttttttctacattcctcctttattgctttcttgcattaagtgaatattttcttgaatgaattttaactcctttaatatctttaattttttattgtatttttttgtcattttcttagtgttcctgccagggcttctaaatacatcttattacatgtacttatataaaagtaattctgttgaaacagaattattatccttatatgtctttattcctacttttttgaggggggtattgwtgtatacattaattgtacatatgttaaaaatttaaaaatgtaatattataactttacagaattatatctatttgaaagaggctgagagaagaaataaagcaaacatatatttacagcatttgttaaccttcttatttaccaattattgttctcttaatttgtttttgtagattcattactatctatgtcatgtcattattccagtacagctttgttcttacccacctactttgtgttgttattgtcaattaatttcatttttatatgctgttgttstaacaatacaatcataaatatatgttgtttgtacaatgctctttacattagttatgagaaaaaggagaatagataagcatccctgctgtattttagaatgtcataattacctctactggtgctcttaatttttgtctgtttgtttgttttcagttgcagtccrtaggcacttgctttaaccgtgaagaattaccttcagtacttcaggtaagacacatctgctagttatgaattctctcagaattcatttctctggaggcatttttattttattaattttgagaaatacttttgctgaatataagatttttggcttacgtttatttttcagcattttgaatatataggtccactatgactttcattgtccatgatataaaggtagctattaatattattagcatttccttgtacatgataaattatgtttctgttatagttttctaatttttctttttatgattatgacaatttttataatatgtgtggggggtggtatctttgcacatttctaaattttagtttgttgagcttcttgtgtgtagattaatttatttttaattaaatatgaagttttcagctagtgttttttatctcctctcctggatcacctaatatgcatatgtttgcatgtttaatacttttttatgtttctccaagactctcctcatttttcttcattgatttttccttattcttcagcattcataatctccatagatctgccttctattttgggaattctaccacttcaaatatactatttccacycaccttattttcattgtagttgttattgtttgccaccacatgggtgagctggagtgagagtaatcagtattccactgtccttggatacacttggaatagagcctccttactataagtgggggatcgatggaaaaaggaaactgtaattttgtagcaatagttgtcagattatacatttcaacttagaactagggggatgagaaatgatgcttacttgccctattctcatgagatgctcttttcttttatwaggagccaaagggagatggagcctaattttttttacttgttttagtggagcttctctcatgcaaatatgtttgagaaaagaggataggtggaagtggaaagaagtgcatcatggctcaagtgaagcagactttaactgttcttgttcagatctacaagatttggtagtttcttttaaaaaatgtttcttcacttgctatatgcccttagaagaattttcagatgatataaattgttagtttttttaaaaaacttttttttgttagtacaattgttttactggggagtaagtacatggaactctttaagctgtatttttggaagttgttaggtacagtaagttcctcttcaaagagtcagcttgttcagcttccttgttctttgttctctattttcaaagcctaacttcttcgttctttgtacctccttgcccctagttacagtaaacaaccttcctgccagtcttaaactataacgcacatctgttcccttggttacccactctgcaactgcccttcctgccaaaacttcttcctgcccaaaccactcgtcctgccactgtaacccacatccctgctgtatttgaaatagccagttgggattagcttagattgtgtggtccagccccagccagtgtgaacaggacatagaagcagtgactaaccgttttatggataaaaaccccttccctcctttgttcggtatgctctcatagcagccagaagtgcgagtggcacccttctgcagaagtaaatttgccttgctgagaaatctgttgtttgagtgctcgttttccttgcaactctgagctcttattttcagcaatctgggggcttatctgggattcccattctcctatggggaaagggtctccggtaacctctcatgaggagacttattgcactgcctcattgcagtggcctcagggtgaggaattgggagccaccagtgtgacaaataaacctggactctcagcaatgaggaaagaaacagaccaacaagttggggaaagaaagctcacatactgcggtgaccaggtaactctgttcacagaccaaggtaagaaacatcgcaagagtgacaaagtacttccttggtggttgggataccttgaaggttgaaagcatgtgaataagatgcacaattgagtgaaaagctagtgttgagtctgcatctgtggttccatggtcccttcatatggcttatggcagtgctcctctaaaggagtctgggtcaggggtttatactgaccaaccaatgctaagagagacccaacgcctgagagggaaatggccagagaagaacgaagcgaatgaagaagagtgcaagaaacctccaccagggggcgttgagcctctaggaaaggaaaggtgagaactctccagtagggtatgttgagcctcacacaaacctccagtagtggggaaggcaataaatttccagtaggggaaattgagctctgacatgctttcttctacttgttctggtctattgttgaaactttccactgcattttgtatttttctaggtgtatctttcatttccagaagttgtggttgttctttctttatggtagctatctctctacaaaatttttaattcaaatcctagattgttttttgaatttctttaatcggttttcaactttctcttgtatcttcttgagtaggttaataatcaaccttcttaattctttatatggcacttcagagatttttatctttgtttggatctattgctgtggatctagtgtgattttgtgggggagttatagagccctgttttgtcatgtaaatgccctaaatgctccacttaaaagatgcagaatggcagagtgaattaaaaaaaaaaaaacagtcaaatatctgttgtcatcaagagattcatctaacacattaaggattcatagaaacttgaagtaaaggtgtggaaaaagatattccatgcaaatggaaaccaacagtgaacaggagcagctattcttacatcacacaaaacagactttaaagcaacaacagtacaaaaagacaaagaaggacattatacaatgataaaatgattagttcaacaggaagatattacaatcctaaatttatatgcacctaacattggagttcccagatttagaaaataattgctacaagatgtgtaaaattgaatagacagcaacacaatagtgggggggacttcaatactccactgacagcacgaggcagattattaagagagaaattcagcaaagaaacaatggacttaaactatacyttaaaacaaatagacctaacaattttttacagaacattcttccaaacaactgcagaataaacattattttcatcagcacatggaacattttccaagatagatcatataataagccaatgagtctcatctgaataaatttaagaaaattgaaattatatcaagtatcttctcagactgtgatgttacagttggtagttactcaggcatgggcagggaaggagagggtcccatccccaacaggaatgttacatgaccctcaggtgatggtcatggggttgttaagctgtctctctaaaataacaattggttgcagccaaggccagaaaaaagtagtctcccaatagacagaaaacttgaaactgatgagcagcagcttcccaataagatcagagttgggtgagtgggctcaagcatgcaaagtaagagccaaattggtggagtttaactggtatatgacctctttaaggaacccttgactggtaagggaagaacactttgagtgagaatgcatagaacttcagtaaacacattctgcatgcagcccctcccaaagtgttaacaggccactgcacatgtgaacagcccaacctaagggaagaatcaggagagaaaggatgctagaccccagaatcatgacagtgtataaaaccccaagtcaaaggtcaaactgtgcacttgaatccctcaagtcgcctgcttggccctcttccatatgtactttatttctttttgttcctgatctaaagctttcaaataaactttcattcctgctctaaaacctgcttctgtctctccctctgccttatagccctcagtcaaatactatcttctgaggagggaagaatcaaggttatgtagacccatacagaattgccactgctaacacactttcatactgcatgacttggatacactccctattgctaacaagaccacagtggaattaaaattgaaaatgaactcccaaaggaagcctcaaaactatgcaaatacatgaaaattaaataatctgcttttgaatgattcttgggttaacaatgaaatcaagatggaaattttaaaaacttttgaaatgaatgaaaatagtgacaaaacatattaaacctctgggatacagcaaaagtggtggtaagaggaaagttcatagagttaaatgcctacatcaaaacatctaaaagagtgcaaacagacagcctaaattcacacctcaaggaactgaagaaataagaacacactaaagccaaagcaggcagaagaatagaaataacaaaaatcagaacagaattaaattaaattgaaacaaaaaagtgtaaaagataaatgaaacaaaaagctggttctttgaaaagataagcaaaatttatagactattaatgagatttaccaagaaaaagagaaaaatcaaataagctctattagaaatgaaattgggacccccacattgaccagaatccgtggacgtggtgaaccaggttatcaagtacaagcctgcagttgcctggcagactggaaagcctctctccatagaggagatagaggtggcacccccaaaggctaatgaagttcgaatcacaatcattgccactgtggtttgccacaccgacacctataccctgagtggagctgatcctaagggttgttttccagtgatcttggracatgaagttgcttggaattgtggaaagcgttggcgaggaagttactaagctgaaggtgagtgacactgtcattccactttacatcccacagtgtggagaatgcaaatttggtctaaatcctaaaactaacctttgscagaagataagagtcacgaagtttattttctaatatccatgggttggtaaagattactatcctttaattgtatgaaaatccaaactgctaggtattttgttaatatgtgtatctcatatgtaggcattgtatttttgtttctaattttaaattgaaattgagtagacacacttataagtgggagctgactgatgagaacacatggatatatgaggggaggggaaaaacacacactgggtaactgcaggagactgggggagggagaacatcaggaagaatagctaattggtgctgggcttaatacttgggtgatgggatgatctgtgcagtaaaccactgtgacatacatttacctatgtaggaaacccgcacgtcctgcacttgtacacctgaacttaaaagttgaaaataaagaaaaataaataaattgagtagacaattgaatttatacactttgtaaaacctatacatattccagggtgcagattgctagtcttttgatatcatcattaagctaattcattgacaataagtgaatattaaataaataaggcaactagtggctgggcgtgatggcttatgcctgtaatcccagtactttgggaggccgaggagggtggatcacggggtcaagagttcgagaccagcctgaccaacatggtgaaaccccatctctactaaaaatacaaaaattaactgggcgtggtggcgtgtgcctgtaatcccagctatgctggaggctgaggcaggagaatctcttgaaaccaggaggcagaggttgcagtgagccgagatcgggccactgcactccagactgggcgacacagcgagactccatctcaaataaataaataaacaaacaaataaataaagcaactaaaagaatatctacaggggatgatatttagagtttacattttaacaagtcttattacagcagtaaaaaatgcaaacataataagcctagtaaattagtaatttaaaaagttaaaagaaatgaatggattcaaagcatattatagacatgacatgttattttcagaccattaaacatgaccatgatgaacaattgcaggtgcttgaaatttccacaatttcataaaacattaattaaacactaaatgtcagaagaaaatcactaatagtgcttctcaaagaaaggtgcatgaccgcctgtatctgaatctcttacctgcttgagactgctaaaatcattaattcatgtccgttataagaggtttatgaattgcactactaagtacaggtttctgggatcccaactatatacaaaatatcccacgtgatcctatgcacattactatttgagttgcactgcattagggaagaaaggcaaaaagttttcatattcattgtaatgtttaattttgtgtgtcaactcagctggaccacagtgcccagatatgtggtcaaatactttctagatgtttatttgaggatgttttgggctgaaatttaaatttaaattagtgtattttgagtaaataagatcactttttagactgtaagtcagcattatcccacgatacaagatctgaacataactctgccaacagatgatcttggggcttgaactgcaacatgaagttttctgggtctccagcctgccagcccactctgcagatttagaactttccagcctccataatcacctgattctttaaaataaatctactcacacacatacatacacgcgcgcacacacacacacacacacacacacacacacacacagcccattggttcagtttctctgaaaaagcctgatttaatacctctgcaatgcactaattaaccatcatacattatatttacctcacattaacttacattctttacaaaacaacccaaaaggcccagaacccactactgtcctcagcgctgagcggaaaaggaatgcagagctgcctcaacaataattcacagacctcagggaaaccttctagatcctaatccctaatattgattcctcttagccttgttctattctccctataaaagaaaagccttttcccgcttgttccttaagaagtttgcaaatcttttgtttatagaatttttattgcaaaatattttcagtaatttttatattaattccaagtaagtttttagttgacaatttcctggtgctgcaattaggatcaacattgagtctcaactatgaaaccttgtcattcttgaccaggtaatggaaacttgcaaatcctttgaactccttttatcttaattgatacagtgaatttttggtgagttcaacactcaatccagcctacagatgtcttgtctcttgaaacacagtaagaatttactttaactcctgtaggcaaagagacttctctttggcctttctgtgcagcctcttctggttttcttcaaatttccaggctggaatttcatgggactgtttctctggcttattggacataggattgtgcaaggaaatgaactgagagggaatctttcctagttcttcgaagtcttatctctgtttaataatcaaatcctgtgcatagctcactgtacgggtaccctttattctcttctcccactgactatatactctgtaattattgcactacctctgttaaatatctccaatgacacatatttctaagaataatgtagaactgaagtggcctttttgaggttcttgtgctctcctctataatcaatggtctgcttattaatcagtagtctgcttatttgttatggaatgtgtaaaccaaaaggtttctcagtgtaagtttaattaggacattcagcaaacttgatctacttaatctgagcctatttaatctctcaataatattctgtctccctcaaatatgtattttgttattttctaatttcacaaataatattatatgtatttatcatataatgttatgctctgatatatatatatgttctaagatatatatatatatatatgtttgtgtgtatgtatatagagagagtaaaatggttaaatctagctaatgaacaaatgcattacctaacacagttatttttgtggtgagagcattcaacatctacttttttccttttttaaaagtacggtatagtctgctgtacaataagcctcttgaatttgtttctcctgcttatctctacttgcgtattacttaagtagacttatgtgtacttactactcatatttatttctcacttactccaccctcaaaggcattcccagcctttctcttttctctctcttttcctctcaggtccttcaaatccattccaagttcttcacattaccttaacttccctacaatgtcctacatactgggtcaatcttaggtattgtaagggaaagaaacattggggctaatgcctatgcaaaaagaaagagaatttatcaaactcaaaagtctcagtgatatctctgaaggatatggtcctatgtgcccctcaaaaacccttaaactaactggatgaaatcataatctcagtcaatgagcacccctgcacctttttgacagacactaaagccatttgtgctactttaagaccttatatgatctcaccataatccctgagaatatatcaacgatctcaccggtgggatgggaaaacttaccatataactttcccctttctcaaccactttctgtatctccttcaccccataatgcccaacgtggttatcgtctactagtcgattagacagatattaactttcttattggcatgtaaatatttggtgttcaccccaaaggactaacccttgaagtcctggactcctccccaatcactgttgttctctaacaactttgatagatcaacccaaattgcttacccctctcccagctcccaaaactcttaaccatcctcacgttcagacatactaactgactttcctgagcctctctgagctgtggatgtattgcaaagcataattgttgaaaaggatatagtcccccaacatagccctccctaagccaccccagtatctttcaagaactgaaggaattgaaagtctcagacctatctttcaagggcttatgtcaaaggacactttttttgtaattgtctggcaataccccaattcttccagtaaaaaagcctcattatcttttattaagtctggatttgtttttatttgtcaaagaaaagtaagtcacatgagccctatgtttgcccaggtttccaatcagagacacttcccagacactatcccagagaagaaaatctcactgaattgaggtggtagagatcagatatttggaattctatggcaggtggaatttgaggggcagagtaacagaactgagagatttaaacagataaagatcccagaaatctgcatacaaatgctgtagaatatttggctaaatattaagctgagtatgcttaaagttccataatgccaatggaagaatgactcatagggagctttaggaagaataaaattggactttttatagaattccgagattttgaataaccagagaggacaaaatttaatgaacacctgtagtattaagtattgagcccccaaagactacatacttcaggagtagtgctaaataaaacccacaaaaaactgctagattacctatataaccataaaaacaataataagaaaattcaataatatacaaagtaaattaaatgtcaattggtgaaagggtacaaagtttcagttagataggtggaacaagttctgttgatctattgcacagcacagtgactatagttaataataatatattgtatatttcaaaatagctaaaagaggtgatttaagtattctcatgacaagaaaatgattagtatttgaggagatagatatattaattagcctaatttcatcattccacaatgtaggcatgaatcaaaacatcacactgtaccctgtaaatatatataattattttatctgtaaattaaaaataaaataaaataaaataaaactttaaacaaattttgtttgcaaggaaaaaatcaacaccatttaaagcaggaaaataaaatccaaacctgagtttgtcctcataaaataaactggtaagtattccctcatcttatatatgtttaatatttctgaggagttgcagttaattctttaaaggtggagtggtattcactagtgaatccattttgatctgaactttgtagaaaattttcattaattctttaatctctttatgatacttatatgcagattttctatttcttcttgagtcagtttccgtagtttgtgtttttctaggaatttgtccattatctgatgtattagcatataatcattcatagtattcccttataatcctttttgatgtctgtaattagcagttatgccccttccttcattcttgattttaataatttgagccttctttcttttttataatctgcttaactaaaagtttgtcaattttgttactctttccaaagaaccaacttttagtttcattaatttttctttatttttttattctcaattttatttatttatgatcttacgtttatcgcttcctttggtttacatcctcttttttttttaattctgtaggcagtaaataattaggtcatgtttgttgatctggtctaacaatctctgccttttggctagatttttaattctttcatattcaatgttattatagacatacaggattatatttgccattttacttcttgttttcttagtgttttgtgttctgtttgtttctttttttattattattaccttatttggggttaaatatataatttttgtacataaaatttcaatttgtccctgcttttattatatttttaagttttttttttcttttgtggttgccctggggaatgcaattaacatctcagtctataataaacgagtccatatgaagagcaacttaattttaataggatacaaatcctttgctcctatatatctcaattccttttgccctcctttatggtattattggtatattaatttcatgtttatacattatgtgcctatcaatgttaattcatagttttggctttgttggtttaattttta

SEQ ID NO: 94520 - DNA, 293346 bp, Homo sapiens
atcacatgagctcaggagttcgagaccagcctaggcaacatggtgaaaccccacctctacaaaaaatgcaatgattagccgggcatggtggcacatacctgtggtcccagctacttgagaggctgaggtgggaggatcacttgagcccaggaggaggaggctgcagtgagccatgactgtgccactgcactccagcctgggtgatagacagggagagagaccttgtcgcaaaaaaaaaaaaaaaaaaaaaaagaagaagaagaagaaaattatttggccatatatgcaagggtttattattctgtttcattggtccatatatctatttttaagtcagtaccacaccatcttgtttactaatcaggaaatttgtggcccccagctttgctgtttttttttgtttgtttttgttttttttttttttgagattgttttagcttttcagcatcctttgagatcccacggaaattttaggatgggtttttctctgcaaagaatgccattgggattttgatagggattgcattgaatctgtagattcctttgagtagtatggacatttttacaacattaagtcctctaattcatcagcatgggatacccttctatttatttgtatcttcttttatttcttttaggtatgttttggagtttttagtgtgtaagacttttacctccttggttaagtttattctaaacattttatcctatttgatactatagtaaatgggattgttttgttttcttaatttccttttttttttcttttttttagacagggtcttactctattgcccaggctggagtgcagtgatacaatcttggctcactgcaacctctgcctcccaggttcaagcaattctcctgcttcagcctcccaagtagctgggactgcaagcacatgccaccacgcccggctaatttttgtatttttagtagagatggggtttcaccatgatggccaggctgctcttgaactcctgacctcatgtgatccacctgcctcggcctcccaaagtgctgggattacaggcgtgagccaccatgcccggccttaatttcctttttggattggtcattgttagtacatagaaatgcaactgacttttcaaaaaaacttatggagctatatggtatttcctgtgtggatgtaacataatttatttaaccagtcttctgttaaggagcatctgggttgtttctaatatatatatatatatatatatatatatatatatatatttatagagacagtgtcttactatgtttcatatatatatatatatatatacacatatatatgtatatatttatagagactgtgtcttactgtgttacccaggatggtcttgacctactggggtcaagcaatcctcccacctcagcctcccaaagtgctgggaatacaggggtgagccgccatggctggctggctttttttgtttgtttgtttgttttttcagagatagggtctcactatgttgctcaggatggccttgaacttctgggcttaagcaatcctcctacctcagcctcctgagtagttggaactacaggcccacaccactgtgcccagctatccagtgttttgatgttacaaatgatgccgcagtgaataatcttgtgtacatctcattttgtccctgtaaagtatatctgttggataaattcctagaagttaaattgctgggttaaataatatatgtattttaaaatttcataaatattgctcaagaattatgattctgacataaaataggggttttgaagctgtttgtttgcttatttatttatttattttcagatggagtctcactctgttgcccaggctggagtgcagtggcataatctcaagtcactgcaacctctgtctcctgggctcaagcgatgctccctcctcagcctcccaagtagctgggattacaggcacacaccactacgcccagctaatttttttgtgtgtgtatttttggtagagacaggctttcaccatgttggccaggctgatcttgaactcctgagctcaagtgatccactcactttggcctcccaaagtgctgggattacaggcttgagccactgagcccagccaaagctgtatattaaaaattatggagtaactattttctcagctgatttgctctctttcaggtactgtatctcttattccttccaaaacaaataagcacattcacaagttacgcatttatggtcaagagtcagagaaaggtctaggttgccttctgtggcaatttgaagaaaaatgtgaagatgtgtaccagtaaacttcttctaaaatagttgatgggaacccgttgataatcatcactgaaagcgatacacctatatgtatatcagtaaaactttgtcggccatcctttactaacaaaggaattctttttctttcttttttttttttttgagatggagagatggagtcttgctcttgttgcccaggctggagtgcagtggtgcaatctcggttcactgcaacctccgcctcctgggttcaaccaattctcctgcctcagcctccccagtagctgggattacaggcacccaccaccacacccggctaattttttatatttttagtagagatggggtttcaccatgttggccaggctggtcttgaactcctgacctcaggtgatccacctgcctcggccacccaaagtgctgggattacaggcatgagccaccgcgcctggcctctttttcttttttttttaagtaaaaaaaaaattttttttagagagggagcctcactatttttcccagtttggtcttgaactactgaatttaacccatcttcccttcttggccttccaaagttaagagattacaggcatgagccaccatgttcggctcaggtattctcttatgcttcacaaatatagtgagttgttattcacaatgtattcacaagttgttattcacaacaatattcacaaatgttgttcattttgaaaatgctgtgattattgctgggcatggtggctcacgcctgtaattcaagcactttgggaggttatggtgggaggatagtttgagctctggactttgagacatgagcctgggcaacatcgagacctactctctaaaaaaataaaacaaaaagataaaattagccgggctgtggtggcttaggcctgcagttgtagctacttgggaggctgaggtgggaggatcacttgagcttgggaggtcgaggctgcagtgacccatgatcacgccattatgctccagcctgggaggccaagtgaggccctgtctcaaaacaaaattaaaatttaaaaaatctatgattgcttggcatggtggctcatggctgtaatcccagcacttttgcaggccgaggcgggtggattacctgaggtcaggagttcaagaccagcttggctaacatggtgaaaccccgtctctactaaaaatatgaaaattagttagtcgtggtggtgggtgcctgtaatcccagctactagggaggctgaggcaggaaaatcgcttgaacctgggaggtagtggttgcagtgagccgagatcatgccactgcgctccagcctgcagcctgggctacaagagcgagactccatctcaaaaacaaaacaaaacaaaacaaaacaaaaacaaattgtgattatagttttattattaagtttcttttgtgagacttgtcatttaaagctgtttagtgttgagaagtctctcagcaacagctagtttctaccttaataatttcaattcatttaaaaataatgtgaggcaggagaatagggtttggaggcagggaacctaaggctgagtaaagttgacttcctagaactgaatcaaaaggaaaaccccaactttccacacctaagtaacaaaaagactactccctttgcaaatcctcttccttttccgcttggcagatggaaaactgaaagtatctctgattggttgcagaaagcagatgtttgtatagcagtgtaactttgtaacttcactttagcctctgattggttgctgtccacaaccaattagatgcttgcatagggtgtgacccttgtaacttcactttagcctctgattgcgggccactactttatttacatagggtgtacaccaagtaaccaatggaaaacctctagagagtatttaaatcccagaaaattctgtaatgggggtcttgagcccctgtgctctggcagctcctgcagtcttgtggagtgtactttcattttcaacgtgtctctgcttttgttgcttcattctttccttgctttgtgcattttgtccaattccttgttcgaaacgccaataacctggtaacatgttgactatttactatttttctcatagtgaagtcagttgaacagcaagcacatttctgtgctgccttgtgatggagtacatcattcaaattcactgcatttaccaaggagaaaaaaatgactcctgtaaattgtatgttgaaatgatatttaatgtgtacaagacaaaatcagtatagcaggtacagaggtctggtttctataattgccaactgaactcaaacatttgaaagatataattgcaatgtgtacaggcgtctgttgattaaaaagttgcctgaggccaggcgcggtggctcacccctgtaactccagcactttgggaggtcgaggttggaggatggcttgagcttagatgtttgagaccagcctgggcaacagacagacctacctcatctataccaatacataaatacataattagctgggcttgatggcacgcgcctgcagtcccagctgcttgagaggctgaggtgggaggattgcttgagcctaggaggtcgaggctgcagtgaactgcgtcacgccactgcactccagcctgggtgacagagctagaccctgtctcaggaaaaaaaaaaaaaaaaagttgcctgagcctatcagattttcaaagtgtttcattcaaaaaaggctcccctcttgctatcccagtagaaagcagcaaccctgtcacctaaccccgacaggagctcttgcatatttcaagaaaaataaatagaatgaactaaagcatgcatggcagaataaatttggaaataaatttcgaagcgattagattttagaggacttgtttgtgattagcagagattaccaatgtaaaatcaaattatagatcataaaagcgggaaaggcatttacagatcatccagccaagcttcctctgtaatgagaaggaagcagatctaaattgattggtttgtgagctaaacatcacatcaaattggggaaatggcccgtgtgtgtgtgtgtgtgtgtgtgtgtgtgtgtgtgtattctaagagacactttattcaatatggaaagaattttatgcagcgttcaagttggtcttatgtcgtctgcacacatatacatatatataagtatattatacacatatacatttccaagcatgttggtgtgccaaatattatgtataaaacatctaggaaagcaaataacttgatgatagcctagcatataggaaagaaaatacttacataggatggccatacagattagtggttaagagtgtctggtgaatctcggctccactactgtgggactttgtgtcttggtttcctcatctggaaaatgtaggtttgtctacctcagagagtgtaaagattaaatgagataacccggataaaggattagtgtagtgccgagcatatagtaaactctcaataaatgtaggttgctgttattacttcgttaatatgtcaaagaaaaaagaggttggaccaaaagagcattttcaaaataaagtcaaactatgtcactagcactttcaggtcaattgggactaaattggaccccctgcgaaaaggtggaggggatcaaatgacgtcgaccgccttagcaacaggcccccaaagaaggtgaatttccgtagccaataagactctgtgctttggaggaggtagccaatggctgacggaaagagaaagagggaggacgcgccaattctcctgcctgagcctcggcccaacaaaatggcggcggcagcggtgtcgctttgtttccgcggctcctgcggcggtggcagtggtagcggcctttgagctgtggggaggttccagcagcagctacagtgacgactaagactccagtgcatttctatcgtaaccgggcgcgggggagcgcagatcggcgcccagcaatcacagaagccgacaaggcrttcaagcgaaaacatgaccgctgagcccatgaggtaaaacgcaaccccgtctcaygggccccagcggtctgggcccaggcaccgtctgagtcgggtgtttgggaaggcgttcgcttggtgggttaggcctgtgtgttgcttagccgaaagaggcatcgttttctctttaggtgagaagggtttcggggtatcggcgcaaggctccgacgggggtgggggtggggatggggtggggggaggtggggggggcgcggcctagggtatggggcgcttcttgcaatctcccctaaacggtgacgcttggtcgggctcctctgtttattctttggtgcctgtgggattgagacctcgaagtcggaggcggtctttggtatcccggtcatttttgctaatctttgggcctagaaactgcgtggggaagaagcggggggagggtgagaagagggggaggggtgggcgggcgcgaggatgtgagatcccaggacgacttagaggcgtttaggttgctggagatgggaagcacccgggccctgcgggattttttytctgcagccccaggagacaagcctttttttgattgggttgtggtgcagttccaggtatttaggtatcttttctactccatatcctgaaggatatccttgggtttatttctaggcgaggggggacttaacacagggttttgcttccagaggaccctagtatactactttttgtgatgtccagccttaatgggacctcaagtgtttccccactttctgggcaaatttcgaggagtaattaggccctatctttatttacttatttattccatgaaggatgaagggcaggttaacgtgggctgatgcgaagtaagatttattgcaagggaaaatgcctggcaggcctcctcttaaccaatcaagcacgtttattaggttgaagctgtttttctgtgtgcttctgatttgcctcttgacgggtctgaaaatttgggtagtcaatatgaaatgtatacacttttacccaggtggctggctggcgtttcagtttgacatttgaattttcatcccacaatgtgaattaagtaatttttttactcggagatgcatccttggcgtccagtggcaaaataaaattacaaggagcatgggtcagaattgcatttcaagttggcgaaatgtgcctttgagtaactcttagattggcatatgtttttagagcaatttagctagaatgtagaattgggcaatgagcctatgatacgtatgtctgtatttctgcatgaacaagcagtagattatattttctttaccttggggaaagatatgcttcagttcttagattgtagatctctagttgtgtacacgattgtggccttggtttctgaatttgtcagtaggctcaaatacaacaaatctttatctgtggggtattaggcacgtaagtggtacccagtataacttgttggcctgtaattaccaggcactcatgttcatatgcatggatggtgtaccttacagttaaattatgacctctagattttactaagtttcacaaagtctacatttgaaactatagtttgaagtcggatcttctcagtttctttagaatgaacaaattacgtatatagaatttctgaatagaataattaattttacacaagggtcagtttttcttactagtcttggatttttgtagatcttgatgataagagtaataatcataactaagttgagtgcttattgtcgttctttataatcttgatgaattctcaaacctgtgaggtaagtacttggttttgcccattttaccgatgaggaggaaagtgagacatagatcaagaacttgaccgaagttatacagcttgtaattggtggagctggaattgaaccccatcttgacttcacagcttatgttcttaaccacaaggcattaatgcccccttcagctgccaggtctaacctgattatgaccatttaaatttagcccaagtgttacaatgaaagaagttcatattacctactctgatttgttgcaggtctatgattttgtagctgtttataatgttacattttttgtgtccaggtgtactatgtagtgagataactgaaatatttaatgctaggagagtcttaagctacatgaaaaacctctagtaaagaactgcatatatgcatgtagggaattaattaaaaagtgtgacactccctgatgatttactatgaaagagctccaagtaggtgttcagaactgtctcaggctgaagtgtcatcgatctcctaaaccataatcatggttaaaggagaatctgacaggtaatgcttgagttgaacccacagtaccaaatccctcttgagtcttttctaatgtgaggcagaaataatataagcattattgttaatattattttacacagtagttccagattttctctttatcaaatattttgtcaagcacttaaaaagcaggaacaaagactagttctaatttttacttgtgtttataaaaaaaagtaatattctaggattctgtggtggaaaaatggccagaagacaagaggaaggaaaataaaccgatgacctggctaaaacatacactgactaatcagtggctcagtctttaaaggttttgttgtttttaaaggatttttttggttgtttgtgttgtttgaaataagattgacttgcttctggcattataaaagataaggtcttttataatcaccaagctctcaatgtagtacttgggtacctgggtgtcactgctgattattttttaatttttaaatttatttttttgagacagagtctcactttgttgcccaggctggagtgaaggggcgtgatcttggcttactgccgcctccgcctcccaggttcaagtgattctcatgcctcagcctcccaagtaactgggattaacaggtgtgtgccaccacgcctggctaatttttgtatttttagtagagagggagtttcaccatattggctaggctggtcctgaactcctggactcaagtgatctacctgccttggcctcccaaagtgctgggattacaggtgtgatctaccgcgcctggctctctgctggttattcagggcccaagggctcttcagttatcaggtgatgtatgctgctaggactgggaccttcccttcagggcagcagattcccttctggcccaggatgtgtctagaattgtcatcctggagctagggcctggaatggaggcttcatgactgatgaactttaatttgttttctttatttttattttttttgagatggagtctcactctgttgcccaggctggagtgcaatggcaccatcttggctcactacaacctttgcctcctgggttcaagcgattctcctgcctcagcctcccaagtagctgggattacaggcaagtgccaccacacctggccaatttttgtatttttagtagagacggggtttcaccatgttggccagccaggctggtctcaaactcctgacctcaggtgatctgcccgcctctgcctcccaaagtgctgggattacaggtgtgagccactgcgcttggccttaatttatttgcatataaagatttcagtattgggagatttggtgaaatttgtcattctaatccttatggcaattgattacttgaaaagctgacagctatattaccttgttattgatcttaaatataaaaaggcagaagttgtctaaattgagagattttgaatgtcttagaaagtatctgttaaggtggtagtttacaagcagttacattgtaacctaattgttgaaaaatgttatctgtgaaatacttgcatttccactatgaaaagcatgaaaccaggcccttggagggggaggagatgcaaattttataaaggtttttaaaaagcatttaaatatcaatggcttggttatgtaatgggttggggtgaaaagaaagacatttgtgaccttaatttttatcaggcccagttttattattggccacccttggcatagttggccttgagctttcagttatgtattgtatttctagagataagataaatgtagtacttaaaataatatttaagtattgatgtaggtgtgtgaaataattgtttcataagtaattgtatgtgtctttttcacttttggggtctgaataaacttatgggttgggtaataggatacgggcaattcttgaatttacatgaagtgctttcccccagaccgtgaatgttcttttggatatcagaaactatttaaatagttgaagccagtgaaaactgatgcatagatcttcctttagaaatgttgaatataacagggcagtgaaaggagggtctaagcagtctgtctctaattttatcctaatgcttgtcttatgatcagcttggaagctgacatgcaagatgtttaacttctatttttccatctgtaaaatgggaataagctcaaatgggagtaaatatcaatatttatcaataatagatattgataaagtctaaaggtattctgaaggaggtaacatgtttgtaacaatggttcttaaaagagaaactaaagctctggggtcctagttttttttttttttttttttttttgagacagagtctcactatgttgcccaggctggagtacagtggcacgatctcaggtcactgcaaactccgccctccgggttcacgccattctcctgcctcagcctcccgagtagccgggactacaggcacctgccaccatgtgcggctaattgtttgtatttttagtacagacagggtttcaccgtgttggccaggatggtctcgatctcctgacctcgtgatttccacccgcttcggcctccaaagtgctaggattacaggtgtgagccaccgcgcccggctgttaatttttaagagtgaaaagaggtgctgcgactaaatggtttgagaactgcttgtatagaggaatgaacactgaactgtgagccaagccttggtttttcagttatagctctgttgcttgattgtatgactgtggacaaatcatttatctgttccaggcttctgctttgtcatttgcagaacgaacaagactagatggtctgtagcattaatttttttttgggacaaggtctcactgtcacccaagctgtagtgcagtgacactgaacatggctcactgtagccttgacctcctggctcaagcaatcctcctgcttcagcctcccatgtagctgggaccacaggtgtgtcatcatgccccgctaattttttgatttttttgtagaaacagtggtctcactttgttgcccagtctggtcttgaactcctggacttaagcgatcctcctgccttggcctcccaaagtgctgggattacaggtgtaaaccaccataccctgcctaaagttagtttttaaaaaattctgcttacaggccacgtgcagtggctcacgcctgtaatcccagcactttgggaggccgaggcaggtggatcatgaggtcaggagttcaagaccagcctggccaagatggtgaaaccccatctctactaaaaatacaaaaaaaaatcatctcggtgtggtggtgggcacctgtaatctcagctactagggaggctgagacagagaattgcttgaacccaggaggcggaggttgcagtgagctgagattgcgccactgcagcctgggcgacagggtgagagtctgtctcaaaaacaaaaacaaaaacaaataagcaaaaaattctgcttatatgagtgtttatcattttctcttatctgccttttgtgggttagggagaagggtagtggtgagataaagtttctttattcagtgtatttatatctttttgccttaaaacttacatggttaggttacaggtgttttgttgctgatacttgtcatagtatcatgtatacctggttgtataaacatttattggaaaggaaaaaacatttttgttggaaagtttggtaattattgtggcttaggatatgttctattttgaaagattgctatatccagtatatttctgcccttttatgattgaagatgtacgtctgaaaatacctatgttagttctagccggttgttctttttgcgctgggaagtctttgaattttgcactgtagctgctattttcagatcctgtctctgaaactttgtctctcagttttagcttgaagtagccatttcctgtatctgtagtccagcactcttgttaactgtcccatacaatatttgttaagaaattattgttctggcagtagtattcacatgtatatatcctgcactccatattttgggggaatgctttattagttgatcaaatacttaagtatcaatttggggccaggcatggcactgtgttagggttatgccaaaggtaataaaattcctgccatcttaaggcattcttagtcaagtgagggagattggtaagtaaatgagcaattagaaagcagtgctaaaatatggaaatatattgattgcgctagggatcagaaatgaaagaaagcctaatttgggggatgtctaggaaagttttgcaaaggagatgttaactgtattgagtcttgaatgagttagcagttaagggttgactgtgagagggcagtccagacagctattagtatggttaaagattagtcttattttccatatatcagaggaaataagacatgtacacgattagttttggtgcaagatataaagtgataaatgctgcatgaagtaaaagtaagttgttgtgtgagttcaaagtagaaagacatttctggtggggaccaaggaaagctttatagagagatagcatttgagccgggcgccgtggctcacacctgtaatcctagcactttgggaggctgaggcgggtggatcacgaggtcaggagatcgagaccatcctggctaacatggtgaaaacccgtctctactaaaaatmcaaaaaaaaaaaaaaaaaaaaaaaaatccgggcatggtggcgggcgcctgtagtgccagctgctcgggaagttgaggcaggagaacttcgtgaacctgggaggcggagcttgcagtgggccgagatcgcgccactgcactctagtctgggcaacagagcgagactccgtttcaaaaaaaagaaaaaagagagatagcatttgaatctagtccttggaatataggtacagttttgacaaaggagactgtgggagaattccagatgtgaggagtagcagcttgagcaaaggaatgttgtgtatattagcattttctatttggaagaaggtcaacatcgaattttaaacttaatttctggacaaatactgtataactattgtgcctttttttttttttttgagacgtagtctcgctctgtcacccaggctggagtgcagtggcatgatcttggctcactgcaacctccgcttcccgggttcaagcgattctcctgcctcagcttcccgagtagcttggactacaggcgtgtgccaccatgcctagctaatttttgtatttttagtagagatgggatttcaccgtgttggccaggatggtcttgatctcctgacctcatgatccgcccgccttggcctcccaaagtgctgggattacaggcgtgagccaccgcgccctgcctattgtgcttttttttttttttttaagagacagggacttcctctgtcacccagcctggagtgcagtggggtgatcatagctcatagcttactgcatcctagaactcccgggctcaagtgatcctcccacctgagcctcctgagtagctgggaccacaggcatgtgccactatgcccagctactattgtgcattttgtatggtagcttttgtggcttgatgatcttgtaaaaggtacatgtgcctttgtgaatgggcctgataattttagttcagaattgtcaaaagtattatctacttttttttttttttttgagacagagtctcactctgtcacccgggctcagtggcaccatctcagcttactgcaacctccacctcctgggttcaagcgattcttctgcctcagcctccgagtagctgggactacaggtgtgagccaccatgcctggctagtttttgtatttttagtagagacggggtgtcaccatattggccaggctggtctcgaactcctagacctcgtgatctgcccacctcggcctcccaaagtgctgggattacaggcatgagccaccgcgcctggccagtattacctacttttaaataagattgtgtaggatttaatgcacagattttgaatcactgtgataaaaatgcatccttagttgtcttcattttgctcatttgaagtgctcagttgacttttgggtgggtaacatttgacttatagaatctaagataaaaaattatttctgagtaatactggatttgttattttgcttatttggattatattagttattttttggtttatttgatagcattccagatttagttttgctataatgcttgttttgaaaatgtggattttttccaaaagggttgatatttcagggaacaatttgaagcatacgacaaaatttgcatttgcttatgggggattttgtctgcagggtcagggatcagcatactgtggcctaccaaccagtggcctgttttttgtaaataaagttctttttttttgtttttgatctttgttttgttttgttttgttttgttgagacggagtcttgctctgtcgcccaggctggagtgcggtggtgtgatgtccgctcactgcaacctccgcctcttgggttcaagcgattctcatgcctcagcctcacgagtaggtgggatttcaggcatttgccaccacgcctggctgatttttgtattttttttttttttttttttttttttttttttagtagagacagggttttaccacattggcctggctggtcttgaactcctgacctcaggtgatccgcctgccttggcctcccaaagtgcagggattatagatgtgagccatgtaaataaagttctattggaatacacctatgtccatttatttacattgtctgtggctgcttttgcactgtagttgcagagttgaatagctgcagcagagacctagtagcccacaaagcctaaaatgtttactgtctggccctgtattgaaagagtttgctgattattgtgctagatgaatgcaggatactacacccctctaaaaagagctgcatagaaatacatgcatatagatgcacacacgtctgacatctaccagctacctcatttcaccacttgggttataaaccacacatatttacatctgttgtacaattttcaatccgatttcagataaccttccttctaccacttcacaataattcatgagctgcaacccttttgatgcccacttcacaagcaaacttcaggtctttttcaaagtaaagtgccacatttattgttatatttgagcatttattatttaacatgtcaaactgtgctaccatttttctttggtttctttgttttaaaaaaagtcactgatgaaatttttgaatgttgtgcttctaacctcatttttcctatgagttctatggtgttaattgcacaattttacatagtttggtggtttttaggaacccatatgttacattattgaggaactgactaattatcatcctgtaaaaagtactaattcattcaccaaacatttctggggtgatgtaaatattaagtgagttaaatgggcataaagcacttatgtctttattgttactcaaatattagttattactgattactattaccatgtgtcaggaactgtaataagtagtgcattgatgaacaagacagataagggacctgtctccatgaagcttacattgtatttttaaaaatctattaatatacattttggctagtaaccgagcccttgccccacagaaaagttgtgctgttacacaaaataatattttaagatccatccacaagtcaaagacatttcacttaaaacagctttctcagcagtgtctccttgatagggtataatattttattgaattattgtttttggctgggtgcagtggctcatgcctgtaatcccaccactttgggtggccaaggcaggtggttctcctgaggtcaggagttcaagaccagcctggccaacatggtgaaaccccgtctctactaaaaatacaaaaattagccgggcgtggtggcgcatgcctgtaatcccagctactcaggaggctgaggcaaaattgcttgaagccgggaggcagaggttggagtgagccgagatatcaccaccgcactccggcctgggcgacagaatgagattccgtttcaaaaataaataaataaataaataaataaataaataaataaagaattattgtttttaatttttgtttttttctgagataggctgttactctgtcactcaggctggagtgcattggtgcagtcatggctcactgcagcctccgcctccctggttgcaggtgatactcccacctcagcctcccgaatatctgggactataggtgcatgccaccatgctgagttaatttttgtatttttttgtggagatgagtttttgccatgttgcccaggctggtatcgaactcctggactcaagctatctgccctctttggcctcccaaagtgctgggattataggcatgagccaccaaacctggccatgtgattgtttttttgtaactgtaacctcaggagatgaatccgatctatctttagggagataaagagtaatcatcccttcctttttttactgtataaaaggttacaaaatataatttcagacttgtagaaaatttgtaaaaatagcacaaagattctcagatgtgcttcatccagatgcagcaaggggtaacattttaccatgtttactttatcatcctctattattatttttctgaattgtttcagagtaaattgcagacatgatgtccctttactcccaaatactttaatacatatttctcgaaactaggaatagtctgttacatgatcccagtatagttagcaaaattaaaaattagcattaaggctgagtgcggcctcccacacctgttatcccagcactttgggaggctgaggtgggaggattgtttgaggccaggaattcaagaccagtcttctcaacatagaccctgtctctacaaaacaaacaaacaaacaaacaaacaaacaaacaaaagtactaaattagccggtgtggagcatgcctggagtcccagctactcagaaagctagagtcaggaggatcacttgagcctagaagttccaggctgccatgaactatgatcatgccactgcagtctagtgtgaatgacagagtgagacccccatctcttaaaataaaagagagattagcattgatacaataccatttttttttttttgagacagagtctcacactgtcgcccaggctggagtgcggtggcgcgatcttggctcactgcaagctccgcctgctgggttcacgccattctcctgcctcagcctcccgagtagctgggtctacaggttcccgccatcacgcccagctaattttttgtatttttagtcgagacgggttttcaccgtgttagccaggatggtctcgatctcctgacctcatgatccgcctgcctcggcctcccaaagtgctgggattacaggcgtgagccactgcacccggccgatacaataccatttttaatctacagaccttattcacattttaccaattgcttcatgacatccttcatgatgaaagacaaaagttcttgttttctgatctaccatctaattctagaacactcattatatttcattgtcatctggaacagctcaccttgccatttttttttttttgagacagttttgctcttgttgcccaggctggagtgcaatggcatagtcttggctcactgcaacctccatctcccaggttcaagtgattctcctacctcagccacccgagtaactgggactacagacatgccccaccacgcacggctaattttgtatttttagtagagatggggttgcaccatattggtcaggctggtcttgaactcctgacctcaggtggtctgcccgcctcggactcccaaagtgctgggattacagatgtgagccactgcgcccggcctcttctccatttttaaaagaacacaggccagttgatttgaatttgtctgatgtttccctttgattatatattttggtaggaacactatgaagtgatgttttgtccttcacagcacattttatcaggaggtgtataatgcctttgcttttactatgttttagaatgattttgctttgtttttttttttctgagacagagtcttgctctgtcgcccaggctggtgtgcagacgtgcgatctcggctcactgcagcctccgcctcctgggtccaggcgattctcctgcctcagcctcctgagtagctgggactacaggcgtgcaccaccatgcccagctaatttttatatttttagtagagacggggtttcactgtgttgatcaggatggtctcgatatcctgacttcgtgatccgcccgccttggcctttcaaagtgctgggattacaggcgtgagccatcgtgcctggccgattttgcttctcatgctaaaattattaatcagctcattctctgccattttatttagaggtttgaagtttggcttgattaatttctacagaattggggagagttttcccacctcccatttttcttgctttttccatttcctccttcctcagatacccccaaagttcaaaaccaaccaccccgattatgaattttcattttgtattctgaacatatagctaaaagcagagaattaagggtgaatgtttcatgttaaagtgattggacctgttgttaagcatatgaaataatatatttccttcaaaggctgactatactatagtgcatccaacatagcttgttgaatatctcagttctttttttttttttttttttttttttagctgaaatttgccacagggaaatatctctccagcctgggcaacatagtgagactctgtctcaaaaaaaaaaaaaaaattagccaggtgtggtggtgcacaactgtagtcctaaatacttgggaggctgaggagggaggatcctttgagcacaggagtctgaggctgcagtgagctatgattataccactgtactctagcctgggagacagagcaagaccccgtctctcaaaaaaaaaaaaaaattggtggtgaaatacacataccacaagatttagcattttaaccattaaaaaagtttgtttttggctgggtgtggtgactcacgcctttgggagtgatcccagcactttgggaggccgaggcggatggatcacgaggtcaagagatggagaccatcctgtccaaaatggtgaaaccctgtctctactaaaaatacaaaaaaaaaaactagctgggcatggtggtgtatgcctgaagtcccagctactcgggaggctgaggcaggagaattgcttgaacccagggggcagaggttgcagtgagccgagatggcgccactgcccgccagcctggagacagaacgagactctgtctcaaaaaaaagcttttttttttttttttttgagagaagggatctcgctatgtttcccaggctggtctcaaacttctggcctcaagcaatccttctgcttcggcctcccaaagtactgggattacaagagtgagccactgtacctggcctcatttttctattttgataaacacttttttttttttttttgagacggattcttgctgtgttgcccaggctggagtgcagtggcatgatcttggctcactgcacctctgcctcccgggttctctgcctcccgggttcaagcaattctgcctcagcctcctgagtagccgggactacaggcgtatgccaccgtgcccagctaattttttttgtagttttagtagagacgggttttccccatgttggtcaggatggtctcgaactcctgacctcaggtgatccgcccgcctcggcctcccacagtgctgggattacaggcgtgagccaccatgcctggctgataaacacttttaaggcttaacatgagctaagtattattttagaacagattgtctcaaccttggcactatagacattttgtccagaaaattttttgttagaggctgtcctgtgaatgcattttatccctgacctctacccactagataccagtaacacccctaccctgagttgtgacaagcaaaaatatttccagaaattgccagatgttccctgtgggcggtatgggtttgagaaccacttttctagataataggcatttgtagataatgaatactgagctaagtggaggagtaaatggttgaaatagactatgtggttaagtacagttacagagatataaaccaagagatgtggaagaatagcaaaaaatttccttagagagttgatagcaagtattttcccaagagagacagcaattctgagttgggtcattggggatggtggggggaaatgtgctgaggagggggaaatattctaggtggtggaacgggttatgtctagagatacggtagaggagcccttgggtgccttgagaaaaatgagataataagtatgattggagagaatatgggaggtagaattggaaagaaggatgctagttggggtcaggtttgagaaaggcttttttttttttttgagacggagtcttgccctgtcacccaggctggagtgcagtgcctcactcggctcactgcaacctccgccttctgggtttaagtgattcttctgcctcagcctcttgagtagctggcattacaggtgcgtgccaccacttccggctaattttgtatttttagtagagaccgggtttcaccatgttggccagactagtctcagaactcctgaccttgtgatccgccagcctcggcctcccaaagtgctgggattacaggcatgaaccaccacgcccggccgagaaaggctttttatgctatgctaaaatgtttcattttccccctttcattatagaaaatcaacaaatacttttaaagtctgtagagttatatgatcagctttttaaaagaatagtgatacagtgaaatggtaaaaatggtcaatggtgaatattaaactcaagaagataactctagcctgtaaagtaggaaaataggaagggatggagatttatataaaactaaaactagatgtcatatgttgcccttaaatcacatcaccctgtgtgtagacttcttcatcctcatttgtcaaaattctgacatattgtcaatactgatgaagattcttgatattcaaagcaggagtgaagtgggcaaaaatctgtattctaattttcattaccctaataatgtccttttaatttggagcagttctgtggcctctctttgtctgtcctgatcttgacatttttgaagagtatagaacaattattttttagaatgtatctctatttgggtttgtgtgatgcttctttatgattagatgaagggtatgcatttttggaagaaataacagaagtgatggtatgttgttttcagtgcctctgtaacaggagatgcatgacattggttggtcccattactgatgatggtaattttaatcacttgggtggtttccagtagatttttctatgtaaagtttatcatttttggccgggcatggtggctcacgcctgtaatgccagcactttgggaggctgaggcaagcagattacttgaggtcaggagtttgagaccagtctgaccaatgtggtgaaaccccatctctaaaaaaatacataaattagccaggcatggtggcatgcgtctgtaatcccagctgctcaggaggctgaggcaggagaatcacttgaaccctggaggtggaggttgcagtgagccgagattgtgccactgcacttcagcctgggtgacagagtgagactccgtgtcaaaaaaaaaaaaaagtttatcatttcccatttttattttgaaacagtcttgctctgttgcctaggctggagtgcattggcacaatctcagctcactgcagcctcaacctcctgggctcaagtgatcctcccacctcagtctcctcagtagcgtgttccaccacacccggctgctttttgtattttttggtagaggtggagtttcaccatgttgctcaggctggtctggaacccctgagctcaagggcactgatcacctcagcctcccaaagtgttgggattacaggtgtgagccaccacgcctggccctgaaaaatatttttaacggttacattatcatggagaattggatggtataaaacaatagcagttctcatatttgaaaataaattgatgtaatgaaacaaatgagaggatcaaataatattgtaaaaagaataaaaacccacatatggacaggtctgtggaaattgtattaaagactacctctcccagattgtttccgtttgttgcaatccatttaagaacagtttttgggctgggcacggtggctcacgcctgtcatcccagcactttgggaggcccaggcaggtgtatcatgaggtcagatttcaagaccagcctggccaacatggtgaaaccctgtctctactaaaaatataaaaattagctgggcatggtggcatgcacttgtaatcccaggtactcgggaggctgaggcaggagaattgcttgaaccaggactcgggaggtggaggttgcagtgagccaagatagcaccactgcactccagcctggcctgggctacagggtgagactcagtctcaaaaaaaaaaaaaacaaacaaaaaacagtttgtgggaaaaaacaatccttgtgtatgacataatttgctgcttttcccatttagaaaatttaaaaaatacttatttgagatggggtctcactatgttgtccaggctagggtgcagtggctattcacaggtgtgaacatagtacactacagcctcgtactcctggccttagcatcttgagtagctgggactgcaggtgcacatcacagtgcctcgcttactttttccatttttgtctgttgatcctctctctcttcctttggggtaaaaattgtggcttgtgatggtggtttgtggggaaagaaaaagttggtaagctacaagctmtgagcctttaatgtgtttttgttaaccatgcagacagacattagatacatagatacaacatagatgagttaaatttgaaagaaggcaccaaactttgttactttaaagcaggatttctcaaagggacactgttgacattgatttcagaagtgagattttcatggtttttaatgttattattataatggtatggatagtgttttgccctctaagaagtagctaggagtgtttccatagatgcatttagtttatatcacttatgtattctgtctctattttgtaagaaaattgcctatgaacagaattttttctgtatgtggatttaatgtcttcttctaaaggaaacatgggtgtggttcacatttccttagttttgagtagcatggcttaagttgtgatccaattttaaaaaatcagttgaataaataaatagaaaataaaaggataatttctgtactaaaaaagtcagctggacagttaaaacatctccttttattcgtaagtttttcaataaaaattgttaaaagcagtattcatttgtgtaatgatataatctttgttattgttttatgtgcttttctaaaatgcaggaaacataaggtaaggagaagtctttccttaccctgggaccagatgtctatgaggactgttgacttttctgctataaacaggatgataaattaacagtggtgtgataggtaaagtagatttgttatgacatatcttccattaagcgataataacttgatttttacttagttgatgaaataaaataactttgaaaccttgggtaacatgaaattgaatcaaaatattttcaagttatggaacatagtgttattaatagaatggagtgttgaaaaagcactggattatgctttctgtaacttttagttctgggtcttatgataactgtgaccctgagcctcagtgttttccttttaatctgtagtgatattttttagttcagtctctcattttaaactgcttttagctctaaaattttatctcagtgacctgttgagttatataacaatcgtatcaggtaacctagataagaagaggaaggcagtaacatttcagaaatacagtttggggttgggaatccttaagtgatccagacttctcctttggtccgaagatagtgtgaataaaacagctgagggatgtgggcatcaatatattgcagaggaaaaggttatttccaggagtggatttgcagctactcttaaatctattatgttggggctgggcactggggctcatggctgtaatcccagcactttgggaggctgaggcgggcggatcacctgaggtcaggagttcaagaccagcctggccaacgtggtgaaaccctgtctctacaaaaatacaaaattttgccgagcatgatggcgggtgcctataattccagctacttgggaggctgaggtgagagaattgcttgaacccaggagtcggaggttgcagtgagctgagattgtgccattgcactcctgcctgggtgacagagcgagactctgtctcaaaaagaaaaaaaaaatctattatgttggatagatggtcttttccagaagcaaattttatagatggaaagcattttaattaatctagtaaaattctctcattttacaaatgaggctccctctacctctctccccctctccccctctccctctctccctctctccctctctccctctccccacggtctccctctccctctctttccacggtctccctctgatgccgagccgaagctggactgtactgctgccatctcggctcactgcaacctccctgcctgattctcctgcctcagcctgccgagtgcctgcgattgcaggcgcgcgccaccacacctgactggttttcgtatttttttggtggagatggggtttcgctgtgttggccgggctggtctccagctcctaaccgcgagtgatccgccagcctcggcctcccgaggtgccgggattgcagacggagtctcgttcactcagtgctcaatggtgcccaggctggagtgcagtggcgtgatctcggctcgctacaacctcacctcccagccacctgccttggcctcccaaagtgccgagattgcagcctctgcccggccgccaccccgtctgggaagtgaggagcgtctctgcctggccgcccatcgtctgggatgtgaggagcccctctgcctggctgcccagtctggaaagtgaggagcgtctctgcccggccgccatcccatctaggaagtgaggagcgccttttcccggccgccatcccatctaggaagtgaggagcgtctctgcccggccgctcatcgtctgagatgtggggagcgcctctgccccgccgccccgtctgggatgtgaggagcgcctctgcccggctgcgaccccgtctgggaggtgaggagcgtctctgcctggccgccccgtctgagaagtgaggagaccctctgcgtggcaaccgcctcgtctgagaattgaggagcccctccgcctggcagccgccccgtctgagaagtgaggagcccctctgccccgctgccaccccgtctgggaagtgaggagcgtctccgcccggcagccaccccgtccaggagggaggtgggggggtcagccccccgcccggccagccgccccgtcggggaggtgaggggcgcctctgcccggccgcccctgctgggaagtgaggagcccctctgcccggccaccaccccgtctgggaggtgtgcccagcggctcattgagaacgggccatgatgacagtggcggttttgtggaatagaaaggggggaaaggtggggaaaagattgagaaatcggatggttgccgtgtctgtgtagaaagaggtagacatgggagacttcattttgttctgtactaagaaaaattcttctgccttgggatcctgttgatctgtgaccttacccccaaccctgtgctctctgaaacatgtgctgtgtccactcagggttaaatggattaagggcggtgcaagatgtgctttgttaaacagatgcttgaaggcagcatgctcgttaagaatcatcaccactccctaatctcaagtacccagggacacaaacactgtggaaggccgcagggtcctctgcctaggaaaaccagagacctttgttcacttgtttatctgctgaccttccctccactattgtcctatgaccctgccaaatccccctctgcgagaaacacccaagaatgatcaataaaaaaaataaaaataaaaataaaaaaaattaaaaaaaaatgagaaaattgagctctcctgaggttgcagtttgcttaacagcatagatctaattagtaattaggactagaaccaaggttatctgactcccagttcaaggttcttggtacagtaccgtgtttttaactagtccattaggttgttttctgtgtattttataacacttctgtaagaaagtggaatatttttctctaaggtatgttaaaactcttgttcgagaaaatacagtaaaggatacctgttgtatcttaaagtgatttttatgtttttctgtcaatgccacaatctgaagaaagtaaattagctacacttctattgctgtgacaatagattatttagaatcttcttgattacttgtattattgttcccgtgcttcagagctgtttccttgctatttaaaatcattatggtatagcccagaggctaagggggttttctaagagtatgcaatttgtcattgacatagtttttttgtttgtttttgtttgttttgtttgtttttgagacagagtttttgctctgttgcccaggctggagtgcaatggtgtgatctcggctcactgcaacctccacctcctgggttaaagcaattctcctgcctcagcctcccgagtagctgggattacaggcacccaccaccacacctgactaatttttgtagaggcagggtttcaccatgtcggcgaggctggtcttgaactcttgacctcatgtgatccacctgcctcggcctgtgaggattacaggcatgagccaccgcaccctgccaacacagttgtttttgattggaaaagtttattttcctaatctcaaagtagcttgtatctgttctttattgtgaaatgcagtttctacattgaatttgtgtagtctgtagttttgactgttttaagttcaataactagcttagtagtatacttgttagaggtcagagtaggttaactactagaaagaacagtccttctgcttactgtactaggaggaagtctgtggtggagggaaaaaaggagtaaaacaattccagtcttctgtaaaatttgagtaatttctttctctactccttctacatgaaaaatacatcttatttgatttttgcatcacatgccttctatatgtgttggaatctggatcaccatttcttcattacttgtgggtttttgttgtgaaaaatgtggagtaagttagaagttgactgtagaataggtaacattctcttaaattctttgatcagagtgagcagagtccagaagcttggctcagacttagggaactcatgacacttctcttaatatcctaagttcatgacatgtctcttaataccctaagtgtacaatacaatagtagatcaaggaaggcagaggtatctggcagacttagaagtaactgttcataaaaacaaggatcagtatgtttctacaagataatgatttaaagttgagccaggattagttatacctttaatataaaaaattgaaatagcttatttaatctgttctaggctatagtatacggagctaggtattaaaacattctctatatatttaactcttttttttgagacagggtctcactctgtctcccaggctagagtacagtggcatgatcttggatcactgcagcctagacctcctgggcacaagtgattctcccaccttagcctccacagtagctgggactacaggcctttgccaccacacctggctcatttttgtattttttgttgagacggggtttcaccttgttgcccaggctggtcttaaacccctaagctcaagtgatccgcttgcctcagcctcccaaagtgctgggattacaggtgtgcaccactgcgcccaggctatttgacttttttattctgtaaaattgcaagcatattcagaaataagaaaatagtataacggggccgggtgtggtggctcacgcctgtaatcccagcactttgggaggctgaggcaggtagatcacgaggtcaggagttcgagaccagcctggccaacatggtgaaaccccgtctctactaaaaatacaaaaattagccaggcgtggtggtgggcgcctgtaatcctagctactcgggaggccgaggcaggagaatttcttgaaccagggaggcggaggttgcagtgagccgagatcgtgccactgcactccagcctgggtgacagagcaagactcattttttttttttttttttttaaaaaaaagaaaaaagaaaatagtataatgggttgggcccggtggctcacgcctgtaatccagcactttgggaggccaaggtgggcggatcacctgaggtcaggagttcaagaccagcctggccaacatggtgaactcttgtttctactaaaaacacaaaaattagctgggcatggtggcaggcacctgtaatcccagctacttgggaggctgagttaggagactcacttgaacctgggaggtggaggtttcagtgagccaagattgtgccattgcagtccagcctgggcaacaagagcgagactccatcccaaaaaaaacaaaaaacaaaagacaactatatatatatatataaaataacgaaaccccctaagtacctgtcacccagcttcaacaattatcatcttgcagttagttgaatttggttaacacttacccttcagtggattattctagactaaatttccaaacataatcatattgtattgaagtgttttttgaacaaactatactatggggtatttacctaaaatgaactatttgcaaaaagataagttgattttttttcttctggtgccagtacacatcataattgtagttaaaagctattatcctcacattaaagtttaatttttaacacattatgaaaatttaaaacttacagcaaagctttaaaaattttacactgaacaccaatattattaacatctagattctacctttaacattttactcttcttttttttttactcttcttgttttatcacatattgatccatctgtccaactctccattgatgtaacatttcattttattttcttattcatttcaaagtaaattacagatattagtatagttgaggttcagtttttaaagtcatattttcaactaattgtttttcctgttttgaaagactgttatatctgaagttccacattatgacaactcatagtctctatggttccagtgcttcccattttgaacttttctttcatgttctacgaacctttattaaaatatttagagctatgtacaagtaatatatacagtatttagctaaaactaagtagaatgaatgagggttttgcttgtgtgtttattgcagtctttaaaaaaaatctcttctagtgagtcaatgtgtatcttttttttttttttttttttttttgagacagagtcttgctctgtcgcccaggctggagtgcagtggcgtgatctctgctcactgcaaagctccacctcccggattcatgccattctcctgcctcagcctcccgagtagctgcgactacaggcgcctgccaccacgcctggctaattttttttgtattttttgtagagatggggtttcattatgttagccaggatggtcttgatctcctgacctcgtgatctgcccgcctcggcctcccaaaatgctgggattacaggcatgagccaccgcgcctggccaagtcattgcgtatcttaagatggtacactaaactaatatgcttgccattggtgacaacatagatgaacctggaggacattatggcaagtgaagttagccagacgtggaaaaaataatacttcatgacttcaacctatatgtggaatctaagaatgccaagtctgcaaaagaagagagtagaaaagtagttaaatgggtaggaaggtgggagaaatggggagatattggttaaaggttaccaagttggaatcacgtaggatgactaggtctagagatctaatgtacagcatgaacactatagttaataatactgtatcatgtactggaaagttgttaaaagagtagatttcaggtgttttcagcacacacagaaaaagataactatatgtggagatgggacattttgcttgaccatagtaatcatttcactatgtatatgtatatcaaaacattcatgttgtacactttattgattgattgattgagacagggtctctcgctgttgcctcagctggagtgcagaggcatgatcacagttcactgcctgcttgacctcccaggctcaagcgatcatcccacctcagccccccaagtagctgggactacaggtgtatgctaccatgcctggctaatttttatagtttttgtagagatgggttttgccgtgttgcccgggctggtattgaactcctgagctcaagcaatctgcccgcctctgcctcccaaagtgctaggattacagatatgagccactgcgcctggccataccctttaaatatatacataaaaagaagaatgcctttaaaaattttccatttaacaattactctcagggccaaaactcactgtttaagtattttgctcttttactttgatcttggtgttctatgtagtgctaaaatatactttcatctccatatgactgcttgtaacaaaaagctgttcaccacattatgaactccctgaatacacacaataatcatatagtaaatgcttgttgaataaacaagacaaaattcatcagtttttatccttacttaattttttgaacttttccttgaacttctgttatcaaacttaatacatgaacaacagaaagatgctacggatctatgtagtacaaagtaaaatatgaaatttacacactaaatatttctgtagcatattttcagaagtaagtaattgaatataaacagaagcaagcatattctatttttttattatttaagtgggaaatattttaaaatcttatgtcatatttgctttagatttcttttaaagaattaaaacattacagatagagttgaagcctcatgggttattttaatgttttctacataaacatgtttccatatacataaaccttatttagaattttttcagtttatttatttatttttattattatactttaagttttagggtacatgtgcacattgtgcaggttacatacgtatacatgtgccatgctggtgtgctgcacccactaacttgtcatctagcattaggtatatctcccaaagctatccctcccccctcccccctccccccaccccacaacagtccccagagtgtgatgttccccttcctgtgtccatgtgatctcattgttcagttcccacctatgaatgagaatatgtggtgtttggttttttgttcttgcgatagtttactgagaatgaaattttttcagttttatacgtttatgtaagtggcaccatacagtacatattattttgcaacttgccttttttttttttgtttgtttgctcaatgttgtttttaggattttgatgtaactccagatctgcactgtccaatacaatagccactaactatctgtggctattgagtactggaaatgtagctagtccacattgagatgtgctagaaatatatttgtacatggaatttcaaatatttagtattaaaaacatgtaaaatatctcactaaaagtttagtatccctaagaatctgaaatagaaaatgctccaaaacccaaaattttttgattactgacatgactctcaaaggaaatgctcaaaggtttaatgcaaatattccaaaatctgaaaaaatctgatatattgaccacatatggaactgataatagtttggatgtattggattaaataaaatgtaaaaattttaccagtggtttccttttttaaaatatggctactagaaaatttaaatatatatttgaaatgccttacattatatgtctgttgggcagcactgatctatattgcccacttttcattcctgtttatttattattattttatttttatttttattttttgagacagagtctcgctgggtcgcccaggctggagtgcagtggtgctatctttgctcactgcagctgctgcctcccaggtccaagcaattctcttgccttggcctcccaagcagctgcgattacagctgtgcaccaccacacttggctaatttttgtatttttagtagagacggggtttctctgtgttggccaggctggtctcgaactcctgacctcaagtgatccacctgccttggcctcccaaagtgctgggattacaggtgtgagtcactgctcccagccttcactcctgtttagtattaagttatatagataatagtttgctactggtggatagttgttgttttttttttttacgaatttggtgctactaaagactgttctcatgagcattcttaaacatgtctcctttgcacatatgctagagtttctttctccctaatggttcttctgatttatacttccactggcagtttgagaatgttcttgttctgcagttcttcatcctggtcgatgtttttgtgtagataactgtaatttaatacttaaagtcaaaagcataaggaagcattggtaattatttaagtgaatataaaatgtcagcttatttttctcagtgaatcttttgtaatagtcaactcacattgcctattttttattgtagtgcttctgatctgaataaataaatttaaaatttaacagccatgttatgtatcttattagtaggcagctgcagttatgcaaccaaagaatgtcccatctttaagttccattagcttgaaaaagaaatggcagctttacgtcatggaatactgtgctgccactaaaaatgatgttttagaagaatatttaatgatgcagaaaaatattcacagtatcttaatggaaagaaaagattataaagcagtaaccatttcgttttgttaaaatcaggtctatgttagctttttttttttgagatggaatctcgctctgtcacccaggctaaagtgcagtggcgtgatctcggctcactgcaacctccgcctcctgggttcaagtgatgctcctgcctcagcctccctagtagctgggattacaggagcatgccaccacacccggctaatttttttgtatttttagtagagatggggtttcaccatgttggccaggctggtcttgaactcctgacctcaagtgatccacccgccttggcctcccaaagtgctgggattacaggtgtgagccaccgtgcccggcgagcatttccttacatgcttatctctggatggtcagattgtaggtaacttctattttgcacttcacactttttttttttttcttgagatggagtttcgctcttgttgcccaggctagagtgcaatggcgtcatcttggcccactgcaaactccgtgtcccgggttcaagcgattctcctgcctcagcttccagagtagctgggattacaggcgcccgccaccacacctgcctaatttttagtatttttagtagagacagaggttcaccatgttggccaggctggtctcgaactcctgacctcaagtgatccactcgcctcggcctcccaaagtgctgggattacaggcgtgagccaccgtgcccagcctgtacttcacacttttaatatttcattttctgtagtggatttactattaccagggaaggggaatgcaaggaggagggaagagttcttaacctaaaattttcatagttggaatattattataggaaagaagagattgaatgaggtgtcactgttcccatgtttaaagataagtcaattgggaggccgaggcaggtgaatcacgaggtcaggagttcaagaccagcctggccaatatggagaaaccccatctctactaaaaatacaaaaattagctgagcgtggtggcaggggcctgtaatcccagctactcgggaggctgagggaggagaatggcttgaacccagagggtggaggttgcagtgagctgagatcgtgccactgcactccagcctgggcgacagagtgagactttgtctccaaaaaaaaaaaaaaagataatactttccttctattcaatttcaggcttttcttaagttacaaatggaaccagccaaactatgttattgcttacccattgtttttccagcgttagaggagtttttcaaagaatattttttgatttagagattattttatttattatctatttagagattattcatcatttagagattgccatttaatttcagtaagagttccatttgcatctgatattttttagtttcggagaaaggaaatggtggagaaatggattcatctccaatcctttggaataaaattcagacagtttaagctctagtctcaacttgatttaatttggaattgcatgatgtggtgtcagatttgggttcacatccagttctcttgctgtgtaaccttgggaaatttacccagcatctgagttgtttcttcatgtgtgcagtggagacaataccaagatgaagatttcatgagatgtctagtgtagacatctatttttcagagtggatgcatttaacagttggatgctgaatttataagagtatggatttcataaaaagagcataaatttcatgatatgatgtatatatcaaaagatataggtcgggtgcagtggttcatgcctgtagtcccagcactttgggaagttgaagcggatggatcacttgatgccaggagttcgagaccagcctggccaacatggtgaaacttcgtctctactaaaaatacaaaaattagccaggcgtggtggtgtgtgcctgtaatcccagctacttgggaggctgaggcaggagaattgcttgaacccaggaggcagtggttgcagtgagccgattttgtgccactgcactccagcctgagtgacagattgagactccatcttaaaaaaaaaaaaatgatggctgaataggaacagctctggtctgcagctcccagtgagaccaaaatgtagaaggcgggggatttcttcatttccaactgaggtacccagttcatctcattgggactggttaggcagtgggtgcagcccatggagggtagcagaagcagggtggggcgtcgcctctcccggaagtgcaaggagcgagagatctcccttccccaagccaaaggaacccgtgagtctatgctatccggcacagatactacacttttcccatgatttttgcagtccgcagacccggagattccttagtgtgccaactccaccagccctgggtttcaagcacaaaactgggcatctgggcagacagtgagctagctgcaggagttttttttttttccccctcttcataccccagtggtgcctggaaccccagtgagatagacccattcactcccctggaaakggggctgaagccagggagctaggtggtcttgcttagcgggtcccactcccacagaacccagcaagctaagaaccactggcttgaaattctcattgccaacacagcagtctgaagctgacctgtgaagattgagcttggtgaggggaggggcgtctgccattactgaggcttgagtaggcagttttcccctgacagcactaaggaggctgggaagttcagactgggcagaactcaccacagcgtggcaaagtggctatggccagactgcgtctctagattcttcctctctgggcagggcatctctgaaagaaaggcagcagccccagtcaggggcttatagataaaactcacatcttcctgggacagataacctgtgggaaggtgcagctgtgggcgcagcttcagcagacttaaatgttcctgcctgctaggtctgaagaaagcagtggatcctgacaaggaggattctcctagcacagcacttgagctctgctaggggacagactgcctcctcaagcgggtccctgaccccagtgcctcctgactgggagagacctcccagcaggggttgacagacacgtcacacaggagagctcccgtgggcatcaggctggtgcccttctgggacgaagctcccagaggaaggagcaggcagcaatatttgctgttctccagcctccgctggtgatacccaggcaaacagggtcaggagtggacctttagcaaattgcagcagacctgcataagaggggcctgttagatgaaaaactaacaaatagaaagcaataatatcaacatcaacaaaaaggacccccacacaaaaaccccatcaaaaggtcatcagcctcaaagatcaaaggtagataaatccacgaagatgaggaaaacccagtgcaaaaatgctggaaattccaaaaacccgaatgcctcttctccttcaaatgaacacagctcctctctagcaaggccgcaaaactggacggagaatgagtttgacgaattgacagaactaggcttcagaaggtgggtaataacaaactcctctgagctaaaggagcatgttctaatccaatggaaggaagccaaggaacttgataaaaggttacaagaactgctaactagaataaccagtttagaggacataaatgacctgatggagctgaaaaacacagcacaagaacttcgtgaagcatacacatgtatcaatagtcaaatcgctgaagcggaaaaaaggatatcagatattgaagatgaacttactgaaataaggcatgaagacaagattagagaaaaaaggttgaaaaggaacaaacaaagcctctgaaaaaatatgggactatgtgaaaagaccaaacctatgattgattggggtccctgaaagtgatggggagaatggaaccaagttggaaaacacacttcagggtattatccaggagaacttccacagcctaccaagacaggccaacgttcaaatcaggaaatacagagaacaccacaaagatactccttgagaagaccaaccccaagacacataatcgtcagattctccaaggttgaaatgaaggaaaaaatgttaagggcagccagagagaaaggtcgggttacccacaaagggaagctcccagaggaaggatatctgggcagaaaccctacaagccagaagagagtgggggccaatagtcaacattcttaaagaaaaaacttttcaacccagaatttcacatccagccaaactaagcttcgtaagcgaaggaggaataaaatcctttacggacaatcaaatgctaagagattttgtcaccactagacctgccttataagagctcccgaaggaagcactaaatacagaaaggaaaaactggtactagccactgcaaaaacattccaaattgtaaagaccatcgacactataaagaaactgcatcaactaacggtcagaataaccagctagcatcataatgacaggatcaaattcacacataataatatgaaccttaaatgtaaaagggctaaatgccccaattaaaaggcacagactggcaaattggataaagagtcaagacccattggtgtgctgtattcagaagacccatctgatgtgcaaagacacacataggctcaaaataaagggttggaggaatattaaccaagcaaatggaaaaaacaaaaaaaaaaggggtgttgtaatcctagtctctgataaaacagactttaaaccaacaaagttcaaaaaaggacaaagaagggcattacataatggttaagggatcgatgcaacaagaagagctattttaaatgtatatgcttccaatacaggagcacccagattcataaagcaagttcttagagacctacaaagagacttagattcccacacaataatagtgggagactttaacaccacactgtcaatattagacagatcactgagacagaaaattaacaaaaatattcaggacgtgaactcagctctggaccaagcagacctaatagtaacctacagaactctctaccacagatcaacagaatatacgttcttctcagcacatcacacttattcactcaaaaccccacaactacatggaaactgaacaacctgctcctgaatgactgctggtaaataacgaaattaaggcagaaataaagaagttctttgaaaccaatgagaacaaagagacaacgtaccagaaatctctgggacacagataaagcagtgtttagaggggaatttatatcactaaatgcccccatcagaaagcaggaaagatctaaaatgaacaccctgatatcacaattaaaagaactagagaaaaagagcaaacaaattcaaaagccagcagaagacaagaaataactaagttcagagcagaactgaaggagatagagacatgaaaacctctccaaaaatcaatgaatcaaggagctggttttttgaaaagattaacaaaatagaccatgagccagactaataaagaagaaaagagagaagaattaaatagacacaataaagaatgataaaggggatatcaccactgatcccacagaaatacagactaccatcagataatattataaacacctctacgcaaataaactagaaaatctagaagaaatggataaattcctggaaacatataccctcccaaggctaaaccaggaagaagttgactccctgaatagaccaataacaagttctgaaattgaggcagtaattaatagcctaccaaccaaaaaaagcccaggagcagatggattcacagccgaatgataccagaggtacaaagaggagctggtaccattccctctgaaactattccaagcaatagaaaaagaaggattccttcctaactcattttatgaggcaagcatcatcctgataccaaaacctgtcagagacacaaccaaaaaaggaaatttcaggccaatatccctgatgaccatcgatgtgaaaatcctcaataaaatactggcaaacagaatccagcagcacatcaaaaagcttatccaccattatcaagtctgcttcatctctgtgatgcaaggctggttcaacatacgcaaatcaataaaagtaatcaatcacataaacggaaccagtgacaagaaccacatgattatctcaatggatgccgaaaaggccttcgataaaattcaacaccccttcatgctagaaactctcaataaattacgtattgatggaacatatttcaaaataataagagctatttatgacaacccatagccagtatcatactgaatgggcaaaagttggaagcattccttttgaaaaccagcacaagacaaggatgccctctctcaccactcctattcaacatagtgttggaagttctggctaggcaagagaaagaaataaaggttattcaaatagcaagacaggaaatcaaattttctctgtttgcagatgacatgattgtatatttagaaaaccccatcatctcaacccaaaaactccttgagctgataagcaacttcagcaaagtctcaggatacaaaatcagtgtgcaaaaatcataagcattcctatgtaccaataatagacaaacagccaaattatgaaggaactccctttcacaattactacaaagagaataaaatacctaggaatgcaacttacaaggggtgtgaagggcctcttcaaggagaactacaaaccactgcttgaggaaataaggacgcaaacaaatggaaaaacattccatgctcatggatgggaagaatcaatatcgtgaaaatggccatactgcccaaagtaatttacagagtcaatgctattcctatcaagctaccattgactttcttcacagaactaggaaaaactacgtagagccaaaacaatcctaagcaaaaagaacaaagctggaggcatcctgctacctgacctcaaactatactacaaggctccagtaaccaaaacagcatggtactggtaccaaaacagatatatagaacaatggaacagaaccgaggcctcagaaataacaccacacatctacaaccatctgatcttcaacaaatctgacaaagacaagcaatggggaaaggattccctgttttataaatggtgctgggaaaactggctagccatatgcagaaaacagaaactggaccccttctttagagcttatacaaaaattaactcaagatcgattaaagacttaaatgtaaaacctaaaaccataaaaaccctagaagaaaacctaggcaataccgttcaggacataggcatgggcaaagacttccatgactaaaacaccaaaagcaatggcaacaaaagccaaaattgacaaatgagatctaattaaagagcttccacacagcaaaaaaactatcattggagtgaacaggcagcctacagaatgtgagaaaatttttgcaatctatgcatctgacaaagggctaatatccagaatctacaaggaacttaaattacaagaagaaaacaactccatcaaaaagtgggtaaaggatatgaacagacatttctcaaaagaagacatttatgtggccaacaaatgtgaaaaaaagctcatcatcactggtcattagagaaatgcaaattaaaaccacaatgagataccatctcacgccagttagaatggcgattattaaaaaggcaggaaacaacagatgctggagaggatgtggagaaataggaacacttttacacttttggtggaagggtaaattagttcaaccattgtggaagacagtgtggctattcctcaaggatctagaaaccagaaatacaatttgacccagcaatcccattactgggtatatacccaaaggattataaatcattctactataaagacacatgtacctgtatgtttattgcagcactatttacaatagcaaagacttggaaccaactcaaatgcccatcaatgacagactggataaggaaaatggggcacatatacaccatgaaatactatgcagccataaaaaagattgagttcgtgtcttttgcaggtacatggatgaagctgtaagccatcattgtcagcagagtaacacagtaacagaaaaccaaacactgcacgttctcactcataagtgggagtcgaacagtgagaacacatgggcacagggaggggaacgttacacattggggcctgtcaggggttggggggcaaggggagggagtgcattaggacaaatataatgcatgtggggcttaaaacctagatgatgggttgataggtgcagcaaaccaccatggcacatctatacctgtgtaacaaacctgcatgttctgcacatgtatttcagatcgtaaagtaaaaaaaaaaagatatggaagttactatgcgcgttaataaaatatgtttatacctcctcccttaggtgtctattatgtagaacaagtttattacattctaatgataaagtaaacactctgttttcaaaggtggtgttatacgtttgtgtatcttttgccccgggcatgatgatttcatcgtttgtgtaataaatttaatactaccatagtctccccttattcacacgggataagttccaagaccccaatggatgcctgaaactgtggatagtactgaatcctatatacacttatgtttttttcctgtacactcatatttatgataaagtttaacttataaattgtgcacagtgagagactgacaataactataataaaatagaacaattataacaatatactgtaataaaatttatgtgaatttggtttcaaaatatcttattgtactgtactcacccttatgatgatgatgttagatgataaaatgcttatgtgatgtgatgaaggtaggtgaattatgttaggcattgtaatgcagcatgaagctactattgaccttctggtgttacatcagaaggaggatcatctgcttgggtggtcctgaatcatcacgtcctgatgatgtctgttgctggttgtcaggagcagacagtgtccatgactaatgggcaggcagcgtatatagcatgtatacactggacaaagggatgtctcatgtccacggctggacagagcaggagagtgcaagattttgtcacactactcagaatcgtgcagtttaaaacttaccaattgtttatttctggaattttccgtttaatatttttggactgcagttgaccacaggtaactgaattcatggaaagcaaaacaaccatggacaaagtgggattactgtattatttcagattttaattagcatttttcaaaactctgtctagctagtgcttgcattgtagaatttgtctgatttcatttttattgattagggaaataagctttatttttatctggagtgatttgtttctttgtgcttcctcaaaattgagtagtggctactgagtatatatcgaaaaggaaataaattattatgtcaaaaagatacctacatttgtatgttgattgtagcactgttcacaagattaaagatatggaatcaacctaagtgatgaagaaaattggtgtgtgtgtgtgtttgtgtgtatacatacacactgtggaataatactattcagccacaaaaaagaaaaaaaaatcatgtcttttgcagcaacatggatgggactggaggccattatcctaactgaaataactcagaaagtcaaatactacatgttctcacttacaggtgggaacttaaatggttacacatagaatagagtagaataatagacattggagactccaaaaggtgagagggtggcaggggggtgagggttgaaaaattacctattgagtactttgttcagtatttgggtgatgggtacactaaaatcccactttaccaccatgcaatatatgcatgtacgaaatctgcacttgtaccccctaaatatatacaaataaaagttttttaaaacacttagtaaatagcctgtcatagggaataattgaaaccatttcgtatctcactttaaaacctttaggctgggtgctgttgcttatgcctataatcctagcactctgggaggccgaggtgggtggatcacctgaggtcaggagttcgagaccagcctggccaacatggcgaaatcccatctctactaaaaatataaaaattagccagtcatggtggcacacgcctgtaatgccagctccttgggaggctgaggcgggaaaatcacttgaacccaggaggcggaggttacagtgagccgagatcacaccactgcactccagtctgggcaacagagcgagactccatctccaaaaaaaaaaataaaaataaaaataaaaaacctttttagttctgtttcaatgttatcttctttttatttaattatttttggaataagaaataatatttatatggtttgaacaccaaaaggtataaaagatatttttaaaggtataaagtataaaagttagaaatttcccccacttccctgttctctgttcccacagctgccagcagcttaccaccccccagcccaatcactgctactgatgcctaacctatctttccagagttctttgtgtgttcagtagcagttaaccacagatctttaatcattcccctttataccataaaaggtggcatgttatgtacacttgcctcccctttgctttttccacttaatgtgtcttgagaagctttccatatatcagtacatggaaaactttcttatattgttttattttaaatttatatacaataaatgcatggatcagaaaaataattgaatagtgggccccaaattaaatgattactctaatgatttgtagatgggtttagttaaagcactgggatatttagctacaggtataggaatgcatgattattttctgtcaggaaacctagattttgttcttctccccttctttatcaaaggtgaaatcagactcttatttaaaccaggattaagtattctttgcataataatatatatttgctttcccaagttattcttcaggaaagtcttgactctctagcaaactttgtttcttaaaatggaggttagcaggtgttggaaataaggtgagagttttaacacttaaaggaaactatataaagattagatatagtcagaaatttagaaaacattaggaaattcacagagagatggatcccccttttctaccctagattacccctgggctgcttaatggcttgtctttactattagattgtgagctccttgaggtcaggttttatctgttttttatttcaataccaagtgccaagaatatattcagcatttggtgtaaatattataaaatgagtaaatgaatgtgctcttgaatagaagttaactctgattttgggttaagtcccccgccccctttttttgagacagtctcactctatagctcaggctggagtgcagtagcgcagtctcagctcactgcaacccccttctccggggttcaagcaattcttatgcctcagcctcccaagtagctgggattacaggtgtgtgccaccacacccggctgatttttgtatttttagtagagatggggtttcaccatgttggccaggctggtcctgatctcctgaccttaggtgatctgcctgccttggcctctcaaagtgctgggattacaagtatgatctactgcgtctggctgattttgtgttaaaatcctttatgtcagttccagaagaggttaaatggaagttttcgaggcaagagatacttgtgaatttgacatgagtggcctttgttttgaaattttaatgctacacagatgctgtaaaaggattttttcaggccgggcgcggtggctcacgcctgtaatcccagcactttgggaggccgaagcgggtggatcacgaggttaggagatcgagaccatcctggccaacatggtgaaacctcatctctactaaaaatacaaaaattagccgggcgtggtggtgtgcgcctgtagtctcagctactcaggaggctgaggcaggagaattgcttgaacccgggaggtggaggttgcagtagagccgagatcgcgccactgcaactccagcctgggccacagagcaagactccatctcaaaaaaagggtttttcaaaaaatcatgtacaattagaaaattgtgtctcttaaatctatttgcttatgttattaatcccagattatgactgttctttcccctaaggcattagcctgttgaaagaaacagacctataggacttttgttgatgttaaagccagaccagaaatttagaaaatcaggatatttgccattttgataagaaaaccatttaatagttgaatataggaatttgcattttgagagtgtgtactaatttagattctccaggaatagaaccatcatctgaaaataaataagtttaaccagacggacaaggagtgatatgtagttttaggtggtaagactgtgatattgttaggttacatgtatctagggcaagatgctcaaatacaataagtatatacagactaggaactctagttgtctttttttaattaatgaaaagagggttttatgcttcatttctaaacattctcaaaggaatttatgttttgttgatgatctttttttatttatataaatttacgggggtacttgtgcactttttttttaaacatggatagattacagagccgtcaagtcaagcctttagagtttccatcacccaaataacacacattgtattcattaagtaatttctcatgatctcccacctcctgctctctcacctttccaagtctgttatctatcattccatgctctacgtccatgtgtacacatttttcagcatccacatgtgaatgagaacatgtgttattcccaccaacagtgtatgagtgttcccttttctctgcaacctcaccaacttgtgttattttttgtctttttagtaatagtcattctaactggggctggatgatacctcattgtgggtatttttaaaataaaaaaaaatttgtgtgtacataggtatatttatttatggggtacatgagataatattgatacagacatacaatgttcaataactacatcagggttgtatccatcaccaagcatttatcctttcttggtgttagaaacaatctagtttctaatctctaatagtttctaatctctagtagttatattaaaatgcataatgaattattattgactgtagtcaccccattgtgctatcaaatgctaggtcttattcattctatctaactatatttttatacatattagccatccccactgtgccaccatccccattagtgccctggcccccactacccgtcctagcctctggtaaccatcattctactctctatctctatgagttcaattgttttgatttttagataccacaaataagtgagaacatgtgaagtttgtttttctatgtctagattatttcacttaatataatgacctacagttccatccatgttgttgcaatgacaggatctcatacttttttaagggctgaataggactccattgtgtatgtgtaacacattttctttattcgtccgtctgttgatggacactcaggttacttccaaatcttggttattgtgaatagtgctgcagtaatcatgggagtgcagataactctttgatatactgatttcctttctttggggtacatatttagcagtggaattgctggattatatggtagctctctagttyttttttttttttttttttttcatttttgagacagggtctcactctgttgcccaggctggaatgcagtggcggaggttcacttcagcctcaacctcgcaggcttaggggatccacccacttcagtcttccaagtagctgggactataggcgcataccaccatgcccagctaggtttttgttgttgttgttgttgttgttgaggcagagtctcactctgtcacccaggctggagtgcagtggtgcgatctcggctcactgcaacctctgcctcctcggttcaagccattctcctgccttagcctcccaagcagctgggattacaggcgcccaccaccatgcctggctaacccagctagtttttaattgttcgtagagatggggtttcaccatgttgtctagactggtctcgaactcctcgactcaagtgatcctcctgcgttggtgtctcaaagtgctgggattgcaggcacaaggcaccgtgcctggtcagaatttttttttaagggtttctcctttgtaaatttcttattcatatcttgaattgattttctgagtttcttgtattggttttcagacttttcttgcatctcagtgacccttaaaatcaatattttgaatattttatctgggattttgtggatttcattttggttaagatctgttgctgcagaatcgtgttcctttgacagtgtcatattaccttggtttctgatgtttcctttgtcttttcattgatttctgtgcatgtgctgtaacagtcacttcttatctttgaatttactttcatggtgaggggagatttcttcctgaagatgtgactataatgttggttgggccttgcttctgggtgcgtgcagtagtgaagtctctgtatgatttattttgagacagctctgttgcccaggctggagtgcagtggcacattcatagcttgcttcagcctcaaagtcctgggcataagtgatccttctgcctcagcctcctgagtacctaggactacaggcgtgtgccaccatgcctggctaattttcaattttcttttagagatgggggtctcattatattgcccaggctggtcttgaactcctggtctcaagcaatcctctctccttggcctcccaaaatgttaggattacaggcatgaaccaccgtgcccagcctctgtatgatttctttggctataaatagcattaatggtgtctgtggtttccttgatgtcttagcttgagtttatttgtggaggctgaagttgcgctggggattggaatgcctaataggcctgtctttaggtttcaatggtagtgatggtgggctaagcatgtctatccatgtgccctggggcagtgtgtgctggtaactgtgttggcagttccaggcaggctgattcttgggcttctgagtgactttctcagatgcctgttgtaatggtgtaccaggtgggtgagctggctcttgagctcctgggcaactggcatggcatagtttatggtggtagtagttttgttgagatactcttgtgggtcccaagcactttgcatttgtgttagcagtggttacaatgagatccaggccagtaaggtggtacttgcaggcatgaggcagctgaggcggtactggtagggtgttatccctgacctctgtcccctgggagaagtactctggtgtttcagagtgtttcaggtagtgggtttggttgtggaatcccctggtaacctggatcctgcactgtttctcagccaggtcaaagcctggtagagctggactgggaaagcttgcactcaggcccccacagtggtgtaatgtcatgataggcggggtggaatgatcttcaggctgctggcaaaatgcttgggtgagggatgagtgccactgctgagatcctgccatggggaagttgggcctggtcccaggagtgagttgtgttcctttcatgccccagtccaggcggagttccttcctcttgtccctgctgttcagtcagaactctgcagttcttgcctagtccctaaatcatcccagggtcgggtcatataagccccatccagctcaagacttaagcctccagggcaattaatcgtgctcaaatcctgggggtggtgtttgcttctagcactggtggtggctgcatcccacaccaggcagagccaccccatccccgcccctactcacactctgcctctccaaacagcagcccaagtttccctaatggctaggactggccctgttgcttccccgtactgctcacagttatgagctgagatcctgcatcgtgtcttgttacagctgcttaggtttcaaaaatggcatgggacacagaatgtgttccctccctgaaacagttctttctcacagtcttccagtcattccctaaattaattagattcagggcttaagagggtcagggtgctctactgaggactggattgtatggtagtggaccacagaaaaatactcaccctctcccatattggggaatcacttctggttccctgtgggtcccagccacacaggctctctgttttccttttgcttcctagattttggtttttgctgtcgcttttctgttgaactcctgtgttccctctgggataatatatccaaagtgtcattgtctacacaattttagctcttgtacctggatgaggcacgcttgaaattcttgcagtcatccatcttttcctgatcttgtttcttctgccccattccccaggttcctccagggtctcacagttcccctgtatgtgggaaaggcagttttctttctgcccaatcctgcttctcctttgtccacccagatgaggtttccgctagaattgctacttaaagtggttctgtggaacattttgtagcagagaaaatcagggctgagggagcaccataaaggttagaaaagattagaacattaggttagaaaatctgaactactctacctgtcttgattaggaggattagagttgatgttggatgggtttgttggtttattttccacttatctatcagaatgaagaacttactgccttttcttcttagttggtctaatatttatcactttaattatttttaagtgtacaattcagtggcattaaatatatttataatgtatcatgatcattactacctatgcccaaaactttttcatcatccccaacaaaactctatatccaaaaaaaaataaaaccctctatatgtacatggaacaattaagttgggcccctatcttgcaccatataaaacagttaaatgcatcaaagatcttaacgttaacagctaaaattataaaactcttagcagaaaacatttgggctgattttcatgacctgggatttggcaatgatttcataaacataatgtagaaagcacaggcagcaaaagaataagtaagttggacttcattaaaaatttaaaaatttttttacatcagaggtcactatcggctggatgtggtggctcacacctgtaatcccagcactttgagaggctgaggcgggtggatcacttgaggtcaggagttcgagaccagcctgaccaacatggtgaaaccctgtctctactaaaaatacaaaaattagctgggcatggtggcgcgcacctgtagtcccagctacttgagaggctgtggcaggagaatcacttgagcatgggaggtggaggttgtagtgagctgagatcgtgccactgcactagaacctgggcgagagcgcaagactccatctcaaaacaaacaaacaaacaaaatgaagcaatccccccccccaaaaaaaggtcactatcaagagaataaaaagaaagacaactcagaatgggagaaaatatttgcaaatcatatgactgatgagggtttaatatccagaatgtgtaaagaacttttactgagcagcgaaaagaaaacccaatgaagaaatgaacaaaggccttcaagaaatgaacaaaggccttcaatagccatgactttacttttttaaatttaaatttaaattttttgagacaaagtcttactctcttgcttgggctggagtgcagtggtgtgactgtggctcactgcagccttgatctcccagactcaagtgattctcctacctcagtctctggagtagctaggatgacagactcacactaccacatgtgactttgtgtgtgtgtgtgtgtgtgtgtgtgtgtagagacagggtctcactatgttgctcaggctggtcttgacctcctgggctcaagtgagcctctcacttttatttttatttgtagtagagatgagatcttgctaatgttccccaagctggtctcgaactcctgagctcaagcaatcctaccttcctcggcctcccaaagggctgggattataggcgtgattcactgtgcctggcctagtttctttgttttaatttttttcctccccatttgtcttttgagtttccctgagaatctgtcttgctgctgtctcagttgtcattcactgttattacactggaaccctattgatgtagtggtaaggaattagggaggggaagtgttttgtaatctcatgattaaatgtcatttcttttttttttaattggtcctgagtccctgaattgtgactctcagaagtgtttcttagcccttgccctcccacttagatgagacaggaaggctataagcctcgggggttttctaattgtctttcctcttggtagataatggtgtgagcatatttgaatatagtttctttcctctcctcctgctcaaggcacaaggaaattttcctcaaatatttgcagtgaaaacatactaaaacccttgtaggattcctggaggtaaaacctaggaaagtgtaggggcccctctaagactgggatgtcaggatttttaaactctcaaactaatccatatttggcctccagaagttgtcagtttctacttgagtgtttctgttctaggaaagctgtgatattctgtatctgtctttctagttttttttggtggtggtttgccttgtgacctcagtttttggattgatctaagataaattactgattttcagttttctcagcgttttttcttgtcaggatagaagtgaggacctccaaaatccttacatattatagctgcctggtgagttttgtttgtttctttttttaaaaaatttttttttttttttttttttttttgggatggagttttgcgcttcttccccaggctggagtgcagtggcgcaatctcggctcactaaaacctctgcctcccaggttcaagcaattctcctgcctcagcctcccaagtagctgaaattacaggtgcccgccactatatctggctaattttttttatatttttgatagagatggggtttcgtcatgttggccaggctggtcttgaaatcctgacctcaggtgatctacccacctcggcctcccaaagtgctgggattacaagtatgagccaccttgcctggcccgttttttcttacttttagtaaaaataacctcacgtaaactgtcataggtgtctgtgggcttatttttgatgttctcctttgttggaaattcttgtgaaataccttccaggtcttagtctttgtgaggatcaggttctgctttcaattggatgttttaagaattagttttaaaataatttgtttttcttattattagcaccctatgtttagttgctgtacttatttggatagtgtggtaagcacagtggcttaggcatgagaaatataactagagatctcataattttatgtgtttataaagtgttttatttaaaaattaaataattgcaaatgagtggataaagaaactgatatatatatatctgattatatatatatatatctgattatgtatatatatctgattatatatatatgatggaatactacccggctataagaatgaatgaattaatggcatttgcagtaacctggatgggattggagactattattctaagtgaagtaactcaggaatggaaaaccaaacatcgttatgttctcgctcataagtaggagctaagctataaggatgcaaaggcataagaatgacacagtggcttttggggactcagagggaaagggtaggaaggagatgagggataaaagactacaaattgggttcatgtgtactgcttgggagatgggtgcaacaaaatctcagaaattaccactaaagaatttactcgtgtaaccaaataccacgtattccccagaagcctgtggaaataaaaaattaaaaaaattgcaaatgtaaataagacagtaacaaagatggcaaagaacaaagatgaaaaagtatgctgtattacctgaaagtgcttttatggatatcttagcttatccttcgtccatttaaatattgttagttttagtcgggaacatgcctgtaatcccagcaccttgggaggctgaggcgggcagaccacttgagaccaggagtttgagaccagccaggccaacatggtgaaacccgtctctactgaaaatataaaaattagccgggcgttggggcgcatacctgtaatcccagctatttaggaggctgaggcaggacaatcacttgaacctgggaggcggaggttgcagtgagacgagattgtgccactgaactccagcatgggtgacagagtaagaccctgtctccaaaaaaaaaaaaaaaaaaaaaagacacaaaagagaaacaaaaaaaacatattgttagttttgatgattatctactagggtaagtacttttctactcattaaattccattagtgactgtgccttgatttccctgaaaggatgcagtatagagtaggcttttgattggagatagacttcctgattttccacttagtatttaggagtgaaaattattattattattatttattgttttttttttttttggagacagggtgtcactgtatcgcctaggctggagtgcagtggcttgatcctgactcactgtagccttgacttcctagggtcaagcaatcttcccacctcagcctcctgagtagctgggactacaggcacgtgccaccacagccggctaatttaaaaaaattctgtagagatgggatctcactatgttgttcaggcttgtctcaaactcttgggctcaaatcatcttcccacctcagcctccctaagtgctgggattataggtgtgagccactgcacccagccggaagtgcaaattatttaactcctttattttattcagcaaataaatgtctttctgagcctcagtttcctgtaataaggttcttataagttttaaatgaggtcagtgtgcattaaatgtacatgttagaatttggtaaggttagtaagaaaaccaaagacatgtggaccctttacaaaaaattccagcatttaccctaagagatgctttttaagtggttgaaatttggtggcatggaggaaatgtatatgggctcgtatcacatttgggagtaaaattaaggcatgaaatttaaacaaaaaataaaattgtgggtacatagtaggtgtatatatttatgggatttatgagattctgagacaggcatgaaatgtgtactaatcacatcatgtaaaatgggctgtccatcccctcaagcatgtatcctttgagttgaaaaacaatccaattttattctttcaggtattaaaaaatgtacaattaatttaatacagtaaataatacattaatttgatctcaaactcctgacctcaaatgattaattagattaattaatgtattatctattattatatacaccctgttgtgccatcaaatactaggccccccccccccttttttttttttggagacagagtcttgccctgtcgcctaagctggagtgcaatggtgcgatcttggctcactgtaacctccgcctcctgggttcaaatgattctgctgcctcagcctcccgagtagctgggattacaggcgcccaccaccaagcccagctaatttttgtatttttagtagagacggggtttcaccatgttggccaggctgctatcgaactcctgaccgcgtggttcgcccgccgcggcctcctaaagtgctgggagtacaggtgtgagccactgcgcctggccaaatactaggtcttattcatgctttccaactgtttttttttttgtacccattaaacgtcaccacatcttgccccccctcgcacttctcttttctttctactctgtgtctccatgagtttgttttgatttttagattccacaaataagtgagaatatgcaatgttggtctttctgtgcctggcttatttcacttagcataataacctctagttccatccatgttgttgcaaatgacgggatctcattcttttttatggctgaatagtagtccattttgtgtaactaccacattttctttatccattcatctcttttgatggatacttaggttgcatccaaacctggctattgggaacagtgctgtaataaacatgggaatgcaggtatccctttgatatgctgatttgctttatttctggtgtatacccaagcagctggattgctggatcatatggtagctcaatttttagttttataaggaacctccaaactgttcttcgtagtggttgtcctatttcacgttgttgccaactgtgtatgaggattttcttttctttacatcattgccaacatttgttattgcctgtcttttggatataagccatttcaactcaggcaagatggtatctcatggtagctttgatttgcatttctctgatgatcagtgatgtagaatgctttttcatatgcctatttgcaatttgtatgtcttcttttgagaaatgtgtatccacattttttgcccatttttgattggattattagatttttattctgtagagttgtttgagctacttacatattctggttattaatcgcttgttagatggatagtttgcaaatactttctcccattctttgggttgtttgttcactttgttgattgtttcttttgttatgcaaaagctttttaacttgatgtgatcccatttgtcaagttttgtttggttacctgtgcttgtggggtatggttcaagaaaattttgcccagactaatggcctagagagtttccccaatgttttcttgtagaggattcataaattgaagttttagataaaattctttaatccattttgattttatttatgtatagagcaagagataggagtctagtttctttttctttttttttttttgaggtggagtttcggctcttgttgcccatactggagtgcaatggcacggtctcagctcactgcaacctccgtctcccaggttcaagcgattctcctgcctcagcctcccgagtagctgggattacaagagcccaccaccatgcccgtctgatttttgtatttatttatttttatttatttatttatttatttatttagttttttgagacggagtcttgctctgtcacccaggctggagtgcagtggcacgatctcggctcactgcaagctccgcctcccgggttcacgccattctccagcctcagcctcccgagtagctgggattacaagagcccaccaccatgcccgtctgatttttgtatttatttttatttatttatttatttatttatttatttatttatttatttatttagttttttgagacggagtcttgctctgtcacccaggctggagtgcagtggcacgatctcggctcactgcaagctccgcctcccgggttcacgccattctccagcctcagcctcccgagtagctgggactacaggcgtccgtcactgtgccggctaattttttgtatttttattagagacggggtttcaccgtagccagaatggtctcgatctcctgacctcgtgatccgcctgccttggcctcccaaagtgctgggattacaggcgtgagtcattgcgccaggctaatttttgtatttttaatagagaccggatttcaccatgttggccaggctggccttgaactcctgatctcaggtggtctggccgtctcggcctcccaaactgctgagattacaggtatgagccactgcacccggcctggagtctagtttcattcttctgtatatggatatccagttttcccggcaccatttatttatttatttttatttattttatttttttttgagacagagtctcattccatcacccaggctggagtgcagtggtgtgatgtgggctcactgcaacctctgcctcccggattcaagcagttctcctgcctcagcctcccgagtagctgggattacaagctaatttttatattttgagtagagatggggtttcaccatgttggccaggctgatctcgaactcttgacctcaaatgatccacctgcctcggccccccaaattactgggattacaggcgtgagccaccgtgccgggccagcaccatttatttttattttattttacttatttttttgagagtgagtctccctatgttgcccaggctggagtgcagtggtgctatctcatctcactgcatgcagcctctgcctcctgcgttcaagcgattctcctgcctcagcctcccaagtagctgggattacaggcacccaccatgatgcccagctaatttttgtatttttagtagagacggggtttcaccatgttggccaggctggtctcaaactcctgacctcaggtgatccttccgccttggcctcccaaagtgctgggattacaggcatgagccaccatgcccagcctggagtctagtttcattcttccgtatatggatatccagttttcccggcaccgtttacttatttatatttatttattttattttttttgagacagagtctcatttcatcacccaggctggcgtgcagtggtgtgatctaggctcactgcaacctcttcctcctgggttcaagcaattctcctgcctcagcctcctgagtagctgggatgacaggtgtgtactaccaccatgcccaactaatttttgtatgtatgtatgtatgtatgtatgtatgtatgtatgtatgtatgtatttgagacagaatcttgctcttttgtcgaggctggagtgcactggcacgatctcggctcactgcaacctccgcctcccaggttcaagcgattctcctgcctcagcctcctgaggagctgggattacaggtgcatgccaccacgcctggctaatttttttttcgtatttttagtagagatggagtttcaccatgttgcccaggctggtctcgaactcctgaccttgtgatctgctcacctcagcttcccaaagtgttgggattacaggtgtgagccagcgtgcctggccccagcaccttttattttatttattttatttatttttctgagagtgagtctcactgtgttgcccaggctggagtgcagtggtgctatctcccctcactgcaacctctgcctcctgggttcaagtgattcttctgcctcagccttccaagtagctgggattacaggtgcctgccaccatggctggctaatttttttttttttttttttttttttttagcatagatggggtttcaccctgttggccaggctggtctcaaactcctgacctcaagtgatccgtctgctttagccttccaaagttctgggattacagatgtgagccactgtgcctggccccagcatcatgtattgagcctttttcttttccccagcatatgttctcggcacctttctagaaatagaaaatgagttcaccgtagatgtgtggatttgtttctgagttctgtattctgtccattggtttatgtgtctgcttttatgccagaatcatgctgttttggttactataactctgtagtataatttgaagtctgataatgtgattcttccagttttgttctttctgcttagtatagttttgggaattctggaacttttgtagttccgtgtaagttttaggattgttttttctatttctgtgaagagtgtcattggtattttgatagggattgcattgaatctatagattgctttggatagtatggacagtttaacaatattgattcttccagtccatgaacatgaaatatctttacattttttggtgtcctcttcaatttcattcagtttgcttttcagattggtcactgtcaatgtttagaaatgctgctgatttttgtatattgattttttatactgacagtttactgaatttgtttatccgttctaatagtttttttgtagagtctgtaggtttttctaaatataagatcatatcatctgcaaataagggtaatttgacttcttcctttcccttatttctttctcttgtctggttgctgtagctaggacttccagtagtactatgttgagtaactgctggaagtgggcattcttgtcgtgatctggatcttagaggaaaggcgttcagtttttcccctcagtttgataccagttgtgggtgtgttgtatatggcttttattatgttgaggtatgttcctcctaaacccatttttttgagggtttttatcatgaaggaatgttgaatattatcaaatagtttttaagcatcaattgatataatatggtttttgttcttcattctgttgatatgatgtatcacattgatttgcatatattgatcccctcttgcatccaagggataaactccacctggttacgatgaatgatctttttaatgtgtctgatttgctagtattttgttgaggatgtttgcagcaatatttatcagagatattggcctgtcattttctttttttgatgtgtttttgtcaggttttggtaacagggtaatactggcctcacagaatgtgtttggaagtattgcttccttttattttttggaatagtttgagtaggaatagtattgatgcaggaattttctcggcccctttgttggacttgtgacaggggcgaatgtttactcagcctgccgtgctcaaccccttgttggagggtgcatgtgagtgagtgagtgcgggacctggccagctggtgggggcactgacacagcagcaagccctgtgcagggaccacggccagaccaggcacaagcgagtgagtgtgggacccagctgttctgagcaccagcaggagcaggcctgtgcacagcacccaggttgatggggaggggggtggtgtctgtgaccccgaggcccctgagggggtgttaacagtgctcctttagttctgctgtctgctgatggctgtgtgttaacaagttggcctcttgccttgtcatgtggggtggctgccctccactggtgagggcaaagggctggtgtgacagtcttttttgggtacctgcactcagtgggtcctgagctcttgtctggcatccaagaagaatgaggttgagtggacacttgaaggatggtgaaggtgaagaattttattgagcagtgggaatggctcagtggagaggggagctggagaggggatgggaagggctgatctccctgaagtccggccgtttcttccctaagtcatgctgtctcctttcccaaagtttggccatcttctctccgaaattaagctgtttctctcctctctaccaactgaatctggggtctttataagcataggatcctctttataagcacaggatgggggcggggcaggctgtagaagttttggaaaaggcaacattctattggtaaagagacattattcaaacagaaccaatcgggagagagcggacaaacaggaatagaagttttcactttgggctgtgggtttcaggctttttggcttgaacgtggggtttcaccagggactgcccttgtcttcctagaatttctctgcctcctgcctctatcagtattagatcttctttaaatgtttggtagaattcagcagtgaagccatcaggtcccaggcttttatttactgggagaatttttattatggtgtcaatctcgttatttgttatagctgtgttcaggttgcagatttgttcatggttcaatcttggtagattgtgtctaggaatttgtccatttcttctaggttttccagttcattagcatatagtttttcatagtagccatgaatgaacctttttatttctgcagtattggttatcattgtaatgtctccattctcatctctggtttatatatttggatcttcttttttttttctttttttttttttactctggccaaaggtttttaaattttcttttaacttttacaaaaaccaacattttgttttattgatattttgtattattttctttatttcagtttcgtttgcttcactctgatctttattatttcttctaattttggggttggtttactcttgcttttcttattctttaagatgtgttgttaggttgtttatttgaagtatttcttcttttttcatgtaggcactcacagctataaacttcccttttagtaatgcttttgctgtatcccataggttttggtatgttgtgtttcagtatcatttgtttcaatgaattttccaattttcttcttaatttttgcattgacttactgatcattcaagaacatattgtttaatttacatgtatttgtatacttttcaaaatttctcattattgatttctagttttattccgttatcagaggagatgcttgatattatttcaatatttttaatgtcttaagacttgttttgttacttaacatatgttctatccttgagaataatccatgggctgaggagaagaatgtgtattctgcagcccttggatgaatttttctgtaaatatctattaggtccatttggcctctaatgcacattaagtctgatgcttcattgttggttttctttggaaggtctgtccaatgctgaaagtgggatattgaagtctccaagttttatcatattggggcctgtctctcccttttgctctaataatacttgctttatatatgtgagtgctccagtgttgggtgcatttatgtttaaaatggttacatcctcttgctgaattgactgctttatcattatatagtgaccctctttggcttttcctatagtttttgtcttgaaatctattttgtcttatattagtatagccacttctgcacttttttggtttccattggctttggaaaagatttctcgtaattctgtttgataaggacacatgttaggaggttttcaacacttcagtgagtagtaaacttgtaagtaaagcaggtatgaacagaatctcttgaattagtgaaaagtcaaaatcgttaattactgtttaatttaaaactgaaattataggtattaacaaataactatatgccttatactgtactttatttatttatttttccgagacggtcttgctctgttgcccaggctggagtgcggtgacgtgatcttggctcactgcagcctctgcctcccgggttcaagcaattttcatgcctcagcctaccgagtagctgggactacaggcatgcactggcacacccagctaagttttttgtatttttagtagagatgggatttcaccatgttgcccaggctggtctccaattcctgacctcaagtgatccacccaccttggcctcccaaagtgctgggattacaggcatgagccatcatgcccggccatataatgtactttaaacatgatgattttgaaactggaaacacacgcacatgtgagtaatttcttaaatggaattgaattaccttgaagaatcttagaaaaatgatgtttttaattttaaattagttttgcgtcatacatgtctttatttctcaaattttaaagaaaagtctatgaattaaagaaaataaaacttttcctgcatgaaagcaatgagtgtattatgtaccaaaaaggtagaagaaaaatatcttctgtaatattagctagatattacttactaaagatatttttggggtatatttattagcaatattttaatgcaattttaaacataattgtcatcatacttcatagacagtttatagcctgctatttttggttagcattgtagtatgagctattttccatattatttgaacttttaaaatttaatggttggtatgatattgtatgacttgtatgcatccttgtttacctagtctttattatacactttaattgattacagttttttttttttttttttgcttttgtgagcatctggcagataactttcttgagtaaagttattatgtagaaatattttctttgggccaggtgcggtggctcatgcctataatcccagcactttgggaggctgaggcaggtggaacatgaagtcaggagttcaagaccagcctggccaatatggtgaaaccccgtctatactaaaaatacaaaaatcagctgggcatggtggtgcatgcctgtagtcccaggtactcaggaggttgaggcaggagaattgcttgaacccgggaggtggagaggttgcagtgagccgagatcgaaccactgcactccagcctgggcgacagagcaagactccaactcaaaaaaaaaaaaaagaaaagaaaagaaaagaaatactttcttactttctttgtatagataaagggagatagaattactagatcaaagtctcttgatggtttttgccaatttgttttgtaaatgtatgtatcaccacaggctatctatgagagtgtctatttcatggaaacttagcctacaatgaatagtcattttacccctaaatatttgataagttaaaaaatgctatcacatttaacatttcataggctttaagaagttgcagttttatattcatttcttcatgcattttgtgtactatttcaaaagtttctataggggaatgagagcaaagtaatgtgtttttcattatttattttgctaaccaaacatatttaattactaaccaaaaggatgatcctaattaagccaacacttggaattattttcatgtaaaatgtctgtgatagagataattgaatttaataatgaaaaaagtattacagaaatttgctcattaaactgagcttgttttcagctaatccttctgcgaagtgataatgactttttttttttttttttaaataaagatgggggctcgctatgttgaccaggctggtcttgaactcctggcctcaagtgatcctcccatctccgcctctcaaattgctaggaatacaggcatgagccaccacacttggtttaatagtggaatttttattacacttttttatggattcgaggagaggtggcattgtacataacacattctaccgctaattttccatctttcacttttctcattgtgctttccttcccattccgttcctggtgttgaaccaatgcatcatttgtaaatttgtagacagtctgagtttttctgccataatctgttgtttcttcagacttcttctctggtttataagaaaactgttgttttaaaactctcagttttgtattttttatttcttattatactttaagttctgggatatgtgagcagaacgtgcaagttttttacataagtatacatgtgccatggtggtttgctgcacccatcaacctatcatctccattgggtatttcttctaatgctatccctccccttgcccccaaccccccaacaggccccagtgtgatgttcccctccttgtgcccatatgttctcattgttcaactcccacttatgagtgagaacatgcagtgtttggttttctgttcctgtgttagtttgctgagagtgatggtttccagcttcatccatgtccctgcaaaatatatgaactgatcctttttttatggctgcatagtattccgtggtgtataggtgccacattttctttatccagtgtaccattgataggtatttgggttggttccaagtctttgctactgtgaatagtgctgcagtaaacatatgtgtgcatgtgtctttatagtagaatgatttataatcctttgggtatatacccagtaatgggattgctgggtcaaatggtatttctaattctagatcattgtggaatcgtcacactgtcttccacaatggttgaacgaatttatcctcccaccaacagtgtaaaagtgttcctatttctccacatcctctccagcatctgttgtttcctgacttcttaatgatcggcattctaattggcatgagatggtatctcattgtggttttgatttgcatttctctaatgaccagtgatgctgagctgtttttcatgtttgttggccatgtaaatgtcttctttggagaagtgtctattcatatcctatgcccactttttgatagggttatttgtttttttcttataaatttaagttctttgtagattctggatattagccctttgtcagatggataaaaaaacactatttttttaaaaaattttccaattcctcatcggtaaaaaagcagtaaaacattcatggtaatgatcatggcctatagttttttttttttttaagtgacattaggatttaaaactggtatgaaacctaatcatttattttagttagctaatatcaggatttagatttatttttttgacccaattgcagataggcagatcagatctcatagactgccatctgcctcaagctccttttgtagttatgtgaatgtgagcctgaaggctgaacccacttttctctaatggagatttttttttattacactttaagttctagggtacatgtgcacaacgtgcaggtttgttacatatgcatacatgtgccatgttggtgtgctgcacccattaactcgtcatttacattaggtatatctactaatgctatccctcccccctccccccaccccatgacaggccccggtgtgtgatgttccccttcctgtgtccaagtgttttcattgttgaattcccacctatgagtgagaacatgcggtgtttggttttttgtccttgcgatagtttgctgagaatgatggtttccagcttcatccatgtccctatataggacatgaactcatccttttttatggctgcatagtattccatggtgtgtatgtgccacattttcttaatccagtctgtcattgatggacatttgggttggttccaggtctttgctattgtgaatagtgctgcaataaacatacatgtgtgtgagtctttatagcagcatgattgataatcctttgggtatatacccagtaatggggtggctgggtcaaatggtatttctagttctagatccttgaggagtcaccacactgtcttccacaatggttgaactagtttacagtcccaccaacaatgtaaaagtgttcctatttctccacatcctctccagcatgtgttgtttcctgactttttaatgatcgccattctaactggcatgagatggtatctcattgtggttttgatttgcatttgtctgatgaccagtgatgatgagcatttttacatgtgtctttggctgcataaatgtcttcttttgagaagtgtctgttcatatcctttgcctactttttgatggggttgtttgatttttttcttgtaaatttgtttaagttctttgtagattctggatattagccctttgtcagatgagtagattgcaaaaattttctcccattctgtagtttgcctgttcactctgatggtagtttcttttgctgtgcagaagctcttgagtttaattagatcccatttgtcaattttggcttttgttgccattgcttttggtgttttagacatgaagtccttgcccatgcctatgtcctgaatggtattgcctaggttttcttctagggtttttatggttttaggtctgacgcttaagtctttaatccatcttgaattaatttttgtgtaaggtgtaaggaagggatccagtttcagctttctccatatggctagccagttttcccagcaccatttgttaaatagggaattctttccccattttttgtttttgtcaggtttgtcaaagatcaggtggttgtagatgtgtggtattatttctgagggctctgttttgttccattgttctatatctctgttttggtaccagtaccatgctgttttggttactgtagccttgtagtatagtttgaagtcaggtagcgtgatgcctccagctttgttctttttgcttaggattgttgtggcaatgcggtttaaccactctgaaaagatgtatttaaggacttttatctagactctatggtgaggtataacatagtgctggttgagtcagcttcaagtttttgtagagggaggaagagagtaacaaccatgtctggatttaataaaaagtttagcataagtaaatgtgtgctcttttgccttaagaaaatatttttcaatatataaaaaggattaatgagtgctgcctttcagatacttggtttggtgtgtttgaaacatcatttccaaagataggacatacacatttccagggatcatctctatgatatgactctagaaatgatgtagatttttaaaatcaatgtcagaacttatagacacaaatgtatgctttccttctaagtagtcactttgggagcccatatacataacagtggtgtcattcctgatgatatgttgggaactctcattttgtaaccagtttagaagtcatgcaagtaaataaatcttcaggattacttcagatttgggcaaaaaattagttttacccaacttgatcattttgcatttttcaccatatttgactctaagtgaaaactggctatttccaaaaatcatacccatcctgaggatgtgaagatatttttgggctgggcacggtagctcactcctgtaatcccagcagtttgggaggctgaggcagtagggttgtttgaggccagaatttgaagaccagcttggtcaacatagtgagactccctctctccaaaggaaaaaaaaaagtgaagttttttttttctttttcaaatgagtaggcagcattgtttagttatctgtttttttttcttttttttccactgttggacttctgtccattctctttatttgtttatttatttatttgagatggagttttgctctgttgtctaggccggagtgcagtggcgcgatcttggctcactgcagtctctccctcccggctcaagtgattctcctgcctcagcctcccaagtagctgggattacaggcatgcaccaccaggcccggctaattttgtgtttctaggggagacggggtttcaccatgttggccaggctggtctggaactcctgacctcaagtgatctgcctgtctagctcccaaagtgccggggttacaggtgtgagctaccgtgcctggcctgctgatcatactctcttgattttatttttgtactgtggtactgcggttgatggactgcactgatgttatccatatttttaaccttggtcacccacagtgtgaactcattaaatagctgactttgcaatttgattgctatgatttgggaatgagtgtggcagtcataattgtgcaggtttgctatcgtttcatttctagagaacttttctatggtgatctattgatgagataagatatagtatgacattatttattcctctttttgacttttggttctcaggaattttgggtgctgtgagttgacatgtagcatcatttcctcaggtctcattttctatctgagcacgattaaggacacagtgacctgatgataaatttttttgtacatctgactcttatctgaaagaatggttattggccaaatatggaaaccatacccacttggtacctttattctagaggcaaagtttgtttcaaaattttgtaaaacaaccctctccaccaaaagaaaacaaatacccacacaagatctctagttacggtgtctgttatatctcatttcttttccttccctaaatatactgagctattcttaactaaatacaggaaaattgtgcagaggaacacttactaagtgttcagtaaatgttttcatttttcttatgtgtatatctagaagtagaattgttgggtcattgagtaactgtttctgcgtaaatatctatacacgtgccatggtggtttgctgcacccatcaacccgtcatctacattacgtatttctcctaatgctatccctcccccaacccctaacaggccccagtgtgtgatgttcccctccctgtgtccatgtgttctcattgttcaactcccacttatgagtgagaacatgcagtatttggttttctgttcttgtgttagtttgctgagaatgatggtttccagctccatccatgtccctgcaaaggacataaacgcatccttttttatggctgcatagtattccatggggtatatgtgccacattttctttatccagtctatcactgatgggcatttgggttagttccaagtctttgctattgtgaatagtgctgcagtaaacatgtgtgcatgtgtctttatagtagaatgatttataatcctttgggtatatacccagtaatgggatggctgggtcaaatggtatttctagttctagatccttgaggaatcgccacactgtctgccacgatggttgaactaatttaccctcccatcaacagtgtaaaattgttcctatttctccacatcctctccagcatgtgttgttccctgactttttaatgttcgccattctaaccggcgtgaggtggtatctcattgtggtttttatttgcatttctctaatgaccagtgatgatgagttttttttcatatgtttgttggccacataaatgtcttcttttgagaaatgtctgttcatatcctttgcccactttttgttagggttgtttgcttttttcttgtaaatttgtttaagttctttgtagattctggatattagccctttgtcagatggatagatcacaaaaaagttctcccattctgtaggttgcctgttcactctgatgagatatatatatatattttttttttgctgtgcagaaggtctttagtttagttagatcccatttgtcaattttggcttttgttgtcattgcttttggtgttttagtcatgaagtctttgcccatgcctatgtcctgaatggtggtttgcctaggttttcttctagggtttttatggttttaggtcttatgtttaagtctttaatccatcttgagttaatttttatataatgtgtaaggaaggagtccagcttcagttttctgcatatggctagccagttttccaaacaccatttattaaatagggagtcctttctccattgcttgtttttgtcaggtttgtcaaagatcagatggttgtagatatgtggtgttatttctgaggcctcggttctgttccattgttctatatctctgttttggtaccagtaccatgctgttttggttactgtagccttgtagtatagtttgaagtcaggtagcatgatgcctccagctttgttctgtttgcttaggattgtcgtggccctgtggggtattttttggttccatatgaaatttaaagtagcttttttttccaattctgtgaagaaagtcagtggtagcttgatggggatagcattgaatgtatacattactttgggcagtatggccattttcatgatattgattcttcctatccatgagcatggaatgtttttccatttatttgagtcctctcttatttccttgagcagtggtttgtagttctccttgaagaggtccttcacatcccttgtaagttgtattcctaggtattttattgtctttgtagcaattgttaataggaattcactcatgatttggctctctatctgttattgttgtataagaatgcttgtgatttttgcacattgattttgtatcctgagacttcgctgaagttgcttgtcagcttaaggagattttgggctgagatggtggggttttctaaatatgcaatcatttcatctgcagacagagaatttgacttcctcttttccggattgaataccctttatttctttctgttgcctaaatgccctggccagaacttacaatactgtgttgaataggagtggtgagagtgggcatccttgtcttgtaccgggtttcaaagggaatgcttccagtttttgcccattcagtatgatgttggctgtgggtttgtcataaatagctcttattattttgagatacgtttcatcggtacccagtttattgagagtttttagcgtgaaggagtgttgaattttattgaagtccttttctgcatctattgagataatcatgtggtttttgtcattggttctgtttatgtgatggattatgtttattgatttgcgtatgttgaaccagctgtgtatcacagggatgaagccgacttgatcgtggtggataagctttttgatgtgctgctggattcggcttgccagtattttattgaggatttttgcatcgatgttcatcagggatattggcctgaaattttctttatttgttgtgtctctgccaggttttggtatcaggatgatgctggcctcataaaatgagttagggaggattccctcgttttctattttttggaatagtttcagaaggaatggtaccagctcctctttgtacctctggtagaattcagctttgaatctgtctggtcctggacttattttgatcggtaggctattagttactgcctcaacttcagaactttttattggtttattcagggattcgacttcttccttgtttagtcttcggagggtgtatgtgtccaggcatttatccatttcctctagattttctagtttgtttgcatagaggtgcttatagtattctctgatggtagtttgtatttttgtgggatcagtggtgatatcccctttatcattttttattgcatctatttgattcttctctcttttgttctttattagtccggatagtggtctgttttgttgatcttctcaaaaaaacacctcctgaattcactgatagtttgaagggtttttcctgtctctatctctttgagttcttctctgatcttagttatttcttgtcttctcctagcttttgaagttgtttgctcttccttctctagttgttttaattatgatgttagggtgttgactttagatatttcctgctttctcttgtgggcatttagtgctataaatttccctgtacacactgctttaaatttgtcccagaaattctggtatgttgtctctttgttctcattggtttcaaagaacttctttatttctgccttaatttctttgtttacctagtagtcattcaggggcaggttgttcagtttccatgtagttgtgcggttttgaatgagtttcttaatcctgagttctaatttgattgcattatagtctgagagactgttatgatttccgttctttttcatttgcttaggagtgttttacttctaattatatggtcagttttagaataagcacgatgaggtgctgagaagaatgtatattctgttgctttggggtcaagagttctgtagatgtctgttaggtctgcttggtccagagctgagttcaagtgttgtatatccttgttaattttccgtcttgtcggtctgtctaatattgacagtgggttattaaaatctcccactattattgtgtgagagtctaagtctctttgtaggtctctaagaacttgctttatgttctgggtgctcccgtattgggtacatatatatttaggatagttagctcttctcgttgctttgatccctttaccattatgtaacacccttctttgtctgttttgatctttgttggtttaaagtctgttttatcagagactaggattgcagcccctggttttttttgctttccatttgcttggtaaatgtttctccatccctttattttgaacctatgtatgtctttaatttgtttttaaaattattatatccatcctacttagtataaattggtttcttgttgtggttttgatttgcatttccctgatatgactaatgatcttgagcattttttcatgtgcttattggccattggtatatattcttttgagaagtgtatatctaagtcttttccccatttaaaaaatagggttgtctttttgttgtttaattgtaagaagtctttatgtattctggttaccagaccctcatgagatacaggatttgaaaatcgttttctctcattgtgtttgctgtgttttcactttcttgatggtgccctttgacatgcaaaagttttgacttttattaaaaatggggctgggcatggtggctcacacttgtcatcccagtgctttgggaggctgaggtggaggatttcttgaggccaggagtttcagaccatcctgggcaacataactggaccccatctctacaaaaaattaaagaaaaaatttagctaagagtatagttgtgtgctgcacttcctcaactaagaacataggtgtgtgccacaggtactcaagatgctgaggcgggaggattgctttagcccaagagttttgagacctcagtgagtcaaggtcacgccactgtgctcaagcctgtgtgacagagcaagaggctaactctaaggaaaaaaaatggggtaaacttatactttccttatttaaagttttaactccttaaaaccctgttgaattacagatacatctattatataacttaagagttgatgctataggctgggcacagtggctcacgcctgtaatcccagcactttgggaggccgagatgggtggatcacgaggtcaggagatagagaccatcctggctaacacggtgaaacctcgtctctgctaaaaatacaaaaaaattagccgggcgtggtggcgggcgcctgtagtcccagctacttgggaggctgaggccggagaatggtgtgaacccgggaggcagagcttgcagtgagccaagatcacgccactgcactccagcctgggtgacagagcaagactccgtctttwaaaaaaaaaaaaaaaaaaaaagagttgatgctataaaacttagttaatgaaatatttccctgggcgatggagctcttgcaagtcctgttgtattttttgttcatctttatgccagtcagttagacagttcttctatgtcaagcagaggatggaataataaaccaaaacactgcttagggctttcagagagtaagtgttcagtaaatatattcgataaattactgaattatttttttaaatgatggaaaggaaaatcttgccctctctttttctgggtgttggctagtataaatctttcttgaagtgataatctacatctatgttttgatttctaaggatttcccaaatataagctatatataagtgagaggaaataataacttaggtgcctaatgataatatgacaagataagtacaagggtcagctatttgttgtgaaatagcaatggatataatttaaatatgaatacctttttgctgtttaatcccccaaattttcttttgatttcttttaaaattcttttgtggtaggtaggtttattgtttcttaagaattaacttaagggtagtattttctgatacatttttaagtaacatgaagtttaacttctgtttaaacacatcatatagagtacattgaaagacctcagtattttcgaaatgtttagtaagtaatatcagcagtttccttaaatgatattttaatcctaggtaagtgtacaggtaggttgtgttactcatatttttatattcttagtgaaatagaattcttttttttttttttttttgagacagggtctgactgttgccttggctagagtgcagtggcatgatcttggctcactgcaacctctgcctcacaaggctcaagccatcctcccacctcagcctcctgagtagctgagaccacaggcatgagccacccatgctctattatgagccaccacacctggcctaaaattcgttttctttaatattttttctttctacacccacaactgtaacatttcccttagtttttactttgaatgtgcatactcttacacgacttacagtatggctatattttcagtttgctagagctttacaattaatttaaaacatgaaaggctaattaagggaattctttaaattttgttttaatagtgaaagcaagttgaatacattggtgcagaagcttcatgacttccttgcacactcatcagaagaatctgaagaaacaagttctcctccacgacttgcaatgaatcaaaacacaggtaaattgaaaaagaatgtgctataccttctagtcttttttctattttttttttacacttatggaggtaaccatttattttattcagagagcagcttttaaaagagatttcagtttgtggaaaatgacagattagcaagctttatagaagcccctattatgtatcttagctatatctgatacaggagattttaattttggtaagtatgactatagaaagcttagaaaaggaagcatttatggttttatatgtaatggaaatgtgttatagaatggctagtgaatgttgactgtgaaaaaatagtattagaagaggcaggagtagtataggaatgttttgtcctagcaatcattcatgtattaggagttaaatttttatttttatttttgtgatggagtctcgctctgtcacccagtctggagttcaatggcatgatcttggctcactgcaacttccgcctcttgggctcaagctattctgctgcctcagcctcctgagtagctgggatcacaggcgtctgccaccatgtttggctaattttggtatttttagtagagactgggtttcaccctgttggccaagctggtctggaactcaagtgatctgccctcgttggcctcccgaagtgctaggataacaggcatgagccatcacacccaacataagagttaaatttttatgttgtttgataatatccctgagtagatttggtgtatttattttttaaaataaaaccacttaacacctcctctctacctccctgtctctctcttttaaaaagatatatatatatatatatatatatatatattttttttttttttttttttttaaagagacgaggtcttgctttgtcacccagactggagtgtagtggtgtaatcatagctcactgcagcctcagacttcttgggcttaagcaatcttctcacctcaccctcccggtagctgggattacaggtgtgtgccaccatgcctggttaatttaaaaaaaaaaaaaaaaatttttagagacatggtcttgctatgttgtccagactggtcttggacttcctggcctcaaatgattctcctgcctcagcctcctgagtagctgaaattataagcatgagccattgtacctggttcccttttttaaaaaacattttgtatcatgtgacagttagcattttcaggttttcaagggtaactacaatacacatgcacacagacacacacaatatgtacaaaaaaagtataagagagttatagtgaaaagttcaaccatatgtgtaattagagttctagaaggaataaagagacttggttaaaagtcctatttggagagatacgggctgagcattttttaaaaagtgatgaaaaacatcagactagagattcaagaagttttgtgaaccctgaacaggataaatataaagaaaactacagctaggcatgtcataaccaaactcctaaagaacataaaccgagagaaaaatatcttaagtagccagaggaaaaaaatacattattttcaaaggaataacagtaacactggcagctcacttaacaacagaaatgatagaaggcagatgacaatgaaattatttctttaaaatgtcaaagaaaagtgcagtcatgcatcacttaactatgggataggtttttttgagaaagcattgttgggtgattttgtcattgtgcaaacattatggagtgtccttacataggctactacacacctaggctatatgttatagcctgttgctcataggctacaaacctgtgcagcgtgttcttgtactgaatacggtaggtaatcggaacacaatggtaaatatttgtgtgtctaaacacatggaaacatagaaaaggtacagtaaaaatacagtattataatcttatgggaccaccgatgtatatgtggtcagtcattgagtgaaatgtctttatgcagcatgtgattgtaattgccagcatagaactgtatattcagtgaaaacatccttcataaatgaagggtggaataaggccatatctgggcaaacaaaaagtgagaacttgatgtcaacagacctacactggagtgaataactacactagaggaaattacaagttttctgaaatgagaaagaaaataatttgaaatggcaacaccaaaatacaggaagtaatgaataagaatgggaaagctaaataggtaggtaaactaaataacataaagttatttaagccacagtccctattcttatttcatcaattaccccagtagtgttcacagataagtttttcccccttaaattcaggatccagttcaagatttagtagtcctgtttctttggttttttaaaaatctgaagcagtttgtctgccttttgggactatgactttttttgaaatgtacaggtgtgttactttgtgaaatggccctcaggattatctgtttagttatggttagattcaggttatacatttttggcaggaatactacataaagtggtgttctgttctccatgcatcctgttacatggcacatgatgtgatttgcccctttactggtgatgttaacttaggttgtttggttatggttgtgtttgctaggtaaacccagtctaaagttatgatttattccattgtaactaataactaatttaatggggggcactttgagattactaaggtattctttttattatcaaaacttaatatgttttcttttgcaaatgaccacaaagtttgcagcttaaaacaacccaaatttgttattttacagttctgtaggttcggagtccggtgggccttgctggacccttctcgggctatcacaaggtcaaagtcaagatgttagtaggactaggttcctttctggagactgtagaaaaatccattcctaagctcattcaggttgttggcagaattcagttctttatgataatcggttagaggtccttctttctcactcactattggccaagaccccctcctagttcttttcaggtgtcttcatttcttctcacgtgatgccctccatcttcaaatccagcaacagcacatcaagtctctctcaagctttgaagctctctgacctagctttttgcttgctaattctgctgccacctgctaccagctggagacatttttctgtttttaaggattcatgtgattagattaggtccctctccctctcatctcctcctgattatctcttgagtttaagatcaactgtgccatattacataacacagttatgggagtgatatgtcatcacattgataatttctggggatttgcggtgtagaatcttgtgggccattcctagaaggtctgtttatcacagcatacatttgtgattcttagctgaataatttattcctatgatgggttcaaaatggtgatgttctaacttgtctttccttctatgtttattagttgatattttattgtaagggaggggttcatgttctaacctattcaattatttgtatcagtatatacttacaattttttccatgaatattctctgtcattatttattttgatcctgaaattgtatcagttttggctagtaggagcctcacctggatggctcctgctgacctttttacaaatccgcatcatttcttgaacactttctttctgtcccttcaaagtattcaaggcttgctttccattctctgttccccagccctacaatcagttattttttgcaagagttctgattccttttagtgggatatagtgtttagaaatcaagatcagggtgtgtgatgtgctcattgccaccaagatgtctttgtttccaagctctttcacagagaaagccaataatatgttttatattttcatgagttgatactgatacttttaattcaattccagtcttctttctagacttccccttttcatgtttttaacttctttctccaacagaaagaaacctggttcctattatccccaatttatttatttttatttatttattctttttgagatggagtctcactctgttgccaggctggagttcagtggcgtgatctcagatcactgcaacctttgcctcccaggttcaagcgattctcctgcctcagcctaccaagtagctgagactacagtcatgcgccaccatacccagctaatttttgtatttttagtagagacagggtttcaccatgttggccaggatggtcttgatctcttgacttcatgatccgcctgcctcgacctcccaaagtgctgggattacaagtgtgagccactgtgcccagcctatccccagtttatttatttatttttatttttatttttttgagatggagtctcgctgtgtcacacaggctggagtgcagtggcgccatctcagctcactgcaacctccgcctcctgggttcaagcgattctcctgtctcagcctcttaagtagctggaactacaggtgcacaccaccgtgcccagctaatttttgtatttttagtggagacggcgttttgccatctctggatggcaggctggtctggaactcctgaccttaggtgatccacctgcctcagcctcccaaagtgctctgattacaggcgtgagccaccaagcccggcctttccccagtttatttgtattcatttttctagtcctcattgtacccacagtttcagagttgttaaccatatcatcgcattaaagaaacgtaactatagttcagtatttctttaaagttctttttgtctttagaatgatgttacgttgtcggagtcctgtgttcactagttgaggaactccttcagtagtggtatctccagttggacaaacagatgtcactcacaaataccaattgtaaattctgggcagcatactgaaggctagatatcaacaaagtagataaactggaggggagtcaacacatggaagaagaagtggcaatggctgaattccccattgttaatcctttttgcttcagccaaggatcctcttagctccatctgtggcctttaagacttggataaaaatctacagtcttattggatgtgaaatcaaggaaaaaatttagggagaccacagcagctgtaacatgagtagagagatcccatctagaaaagagccacagaaygggaaaaccagattgcacgaaaactctcccaatagctctggtcctgttgcctaagtgcactccagattccaaccagcctggttaggactaaaagaacagaacaaaagctttgagttgtttggtactacagggtggaaagggtttggagtttcatttcaagtaagttaactatctgtttgtttggttggttggttttttttgagacaggttctttttctgttgcctaggctggtgtgcagtgatgccatctcagctcacagcaacttccacctcccgggttcaagtgattcttgtgcctcagctttctgaatagctgggattacaggcacctgccaccacgcccagctaatttttgtatttttagtagaggcagtgtttcaccatgttggccaggctggtcttgaactcatgacttcaggttatctgcctgcctcggcttcccaaagtgctgggattacaggcgtgagccaccacacccagcccagttgactttttatgttggccttgtatcctgtgaacttgcttaacgtacttattagttctaaatagtatttttccccctcttgtagattctttgggattttctacttagacagttatatcacctgcaaatagggatagttttattttttcctttccatctgtataccttttaatttcttttcttgcttcattatattagctaggattttctgtattttccagtattacattgaagaatgatgatgatagcagacatcctcttagtgttaccaattttagtgggaaaacattcagtctttcacagtgaaggatgtttgctttataggtttcttgtaaatgccctttatcaagttgaggaagttcccctctattcctagtttgctgagaatttttttaagcttaaatttctatttgatttctatttgtaattataaattcacatgcagttgtaataactaatatagagagagctcttatgcactttggcagtttccctcaatggtaacatataaaactagaatacaatatcacaaccaggaaattgacattgataaaatctattaatcaagattttgtcagttttactttgtgtgtgtgtgtgtgtgtgtgtgtgtgtgtgttaaagttctatacattttttttttacctgggttgattcatgcatctaccaccacagttgagatacagaatagttcatcaacacaggattcctcatcttggcattttataatcacacccacttccctccgcctacctctgcctatgcttaacacctggcaaccactaatctgtcttccattttgaaaattttgtcatttcaaatatgttaaataaatggagttatatagtaaataatcttttggggttggagtgttttcacttggcataattctgtggagattcattgaggttgttgtatgtatcaacaatcctttccttttaattgcagggtaatattccatggtatggatgtacagattgagtatccttaaccccagaatcagaaatctgaaatgttccaagatcggaaacttttgagtgctgacatgacactcaaaggaaatgctcattggaacatttgggattttcagattagggatgctgaatccctaatgtgaataaaccagaatagtgcaaatatgctagaatctgaaaaaatccaaaatttgaaacacttctggtcccatgcattttggataaggaatacgcaacctgtaccacagttgtatttgtattgttttttttttttttttattgaaatggagtcttgttttgtcacccaggctagagggcagtggcatgatcttgactcactgcaacctccgcctcccaggttcaagtgattctcctgcttcagcctccggagtagctgggattacaggcaagcgccaccacacccggctaatttttgtatttatagtagagacgaggtttcaccatgttggccaggctggtctcgaactcctgacctcaggtgatccacccacctcggcctcccaaagtgctgggattacaggtgtgagccaccgcgcctggcctgtaccacagtttgtttaaccatttatttgttaaagcaaatctgggccgattcctgatttcagttgttacaattaaagctggtggtgaatatttatatatacgtttttatatgaatttatgttttcatttctttgcaataaatgccaggagtgcattttgcagttcatatgatggttacacatttatttttattaaattaattaaactacatttacattttattttattttgggtagagacagagcctcactgtgttggccaggcttgttatgaactcctgacctcaggtaatcctcctgccttgtcctctggaggcccttggattacagacatgaatcactgcacctggtttgcatttttttttttttttactccattggactctatcagtgcttttatttatttattggtatttatttatttatttattttaacttttaggttcagtggtacctgtgaaggtttgtcacataggtaaggtagcatcactggggtttattgtttagattatttcatcacttaggtattaagcccagtacctaatagttatcttgtctactcttacatgttcatttttttaaaagaaactcctgaactgttatccagagtggttgtactgttttatattcccacagcaatgtatgagtgatccagtttctccacatccttgccaacactgggtgttaatactatttttaaattttagccatttgatatttatggtatctcattgtggttttaatttgcatttacttaatgagtaataaattctttttaaatagaaacaggatattgctctgttgcccaggctggagtgcagtggtgcaattatagctcactgcagcctcaaactcctaggctcaagtgatcctcctgcctcagcctctcgagtagctgagactgcctcagcctgtcgagtagccaagactacaggcacatgccaccatacccagctaattttttaatgttctgtagagacggggtctggctctgttgcccatgctggtctcagactcctggcctcaagcgatcttcccaccatggcctcccaaagtatttagattacaggcatcagccactgcatctggctggtaataaaacattaaacatctttattgaaatataatttacatgccatacaattaacccatttaaagtataaaattcagtggtttttagtatattgaatatttacacatatgtacaaccatcaccaccatcaattttaaaatatttttatcacctcaaaaagaaactccataccctttagctatcaccccctagctctaagaaatcactaatctagtttcttgttttgagttttttatttttatttttatttttattttttttttgagacagagtctcgttctgttgcccaggctggagtgcagtggctattttggcttactgcaacctctgcctcccaggttcaaatgatttttgtgccttggcctcccaagtagctgggattataggcgtgcgccaccacacctggctaatttttgtattttttagtagagacagggttttgccatgttggccgggctggtctcaaactcctggcctcaagtcatctgcccacctcaggttcccaaagtcctgggattgcaggcgtgagccactgcgcctggcctatttccctattttggactttcatatgaatggcatcatataatacgtgtttttgtggctgatttctttcatttagcgtaatgtattcaagatatctgttgtaacatgtcttagtactccattcctttttatggccacataatattccattatatgtgtataccatatttgtttatccatttatccattgatggacatttgtcttgttcccatgttttggctgttaggaataatgcggctgtaaatattggtgtacagttttttgtgtgtagccatatatttttgtttatcttgtgtatatacctaggaatctaattgctggatttatatggtaactatgttaaattgtttgaggaaatgtcaaactgttttccaaagtagagatactattttacttttccaccaggagtatataaagattgtgagttcttcacatccatgccaaccattgttaataacagactttttgattctagccattctagtgcatgtgaagtagtatctcattgtgattttagttttcaactgcctgaagggtaatgatgttgaacatcatttcatgtgcttatttgtagtttgtatatattccttggagaaacttctattcaaaccctctgtccagtctttttctttttgacagggtcctgctctgtttcccaggctggagtgcagtggcatgatctcagctcacagcaccctcaacctccctggctcaaatgatcttcccacctcagcctcccgagtagctaagactatgggtgtgtgccacagtgcccagctaatttttgtttattttttatagagatggggtcttaatttgttgaccaagctggtcttgaactcttgtgcttaagcaattcacccgcctcggcctcccaaagtgctgggattacaggcgtgagccaccgtgcccagcccctttgcccatttttaaaatgggtatttatgctttcattgttgatttgtaagaattctttatatattctaaattttttattgtaaaatatgcataacataaaaattgccattttaactaattttaaatgtacagtcctgtaacgttaagtaaaattgttgtgcattcaccaccaccatccatgtctagtactttttcatcttccccaagtgaaactctgtacccatcacatactaactccccaatcttccctctccttagccttgcaaacaccattctacattctcttcctaggaatttgactactctaggaacttcatatacgtataatcctacaatatttgtccttctgacatattttacttagcacaatgtgttgaaggttatccatgttgtagtatatctcaaaatttcatttcttttgaagtctgaataccattccattgtatgtatataccacattttgtttatctattcatatttcaatggacacttggataagatatataatttggaaatattttcccctattctttgagttgtctttatttatttttagagacagggttttgctctgttgctcaggctggggtgcagtggcaagatcatagttcactgcagccttgaactcctgggtacaagcaatccttccatctcagcctcccaagtagatgagactatagttgtgtgccaccatgtctggctagtatttttttttttttattttttagagatgaggtcttaccatgtagcccaggctgagcttgaactcctggcctcaggcgatccaccttggcctcacaagtagctgggattacaggcgtgagacactgcacccagttgggttgtctttaattgaagcacaagttactaattttgatgaacttttatttatctgtttttccttttgttgctcattcttttggtgtctttaagaatccattaccaaattgaaggtaatgaagatttacccccatgttttcttctaaaagttttatagatttagttcttaaatttaggtctttgatctactttgagttaatgttttgtatatgttgcgaagtaggggtccagcttcattttttgtaggtttctaaccagttgtctcagcaccatttattgaaagacaattctttcttcattgaatggtcttgccacccttgtcagaaatcagtgggactgttgggcatggtggctcatgtctgtaatcccagcactttgggaggccgaggtgggaggggtactcgggcccaggagttccagaccagcctggacaacacagtgagactccatctctattaaaaaaaaaaaaagccaggcgtagtggtgtgtgcctgtagtcccagctacttaggaggctgaggcagaaggatcacttgagcccaggagactgaggctgcagtgagccatgattgtaccactgcaccctagcctgggtgacagagtgagatcctgtctccaaaaaaaaaattaaaaaaaaaatcagctggtcatagatatatgggtttatttctggactcttaattctgtttgtccttttaccagtactccacggtcttgattgcattgttttacagttttgtgcaaagttgcaccaaagttgttgtgtagttttgcaaaactggcaatcaagtctgtgcagtactggcaaaattaggaagtgtgagtcttcatacttttcatttttcaaaattatctgcctattctgaatgttttcaattccctatgaattttaactctttgttttttcttggtagagatgaggtttcactatgtttctgaggctgttcttaaacttctgtcctcaagtgatccttccaccttggcctcccaaagtgctgggattataggtctgagccaccatgcctggtccatatgaattttggaatgagcttgtcaatttttacaaagaagtcagctgggattctgacagagattgcagcgtgtctgtagattagtttgtggagtattggtgatggcagcggtgggccgtctggagtggctgctgccatcacactggctgcagcagggagacgtggccagggctgcacggtctatagagttggtgggagccaggggcaagcaggagccctgccccttccaagttggagctccctgggtcctgctgcagctgcctaagcatggctgtagacctgggcatccctgtgctcttgagtcttgggagcaggctggagccccaccctcccaggtgcaactgcagctggccaaaccgtggctgcagtcccaggcctctcattccatggagcaggcaggagacccaccctcccgggtgcagctgcagtctcccaaactgcggctacagaaccttgccttctgctccacgagcaggcaggagccctgggtgcagcaggagccccgggtgcagccgcagccacccaaaccatggctgcagatctggtcctcctgctttatggagcaggctggagtcccaccctcctgggcacagctatagctgcccaaattgtgggtatagacctgggcctcctgctttatggggcaggcaggagccctgccccactgggtgcagctgcagccacccaaatcatgggggggctgcagacccaggtgtctctgcactcttggggcctgggaaggccccccttgctctcataggcttgggagtgcctgctcctgctgcctggcttcaccctgctattggcacctgctctgatcttgtggcaaagttggggccgagcctgggtgctgtcgtagcctggccaggtatccacatgcttggggaactgctgacatgccagccttctgctgccttgaccccctctggactttgggtactgacaaacatagggaagctgaggcagggctgagggcagttcagcactggcctgcaggtgcccccttgcatctacagcctgggcaccatgaatggcagcaggaggtagacaggttcctcagtggaaggtggcaggtccctggtgaggacccaccttcaggccagggaaagcctgaaggctggaggttgggctgccagttgcatggatcagagtgggaacttgtggtgccttttctgggcctgcctgtggaccaattggcatgcacatcctcccctctgaggcccataaaaaccccaggctcagccagagctgaacagatgtcaggatgaccagctgcagagaggagcaacccactctagggcctcctctctgctgtgagctgcagaggtgacaagatgaccttcctgcaaagaggtgccacacattctagggcctcctctttgctgagagctgcagagacgatgggtcgactttcctgcagagaggtactactcatactagggcctcctctctactgagagctgcagagacgaaggagagatgatggggagatgatgggatgacctgcctgcaaagagaagccacccactctcaggcctcctctctcctgagagctgtgcagatgacgggataatcagctgctgagaggagctaccctctctgctgatagctgaacacttgtagtaacgacttgcctagcagagaagaaccaccctctctgctaggagctgaacacttgtagtaatgacttgcctagcagagaagaaccaccctctctgctaggagctgaacacttgttgggataccttgactgtggaaaggagctgccccctttgggtttcctctgagctgttctattgctcaataaagcccctctttatcttgcttactctccacttttctatgcacctcattcttcttgggtgcaggacaagaacttgggacctgccagatgaggctaaaatagctgtaacacaaacagggctgagacatgccccttgctcaccttgttgcaggtgaagagaaggaaagaagagctgcagccctctggggagcccagacctgggagctccccaagccagggctgtgactccctctttggggccctgcctgcggttcctggtgtctccaaacttctgggtgccaccgtgttccctggtgccagctgtggatgctgcttgtggtgttcatggtccagctgcagcctcacagagaaagagctgatgcccgtgctggcacctggagctgcgtgccctgctgcagctgccaggatgtctgattgcgcagtgaccggaccccacacttgctcacataccccttgctgcttcatccagtcttccttggctatcataggacacaggccagtagcatgagccgagtgtagccggccaggccaaataggcgggacgagcccagcaggcctgagcaaaactctggcacaggtgccaccagccgcagatgtttctggccagaaaagtgacaccccaaagattctgtaacactggcatcataagaatgataaatcttatggcttggcctggtggctgaaggaattgtgtactttaaatgggtaaattatatggtgtgtaaattgtatctcaaggatgtttaatgttttatcactggcgaggtgcggtgacttatgcctgtaattccagcactttgggaggctgaggtgggaggattacttgaggacaggaatttgagaccagcctgggaaacatagccagaacccatctctacaaaacatttaaaaatcagccaggcatggtggcatgtgcctgtagtgccagctaatcaggatactgaggcaggaggatcacttgagcccaggaatttgaggcggcagtgagctataattgcaccactgcactccagcctgggcaatagggtgagactctgtccctagtaaaaaaaaaatgttatcttctaattcatgaacatgaagtgtttttccattgatttaggtctttaatttctttcaatagcgttttataattttcagagtatgttttgtacttctttttttttcaaattatttccttctaattctgttataaatggaattcttttcttaatttcattttgagattattcattgcaagtgtatagacataacattgatttttgtttattgtccttgtacccatcaatcttcctgaactaattttattcccatagttcttttattattattattattattttttgagatagtcttgctctgttccccaggctggggtgcagtggtgcgatcttggctcactgcaacctctgcctcccaggttcaagcaattctcttgcctcggcttaccgagtagctgggattacaggcacctgccaccacgcccagctaatttttgtatttttagtagagacagggttttgccatgttggccaggctggtcttgaactcctgacctctggtgatccgcctgcctcggcctcccaaagttttgggattacaggcgtgagccactgcgcccagcctattccaataattctttagtggattccttaggatcttctatgtatgagataatgtcacattctaataaggatagttttattttttatttttttttgagacagagtctcgctttgttgaccagggtggagtgcagtggcatgacctcagctcactgcaacctctaccccctgggttcaagtgactttcctacctcagcatccctaggagctgggattacagggatgcgccaccacacccggcaaatttctgtacttttagtagagatggggttttgccatgttggctaggctggtcttgaactccggacctcgggtgatccacccgcctcagcctcccaaagtgctgggattacaggcatcagccaccgcgcctggccctctaataggaatagtttcataccttcattttaaatactgatgactttcaatttttttttttaacatgcatgctctgagtagaatccgtagtgcaaagttgaatagaaatggtgagagcagatttccttgccttgttcctgatcttaagggtttcggaaagcattcagtctgtcgccattaagtatgatattacctacctgtgggtttttgtagattttaaaatttcctttcttccttaatttattagaaaaaagatttttttttttttttgagacggagttttgctcttgttgcccaggctggagtgcaatggcacaatctcggctcactgcagcctccacctcctggattcaagtgattttcctgtctcagcctcccgagtagctaggattgcaggtgcatgccaccacgcccagctaatttttgtatttttagtagcaacagggtttcatcatattggtcaagctggtctcgaactcctgacctcaggtgatctgcccacctcagcctcccaaagtgctaggattacaggtgtgagccaccacacctggccagaaaaaaaagatatttttaaagagctgttttaggttcatagcaaaattgagcaaaaagtacagtgagttcccatatgtccctgcttccacacatgcacagcatctcccactatcagcattccgtaagagagttgtacatttgttatataacgttgatgaacctacattgacatgtcattattaccccaaatgcatagtttatgttaaggttcactcttggtgttatacattttaaagatttttgacaaatatataatgacctgcattcaccattgtggtatcatacagaatagtttcactgccctaaaaagattcctgtgctgtgcctgtttcttcatccctttctcccctgtgagcactggcagccactgatctttttactttctccatagttttgcctttttcagattgtcatagttgtaatcatatgtatgtaacctttccagactggcttctttcacatagtaatctgcatttgtttcctccatgtctctttgtagcttgatagctaatttatttctagtgctgaataatattccattgtctggatgtactacagtttgtttatccattcatcttctaaaggacatcttggttgcttctaagttttggcagttatgaataaagctgcttataaagatatttatataagtaaatgaagatgtttacataaaataaagacatttataaatatctccatgcaggttattttgtggatgtatgttttcagcttctttggataaataccaaggagtgtgattgctgctttatatatggtatgcttagttttgtaagaaattgctgaactgttttcctgagtggctgtatcattttgcattcccaccagcaataaatgatagtttcttttgctccatatgcttctcagcagttttgatgtagtcagtgttctggattttggctattctaataggcatgcaggggtatattgttttaatttgcaattccctaatgacatgttgagcattttttcatgtgcttatttgcgtctgtatatcttttttggtgaggtgtctgttcacatatttctttttttttccttgctttaaaatcatgttgtttgttttattgttgagttttaagcattctttgtatagtttggataattgtcttttatcagatgtgtactttgtgaagattttctcccagtctctagcctgtcttctgatttgaagttttctaatatttttgtggacttttgcatctatattcataagtgatacttgcctgtagttttctctatttgtgatatattttttatatcagggcaatactgttttcataaaatgagttgggaaatgttgcctccttttctgttttttagaagagtttgtgaaggattggtattagtccttttttaaatgtttgttataattaagtggtgagaacatttgggccttttctttatgggtagctttttttattgctaatttaatctcatcaattgttacaggtctgttcacacctgtttcttcttgagtcagttttagtagtttgtgttttggaatttgttcatttcatgtaagttatttagttttttggcacacagttgttcatagtattcctttataatccgtttatttcagtaagattagtagtaatgtcctctttttcatttctgattctagtaacttgagtcttgtttcttttttttcttggtcagtctaccctaaagtttgttcatcttttcttcccccacaggtaagttgttacacaatccctagcagattccaactttcatggccaaggtcctctttgatcatctttttaaaaaattagtttttggccaggtgcctgtggctcacgcctgcaatctcagcactttgggaggccaaggtgggcagaccacttgaacccaggagttagagaccaggctgggcaacatgacaaaaccccatctccacaaaaaattagccaggtgtggtggtgcgcgcctgtagtcccagctacctgggaggcttagaggggaggatcacctgaacccgggaggttgaggctaaagtgaaccatgatagcacctctgcactccagtatggacaatggagtgagaccctatctctaaaaaaaaaggaggaaaaggaaaagaactactctttggttttattgattttttttttctattgcttttctatttcctatttcattagtttcatgaatttctgccataatctttattatttccttctccttgattttggtttagtttgctcttattttcccagtattttatggtaaaatgaaatatactttattggtagtatgttttttatttttagtgtaatagtttaaattttcttctgctgggaaatgtcttgcaatatttataaactacaacaggaaatgtttttataccaaagtaatctttacagagatttcatgctttataaggaggggttagtatgcaaaaggagagtgattctagtgaaagaacacttctaggaatattttaatgtgagtagtatgttaacaatactgccagacttcatagtgtgagaatgggtttgtggagttataggtattgatgttctgtttgataatgcatcgaagagataaataatgttctttatttcttcttttttagataaaatcagtggttctggaagtaactctgatatgatggaaaacagcaaggaagaggtaaggataattatttagagatatttgttagttacgattaaccaagtagagcatatgtctttagattgcttctggacacatgtatgtgtcgaaggctactgatacccagttgtcattatacttcagtttcgttgttttccagtttgagaacaggtgttcattgtttctgttattgttgtggttcacttcagtggtttacctaaagtcagacaactgaagacttccaacagatagatattaaactgtctttatattgccccaaaggtgtttgaggtggatgttaagggcatgaactccatggttgtgaaatctctcaaaacttggtatctagagtctgctaagcattattatagcaactcataacaaggtcctttgcctgatacacaggtccacaactgtggttttgggaattttttgacctactgtaaaaaaaaactgaatccagtaaaatatattgattatactggcaaaatgagggtaagtttagtatctcaaagcaagttgtagaagttacttcatgccatatgttagcttagagaagaatgaaacatatttagatccttgaaactccctacttctcttgagatctgattacttctgcatctttgttttgtctttgttgactggggccatgatcattttgcagcagtgtattccccgcagcatgccacagcaaccatgtaaaaaacgagaaatttaatcttcagccaaggaaacctggcagtaaatgagaattagttttaatttttatttttttgcatctgtgttccttatgtggtagagaattagtttttgaagttccttttagaaaaatattctaggcacataaatagcatctcattatatcactgtattgaagttgctatagggaaatagctaattgtagggatgccgtttcgagaattttattcacttttatatttatgtctcacatctagggaactagctcttcagaaaaatccaagtcttcaggatcgtcacgatcaaagaggttggttgatgttgaagggacaaaaagttattttctttttcaggttattttctgtttctaaaaccatgtttttttctgaactcatgtcaaccactattctgagttaactattctatacaaatatacatatttgaaaatgattagcataatataatgaatccctttgtatctatcacctgatttcaacaattattattcattctaactttgaattctaaagggtttttaaggatttattatatattagtggcccttgcaatatgtagtttatttcattagacaatatatgtccttgaaaaaggacaaaataattgttgaatgcctatgaggcagtgggttttttgggttatatgaaattgtctaggatgggaagttagtcatcatagttgtaagttataaggagaaaaaagagtggtaaaaaacacttttttctgctaaattgtcaactcaagtcatacataaaaactgaaacttttctaacataatgtagtacccaatatactatgcagtataattgttattagaagtttgccgcttagtctattggactttcattgtttctaaccagtgggaatgtctcttaaaaaccaagcttgtttgatattaatttattctctgaagtagtgattcttaaagaagagtgtcctccagggtctccctggtagctttttcagaatgcgtatgccttggtcctgctccagacctactgaatcataatcttcagtgatatggtatagacatacatgcttccctaggtgattctgatgtgcttccttgttgagacccactgctcaatctcaacatgttatttatgttctttgggtattgttccagttgtcagaaacattcataattctatgaacttaattctttcataggaaaccttcaattgtaacaaagtatgtagaatcagatgatgaaaaacctttggatgatgaaactgtaaatgaagatgcgtctaatgaaaattcagaaaatgatattactatgcagagcttgccaaaaggtaatgtgtgttaatttttcatgaagttaaagttgaaatgaatttttaaacatcatttttataaaattggaacttgattactgttaactatgtacaaacgaccaaacatggcattttcctagtggttgtctagaaatatatttgtatgccaatgataatatgtgttattgaagttaaaaatttggaatattcagttggttttgtaaagaatgaaatctatttttttctttcctttgagttttagacaaggggctttagtttccaaattatacttcagtgtgtaagcaggtttaaaaatttaatatattaggttttggttcagtcaatgttaatgtgcttgctttatacaaaaatgtaatgactgttcctgaaaacttaaaaatcatgtacagtctagtttagtcttattgcattcttaaattccctaaggctaaaagctgaagttaactatcatagatagatttagttgtatttcttgctgttatcttttttaaaaaactttgtcacatacctctcaactgttgaagttctaaccataaaaccttgttaataagaatagggaacaatagccaaatgaatatcttggactcttcatagctcaagtctgagagcaatataattggatgatgagaatgacagggaacttggttcaaagagtcaaattttagattttttttctttgttaaataatatgttgtagtctcttggcacatttttcaaattcattctcatagatcttttacagcagtgcttattaaaccttgttccctgtctatgtttttatgacatattttcaaattatggaagtttaaaaaatacagtaggtaggagggatgggactttccttgactaggataaattagaagttacaaaaggtgataaatgaaatgaggaaaggaaattaatgaaagaagagagataggggcctaccgcttacttagttttgcaaatcatttatgacaattttatgtaatggttttggtggccaagggcagaaacaactaacatgggagtctaagtcccataggtggtgacttactttggatttttacattctcagtggttgtcactgggagtgtttatgatgtaagaaataggaattcaaacttttgttttaattgtactgtggaagaaagtcagcatatgatgttactaacctgaactatgcctaattctgtcagaccaaaacaaaaacagacccgtttcataaggttaaatttgggtgtttatattattgttgtaatatttattgagtatgtataagtaccaggctcttacagaattaactcctttaatcctcaaaacaacactgtaaggtagttattattttgcttgtagagataaaggaacaaattcagaacccaaggaactttttcagctttaaattgagaagctaagatttcaacccaggtctgcttgaatccaaagcctagtgagtgctcttttcactctgctgctttgcttccaattctccctagaagaaatctagggagaattcagttttttttttttttgtcgttgttgttaatttaaaatctttagttcttttcaaatgctggggcttctctgagtgtctacatgcaatgattgctgtgaataacttttttttggtggggattatttaattttactacaatctgtaaaatctcaatcatctgtgtcctccccccccccaccctttcagagactcagaaactcatttaacaactagatgctataacttgtcaaaatttgcttgttgaataacatagagccatatttcagagaaagcccctggtgactacctgcttttttttccttaattgttgccaatgatagccagttactaagcccagcaatgtaggtaaacattgaaacctaaaccctttttactatgcctgtcttatttgctcttgagagaactaatgaaaacttaaattgacagcctctctcttcaattcacatgttttatagttaaggaaggacattctttctaaaatattaacatagggatcaacaaatgatctcattctacaatttattgttagggtacttcagctaaagtatcttaatctgttaaaactctttaaggactttacagagtagtgaaactttgacataccagttgggaaatgctgcagtatagatacaggagtaatagaatgaacttcatttcccccaccaatacccctcccttgcaatataaaactacccttaaaaatctttctgagtttatgatttggattatgaaaataggatgtctttaaaaattttttccctctgaaccacacatattttatgaattctttatggaacttagcatagatgttcatattcataacagcttttgtgataggcactataaaaattcagaactgggttgaggctttctgtttgattcacacatttgttttgtaatcactccataatacctccctttcctgtttttatgaactatatttcaacaaataaactgttgacacctggcccttttactatttccctgttttatttacttttgtgaggtccttacaccaatatctaaagcttgaaagaaacaaactatgtaccagcaatgttggctttatctgaactgaagtcttgtacttcacttgcacatttaatatgtgtaatggttttttaaatgaaatcattctaggtacagtgattgtacagccagagccagtgctgaatgaagacaaagatgattttaaagggcctgaatttagaagcagaagtaaaatgaaaactgaaaatctcaaaaaacgcggaggtaaatacaagtgaaaatgaaacatgaatttaaattgctgtttatgaccatattggaaaatcggatgtgcttactaaaaatacctccacttttctgccttttgtttattaaaagcactacttaaatataacttctgtttctctctgagctctgaagcagaaaaggttaagcaccatttatcgaaacacctttgccttcagtggctattaagttatctcaagaagcgtagcatttccttcttccacatgttctataatacatatatgccataatactatgttttccccccaaccctaaaataattttagattcatgcaaaatcttgtctgtggcctacaggtaactttatatatatttagagttggatagagtgacgtacatctgcattagtattagttggggtattataaatgcaagtcccttgactccactcctcacaaattagaatttctgttgatgaggtcaagaatgtactccagtttgttcttgtgtacactgaagtttcaaatccactaatctaagaatggcaacatggacataagtaggaaggagtagggagctagagctgataaccctccctctgtcttccagaggcacctctccctttgtctgtctatcttcccttaaacacacaaacggtggggagtggtggctcacacctgtaataccagcactttaggaagccaaggcaggagaattacttgagtcctggagttcgagaccagcttgggcaatatggtgagaccccatatctacaaaaaataaaaatatcagctggacatagcggcgcatgcctgtagtcctagctattctggaggctgaggtgggaggatcacttgagcccaggtgatcgaggctgcagtgagccgtgattgcaccactgcactgcagcctggatgacagagtgagaccctgtctcaaaaaaattaaaacacacacacacacacacacacacacacacacacacacacactctaatattggctaaccatctataaaaagtttgcatcagaaggattcatttagaaataatagtggactatgtgtcccacttgtttgtgtgtgattcttaaatggtgcctatatatattttggggcagcttaataaagccagaattcataactataaaaggaatgaatctccaaatgatagaacatgacactaaatttctaagtagaagtgtagtgaaagcatatccatttaatattgatcagattatataattgtgaaattatagtgaagttcttatattggtgaaattttgtgtggatttttattttaatgctatgattatcttgctggaaccagtaaaatatatctatttttataacatattttatatattcattttccgattaaataatttgtaaggttgttggcaaaaataaaggaaatattatatagtcttttgtccacaaaggggtagtcaactccttttgagcataaggaatctttctgagaatctagttcatggtagggaaactgccattgcagcaacagagctcattaaagctaaggtagtagtcttaaaatttaagagaatcctcaattataaagtgatggtaaagatcagtagtaagagtttctttcctctgatcataggttctctagagaagacaaataactaagtgttctgcattgtgtacacttagtgtacagagtgtctaaatggtgttatttttgggaagggaccctgtagcagtcagtgtctgaaatgtggataagggctgaaagaataaaagaaccactgttgttgacgagggtattcctagtgccactttggtatgctgctgacatttggtctcagctgataagtttcaggaacattttattgaatgatctgtgtaggaatgttttggtatcacgcttaagggaatacatgcatttatagccatcagtagcacttaaatctttcacatctattttcatcttaatgatttgttacatttttaagctgtcagaaatcacacaggaaatttaacactaggtttactttatatacacatatatagataaattggtgatctgaaatactgaattggtgtagttaatatttaaactttttaagaaagctggttccaaattgaagcctaacttaggaaactgtcaagaatgtaaactttcttgtattacaagaaatgtaagacattacaagaatgtaagacaatatataaagtcttatattgatttggaataatattataacacaaagatacggttaaagttaacatttcaggagctgattttttaaaaaattttcagtatcataccctattttgacattctcttcccagtttaattgttagaaagtatattttacacctaacttttttacatgacacaataattttgttctatttaaaaccattaaaatctattgagctcagaaatgaaaatgcctcttttccatttataccctgtgttacaattttaaatatatttcataattaaaaataaaaaatttaaacatgtatacagcaacaagtacataaagtaacatttcaacattttaccatatttgcttcagatctcacttaagtaaaatattggttcagtcctactctcatccatttccccttcttcccaccccacaggtaatgattatattgaagttttatgcatgtgcatgtgtgtgcatgtttttctatgttttttatatatgtattcataaaacatttttcatttaaaagtataacaaaataatatgctgtatatatcatttgggaacgtttttcatttaacattgtttttgaattgtattcatgtcagtaaatgtacatctagtttgtttatttttcactgctctatagaattatgttatatcaataagccactattcatttcccacataggaagttattcccaatttttcattttytaattttctaattagtgctgtggtgaatatccttatatttgattccttgtgcacatgtgggagaaaatctccaaagaattacctagttttgtttaattcttgagcgatgtatgcaccaaagcacatagaagatacttagtaagtattacttaacactggatgaacattcagattctacattttatttatcttgttagtttatctgaatgaaatcattgtttgaaatgaaaaagtatggtgtggtgtatttgtttctgttaaaacaaatacagaatatatgaatacccaagatcaaactggtgtttgtaaataatgtgattataatacattaggcttgtaatgcctgctattaggtaggttgagataggaggattgcttgaactcaggcgtttgaggctacagtgatttataattgtgccattgtactccagtctgggtgatggattgagaccccatctttaaaattaaaaaaataaataaataaaaatattagcaacataaatagtaaaccttcaagtttacttttctaaaaaagtatgatggtgttcttatacattaacgtttttagcttctggctaggtgtggtggctcacacctgtaatcccagcattttgggaggctgatgccagaagattgcttgagcccaggagttggagaccagcctgggcaacacagtgagacccagtctttaaaaagaattagctgggtgtagtggtgtatgcctatagtcccagctactcaggaggctgaggtaggaggattgcttgagcctgggaggtagaggctgcagtgagctgaatttgcaccattgcattccagcctaggtgacagagtgagactctagctcttaaaaatttttttaaagtttctacaaataaaaatattcatgataatatttgggtccatggcgctttggaccttaaacctaacagaaacccaaaagagaaaattaaaagggtgaaaaatatatgtgatgttttgttttttatttaaggatggagccaatttgttttttagttgtctcctttttatttgtgaatgtaagcattttgagtgacttctgaattataatctaccatcttattttgatcaaggtcttggttgcacatcaggatcatctttgaaactttaagaaaatgcctgagagattttaattcagtggtttaggggtgggaatggctgtttttaaaaagattcttcagatgactctaatgtttagctcagggtgtgaaacactgccttagcagaactagggacaagagggaggctggagaggtttctgtaggttttcttcagtctgtttatcaggagacagtacagaatgggactctgcctttttcccccagtcgttctgatgttttgctgccaaaatagatatacctgcaatgtcttgtttgtctttatttggaaatagtagacagtattgatatggagtggatagtggagtacacatagaaaaaaggcagtttaatgacaatttatgtatagtgttgaagtaaatattagcaaggaaattggtaatatcataaaattaccaagtttttacataccatattgataggatctgtgcagacaattccaatgagaataaaaacctttatggcatacttaagtgtaggattgcaaaagaatctgttccgtatatgttacttacttccccattctttaaggactgatactgaatttatttgcaaagcaataacaaaataagagctcttggcccctagttttagaactttttatgggttctcttaatgttatttcaagttgtaaaaaatggcatttgcatctgtaaaaggaaacaattaggatttgtaacttggaatttgccaaggttgtcatgtgcttagtaagtcgataaaatattaaccttttttacttgtgtccaatatgccatttttctaaggattatgaggtatttcatgtctaatacaaaagttacaaaatgctgactaaagtaagtatctttttctgtgtataaatgtgtgaataatagccactcctttctcctagaagatgggcttcatgggattgtgagctgcactgcttgtggacaacaggtcartcattttcaaaaagattccatttatagacacccttcattgcaagttcttatttgtaaggtatgtaatgatctgttgatatttcataccgtaaatatttgaatgcttaccatataccaggcctttgagggcacagtcttgaagaaagatgaaaatggtatctgcccttggaagacttctactatagtggggaaaatagacgtacaaagcctaagtgtcatgataggggagatactgtgattatgggagcacaccggaagcctgtgtaaataggatttggatggctttctagtggaaagctgtatgtgaaatatgaataagaatcagcctggtaagtgagattggttcatcatgttctgggaagaggcaacatagtattcagatactggtagttgagggagagcttggtgtgtttgaaaatctcaagagtggatgtgtgtaatgtttgtgttttataatctttccccttatatatcctacttccccaaatgtaaactatctatgtggagcagggttttgacataacttggagatgatagaattaaaaatgttttttatgtgttgattataattttaacagtctgtgccacttttttgttagtaataccttggagttaattttaaatatctataaatgtgggcctggcatggtggctcatgcttgtaatcctagcactttgggatgctgaggcaggtggatctcctgaggtcaggagttcgagaccagcctggctaacatggtgaaaccccgtgtctactaaaaatacaaaaaattagccgggcatggtggcgggtccctgtaatcccagctacttgggagactgaggcaggagaatcgcttgaacccgggaggtggaggttgcagcgagtcgagatcgcgccattgtactccagcctggacaacaagagggaaattttgtctcagtaactacctacctacctataaatgtcaaggttatggttttcttaactcatattcctgctaagattaatcctatgttagtttgtttcccaataaaaagctgcctttgaaatgcagtggcaggccatgttttccttggaattctagctctagatcttttcttgcatgaatttttgatagattcagacatgcttaaatgaactgtactttgttctttagcaatttgtatccctcctttccttgaattcagttcagccaggggcctatctagggtatgtattagagagtttcattttaaattgtgacagtagaatctaatattgctggatttgtgacatgtatttgcctttctgttttcttatctatgtgattgtcttttttcaagaaccagtctgttgagcctaggccatttcactaatcggtagtttgtatcagtgagcaccttttccctttctgcagtcccactggaaagactttgaagtcagtcaaacttggatttgaataacagctttgcctcttactagttgtatgactttagatttatttacatattaatgaaagttagccttttctctcataatatgtcctaccttgcatggtaggtatttggtatttaaagataatatagattaattgtttagctgtatacatagtagctgtttgtatatggtggctattaaaattgttaagtacccaaatctaatacatttttatgtagagctttagtagctagatgtatgagaccagaaattagctttactaaaatcttttgtaaactttttttttttttttttttttttttttgagacggagtcttgctctgtcgcccaggctggagtacagtggcgcgatcttggctcacgacaacgtccacctcctgggtcaagtgattctcctgcctcagcctctcgagtagctgggattacaggtgtccactaccacacctggctaatttttgtatttttagtagagacggggttttaccctgttggccaggctggtcttgaactcctgacctcaagtgatccacccatctcagcctcccaaagtgctgggattacaggcatgagccaccaaacacccagccaaaaatcttttatacacttttaaataaggaatagtggtacttgagtgtatggaaatctgtttcaaggcattaattcttgagatagttagatgtctggaaaatacagacattgggtagtgggtagcagtgtttattttatttatttatttatttttgaggcggagtgtcactctgttgcccaggctggagtgcaatggcgtgatcttggctcactgcaacctccgcctcagggttcaagtgagtctcctgcctcaacctttagaatagctgggattacaggcgcttgccaccacgcccggctaatttttgtatttttagtagagactgggtttcgccatgttggccaggctggtcttgaactcctgacctcaggtgatccaccctcctcgtcctcccagagtgctgggattataggcatgagccactgtacccggctgcagtagtgcagtgtttttgctttgagtctctgaaacatgcacacatactcccttttttaaaaaaaaattgtttgtatttttaaaatttttgtgggttcatggtaggtgtatatatttatggcatacatgagatgttttaatactggcgtgcaatgtaaaataagcacattgtggaaaatggggtatccatcccctcaagcatttatcctttgagttacaagcaatctaattacattctttaagttatttaaaaatgtacaattaagttgctattgactgtagtcaccctattgtgctattaaatagtaggtcttattctttgtatttttttgtactcattaaccatccccacctcctccctatcccctcactacctttcccagcttcttgtaactgtccttcatgacatccttcattagttcatccatgagttcaattgttttgatttttagatcccacttataagtgacaacatgcagtgtttgtctttctgtgcctggcttatttcacttaacataatgatctccagttccttccatgttgttgcaaatgacaggatctcattcttttttatggctgaatagtactccattgtgtatatgtaccgcattttatttatttacttatctgttgatgggcacttaggttgcttccaaatctttgctattgtaaacagtggcccaacaatcataggagtgccagtatctctttgatatactcatttcctttcttttgtgtatatactcagcaggtggattgctggatcatacggtatctcaatttttagtttttttgaggaatctcccaactgttttctatagtgattgtactcatttacattcctaccaacagtatacaagggttcccttttctccacatccttgccagcatttgttattgcctgtcttttggatataagccattttaactggggtgagatgatatcttattatagttttgattaacatttctctgataatcaatgatggtgagcagcttttcatatgcctgtttgtcatttgtatgtcttctttggagaaatgtccagtctaatcttttgcccattttttgattggattatttgattttttcctatagaattgttggagctctttatatattgtggttattaatccattgtcagatgggcactttgcaaaatgttctcccattctgtgggttgtcttttcattttgttgattgtatcctttgctgtgcagaagctttttaacttgatgtgatctcatttgccaatttttgctttggttgcctgagcttgtgtaatatgctcaataaatctttgcccacaccagtgtcctggagattttccccagtgtttttaattacttaaaaaaataaagtttttgtcctttatgaatgttatcaatttygaattaaatttccccttcctcttttcttttaatagaattgctttaagtattacatgagtgatgatattagccgtgactcagatggaatggatgaacaatgtaggtaggtaatatagatgagctaacattcagtgtttcctacttttgggaggaattgttacataatcatttatgaggtttgtctttcatagtatcgtcattgatgtctttaatgaaaggttgttcttttccataaaaccctggatttatgtctagtttaagtttctaataaagagtaagcagatgacctaaattaccactaaaattactggcagtaaaatttaaattgcattataacaaagagattaaaatgagttttgttgggaataatgtttatttttatttttttacatatcttttcagtttcctgaaagaagggaataatgttttaatctttaaaacatttcaggtggtgtgcggaaggtggaaacttgatttgttgtgacttttgccataatgctttctgcaagaaatgcattctacgcaaccttggtcgaaaggagttgtccacaataatggatgaaaacaaccaatggtattgctacatttgtcacccagagcctttgttggacttggtcactgcatgtaacagcgtatttgagaatttagaacagttgttgcagcaaaataagaagaagataaaagttgacagtgaaaagagtaataaagtatatgaacatacatccagattttctccaaagaagactagttcaaattgtaatggagaagaaaagaaattagatgattcctgttctggctctgtaacctactcttattccgcactaattgtgcccaaagagatgattaagaaggcaaaaaaactgattgagaccacagccaacatgaactccagttatgttaaatttttaaagcaggcaacagataattcagaaatcagttctgctacaaaattacgtcagcttaaggcttttaagtctgtgttggctgatattaagaaggctcatcttgcattggaagaagacttaaattccgagtttcgagcgatggatgctgtaaacaaagagaaaaataccaaagagcataaagtcatagatgctaagtttgaaacaaaagcacgaaaaggagaaaaaccttgtgctttggaaaagaaggatatttcaaagtcagaagctaaactttcaagaaaacaggtagatagtgagcacatgcatcagaatgttccaacagaggaacaaagaacaaataaaagyaccggtggtgaacataagaaatctgatagaaaagaagaacctcaatatgaacctgccaacacttctgaagatttagacatggatattgtgtctgttccttcctcagttccagaagacatttttgagaatcttgagactgctatggaagttcagagttcagttgatcatcaaggggatggcagcagtggaactgaacaagaagtggagagttcatctgtaaaattaaatatttcttcaaaagacaacagaggaggtattaaatcaaaaactacagctaaagtaacaaaagaattatatgttaaactcactcctgtttcccttyctaattccccaattaaaggtgctgattgtcaggaagttccacaagataaagatggctataaaagttgtggtctgaaccccaagttagagaaatgtggacttggacaggaaaacagtgataatgagcatttggttgaaaatgaagtttcattacttttagaggaatctgatcttcgragatccccacgtgtaaagactacacccttgaggcgaccgacagaaactaaccctgtaacatctaattcagatgaagaatgtaatgaaacagttaaggagaaacaaaaactatcagttccagtgagaaaaaaggataagcgtaattcttctgacagtgctatagataatcctaagcctaataaattgccaaaatctaagcaatcagagactgtggatcaaaattcagattctgatgaaatgctagcaatcctcaaagrggtgagcaggatgagtcacagttcttcttcagatactgatattaatgaaattcatacaaaccataagactttgtatgatttaaagactcaggcggggaaagatgataaaggaaaaaggaaacgaaaaagttctacatctggctcagattttgatactaaaaagggcaaatcagctaagagctctataatttctaaaaagaaacgacaaacccagtctgagtcttctaattatgactcagaattagaaaaagagataaagagcatgagtaaaattggtgctgccagaaccaccaaaaaaagaattccaaatacaaaagattttgactcttctgaagatgagaaacacagcaaaaaaggaatggataatcaagggcacaaaaatttgaagacctcacaagaaggatcatctgatgatgctgaaagaaaacaagagagagagactttctcttcagcagaaggcacagttgataaagacacgaccatcatggaattaagagatcgacttcctaagaagcagcaagcaagtgcttccactgatggtgtcgataagctttctgggaaagagsagagttttacttctttggaagttagaaaagttgctgaaactaaagaaaagagcwagcatctcaaaaccaaaacatgtaaaaaagtacaggatggcttatctgatattgcagagaaattcctaaagaaagaccagagcgatgaaacttctgaagatgataaaaagcagagcaaaaagggaactgaagaaaaaaagaaaccttcagactttaagaaaaaagtaattaaaatggaacaacagtatgaatcttcatctgatggcactgaaaagttacctgagcgagaagaaatttgtcattttcctaagggcataaaacaaattaagaatggaacaactgatggagaaaagaaaagtaaaaaaataagagataaaacttctaaaaagaaggatgaattatctgattatgctgagaagtcaacagggaaaggagatagttgtgactcttcagaggataaaaagagtaagaatggagcatatggtagagagaagaaaaggtgcaagttgcttggaaagagttcaaggaagagacaagattgytcatcatctgatactgagaaatattccatgaaagaagatggttgtaactcttctgataagagactraaaagaatagaattgagggaaagaagaaatttaagttcaaagagaaatactaaggaaatacaaagtggctcatcatcatctgatgctgaggaaagttctgaagataataaaaagaagaagcaaagaacttcatctaaaaagaaggcagtcattgtcaaggagaaaaagagaaactccctaagaacaagcactaaaaggaagcaagctgacattacatcctcatcttcttctgatatagaagatgatgatcagaattctataggtgagggaagcagcgatgaacagaaaattaagcctgtsactgaaaatttagtgctgtcttcacatactggattttgccaatcttcaggtatgcaaaaataaataaaaaattcataatttgtacttccccctcttgagttactacattgtttaatttcctctgaagctaatcaaatttagggttactacttaggagaataccacttaaaaattatttaggagtttattaaaaaaagtttccctatttatttttatgctgccattggaagatattttgaacattgctagtattcagtatcagggatctcaaatttgttgagtaaatgacaaaatttctttatcaatgtttagtgcttttctctggagtaatgagcagaaggaaaagcggactggtgccagtggttcagtagctatttagttatataatggaagtgagtgcttggtactggtatgacatggtgtgtcaaaattttaactgccatgcatatggctttttaagtttgaacatataactttgtgtctcatgaaatcccctttaattatttttaatttacctcattaaaaccctttgttgatgcttattaactagtttctaatgacatgaacagatgtttttcttttaaaaacactgtcaaaatgaaggaagaaaatccaaacattagctggattagcctaccctgatgaggtagagtactaggaacattaaagtttgggtcagctggtgaatgaaaatatttttatgaattaattaaaatctttaaaatttatgaaaaataattttaaaaataagtttttattattgaagttattttaaaaatcagttgtataataaatgtgtattggtcatttgtctttttttttagtcagtaagacctgtcagttctatggatactcagaatttatttaaaaatgtttataaagtgggttttacataaaattgtatttccaacataggtagaatttaaaaatttttccttccagttcttatgttacagttttcaatttatcccaattggattttaatggaattaatttgaatcttggctattttttaaattttaatttttaattttgtagagatgaggtcttgctatgttacccaggctgatcttgaactcctggcatcaagcaatccttccacctcggccttccaaagtgttggaattacaggcatgagctactgtgcccagcaaaatcttgttttttaataaaactttacatttcttttatggagtacttatgacttgacttgaaaaccacatgtgatatgcagtgtgtgtgtttcaattgaatgctctgctatatcagatgactagatggagctctgtttgtgtggctattgtaacttcaagttcacagtttcttacctgaaattcttggggtctgttgtgtttcagaatttgcaactttttggtttttagaaaaataatagagagaagttactatatattttataaaagctccagtggggcctgatgcagcaccagataatcaaacacatagtatttytgcagcaaaacatttgaagattcacatttaaaggaataagcagtttagaccaggttttgctgccagattgtctttggtaccctcttacagaaactttccattttgagagtgttttagatttcaaaattatatataagggattgtggacttatattaaaaatacagaatctaatatttactttgatgtcaaatcaatgttttagttgttaggttagctgtgaaaatccttattaaggattagagtttaagaataataaattgtgtttaaaaattagttaaaatccattaaaaattatatgtcactgagctaattttatttctggttttatttatttggatcttctctctttttttcttagtctggctatttttaaactttggaaaattggtttctgtgattaaacagtttcactggtgaaatcagtatgtttgatttcaagtattttactacttttcttaagatctcacttgatttattgatacctatgaaagtttctgttatgcacctctcatgttgagaattattaatatttagtgtaataattaatatgaattcattaggccttaagaagggatggtgatatatggcaaatactcaattgatgcatctcttgataattacttatctcagcactgatctagatcactgtgttccattttgatttatttaactttgatctgaaggacaaataggctgatggggagtaaactttttctcaggtgtgtatcaagagaaactttgagaattcgtcacttcagcaaattccaatccttcaactgcttggtgaaataagccttgttgagattttctttaccctggatatttttgggggctaagctgattatttgggatgaaataagaaagaagataaatttgttagggaatttaacctgtgaaaaattgggccttgtcaatagaaacaagtagaatagaatatgagtgccttgaaaataagcgctgtaaaaagttctgtttttaaagataagtttgcgtgtgagccagtgttatgatattccttcagaatttacttacatgcttatgtaagcatgctgaatttatgtactcctctgtctaacttaattttaggtcacagttttagaaggttaaaagaaaaaccctgccccctattgagtttagaggattccagtttattcgcagtatttgggtatcatattacagctacagtattttcctagaaattggggcttggtaatggcatgaataaccaagatgaagaacatggtcctaggagattgcagtttaatgcaagacagacatagagaaatcattaaaaaaagtaacagaagaaagatataaaactagaatggggcctgtaatcccagcactttgggaggccaaggtgggtggattatctgaggtcagtagttcaaaaccagcctggccaacatggtgaaaccccatctctactaaaaatacaaaaaaattagccaggtgtagtggcgcacacctgtaatcccagctacttgggaggctgaggcaggagaatcgcttgaacccaggagatggagattgcagtgagccacgatcgcgccactgcacttgagcctgggcgacagagcgagactccgtctcaaaacagaaacagcaacaaacacaacaaactataatggggctacacaataaatggcaagtgaactacttaaatatttggggaaatatttagaagaatagttggcatttgaacttcaaaggataggtcaaattttgaaaggtgtagtaaagagggagtgacagtactgttactaattatatttcatttgaagattggtctgtttgaatgagatatttattgtgagtttgctgggatattatgaaatctcttctctctctctgtctcttttttttttttttgagttgaagtctcactctgccacccaggctggagtgcagtggtgcaatctcggctcactgcaatccctgctcactgcaacctctgccttccgggttcaagcgattctcatgcctcaggctcctgggtagctgagattacaggtgcatgccaccacattggctaatttttgtattttcagtagagacagggtttctccatgttggccaggctggcctcgagctcctgacctcaagtgatccgcctgcctcagcctctcaaaatgctggcattacaagcttgagccaccacgcctggccttatttagtgtatttctatcctgagcctgtaggtgtctgtttcctttatagattttttcctccatttcccttcaacattttattgtgaaaaacatttaagtatacaccaaagcatctaccattaatattatactgtattttcttgataacatatctatatatccttctgtctatccatcagtatatcttttttttgcctttttagctttttattttgcataattataaatccacagaaatttgtaaaaaaaaaaaaaaaatacagggaggtctcagataacctttacttagtttccctcaagggtaatatcttgtaactctagtacagtgtcaaaaccagaaaactgaagatttattcagatttcaccagtttcacatgcactcatttgtgtgtgtataagtatagttcagtgcagttgtaccacgtgtgtatctttgtataatcaccaccacaaccgatatatcaaaccagttccattatcacaaggctcccttgtgatactgctgtccttacctccattcctgacatctggcaactagtaatctgttctttatcactgtaattttgctattttgaaatggaatcatgaagtatataaccttttgagattggcttttttcacttagtataatacccttaaaatctttgatgcatttcagattaaacggtagacatcagcatacttctcctgaaacacttaagcatgcatagtattaacctacagtttaatatttcagtttttcttttgaagtaaaatttatatagaatgaaatgcccaaatcttaacctctttagattttttttttttttttgagagagttgttacccaggctggagtgccgtggtgcgatcttggcttactgaaacctccgcctcccaggttcaagtgattctcctgcctcagcctccctagtagctgggattacaggcacacaccaccatggctggttaatttttgtgtttttagtagagacgggatttcgccatgttggccaggctggtctggaactcctgacctcaggtgatccgcttgccttggcttcccaaagtgctgggattacaggcgtgcgccacctcacccggccctctttagatttttaatcaaaatatagaaatgcagctttttataagaaaataagttttactgtactgaactgtatctctgggtaactcaggtcacaaataccatacacattcaactgcattttaaaattacttgctactaccaaaatattaatactgtttttgctattcctcgaagatacagcaccagttaacgtcaaaattaaaatggaccagtacgaaggttattgtggcaagaaacttatgctaatatgatggctgttgatacagaattgttactgagaagggtggactttaaaagccttgtgccctgggaaggaactctgaaatatataaggtccagctatttatcattttactgctggcacttcacaaataacctgttatgttttctataagaatgctttttactcatattttggagtccagagtttagaccccacttagtttgctttaaagtttttggctttcagttttattttacatggttttaattatatagcttatttaaagctaattttaagtacacttttttccctcaaggagatgaagccttatctaaatcagtgcctgtcacagtggatgatgatgatgacgacaatgatcctgagaataggtatgattccatctgtaaggactttaaaaagattataacacaccctaggcatgggcacaaacagcagcaacggaacagcaagcaggttgtaaaaaccaggagtgcctgccttagaaagactcgctcacagtcttcctgcaagtttgaaagaaaggccagaaaatgggctaaaactcagaaaccttaagagaaagtaatatcattatttacacacctagcatagggtgtgttataaatacagaactgtcaattttatgttgctatgtaaactgcagtaatttttttggaataatttattttgacagattattgatgaaagtaaatcatatctcagtaaattggtaacaacagacatctcctctatatttgactattgttaattgccatccaatatggtggtcctatttattaaggcctgttgagaagaaacaaaaagagagattactcagatatttaagattaagaaattgctttcaaaataagtgtcagtttacaaggtatctagactgagttagagtttaaccagttttcaaataaaatagaaatacacggtatgagagcatttactttaataagacttaataggtttaaatgtcaacagtgtagcctatacagatatacttaagtaaggggtggctgggtgaagaaaaaaaaagacactatcagtgtagtgaagaataaggaaaacaacagtattaaagactatagctataatgtttcaacataacttttaaacacttcctggacaatagcataccccatgctcataatcttcaacaagaagacagcatggtatagtgcatggaattttggaataatgggcataagggtatctgatttctaacatttttaacaactgtctgtgtcatcatgggcaagtgactttactttttgtcaaaaatttactatatttaagaagaaaaagttgggcgaaattttctgtaattctagtaccaaaaaatccatgatagatttgagatgatttcattaaagagcactacattaaccattcatttattcctaatagtaagttctaacattaagaaaacataaaaatatacatgtaattttctgtcataattttgtaagaaattaactgacttagtaaatgccctgggttcagctgttagtttcgctcttttatatcttgctgatgctgttaggtttctctgtttcaaaggtcagcattctgctaattaacagaagaatgtttttattaaggtgaatgaacagttttattttacagttttgaatagagcttaattgtggacacaaatattcagattctgcttgcctacttttttaaattaaaaaatgtatatccatttattttatgggataggtggtaggttccagaatggagtgataagggcatacaatttattcatcagggattttacattatatcatcacagccagatactgaaagcatttaaaattttactcttttttaagatgctttaatttttcttcatttatatttgctatttgattttctatacatcatgaggcctcagatgttactcaaaggctaataatgttttaaacattctatatcttaatttaactgtgaatgatttactttaatttcatatttaaccaccaaataagagtgttgttaaggtataatttttttgtgtgtgttagagcttgtcaaaatataaatatcattttcaacttttaagttacctgatcgtatctctctgtaactggcaagtattttattggaaagtatctttaattccaccttgaatttgtgattaaaaaatacaaccctgttgagtacttttgagaagaattgaattttatcttgagcatgtctttctatactcagtttaatttgtttttataaaatatacaatttattaacttgtttaatattcactataccaaagaggtatctaatacccatgggttatgtagtcatgatggggatacaaatactttcttgcactattttagtatagattatatatttgagcatatttgaatatgcactaagcaacttaaaaaattcatttgcagatcacgattaagtcttagaattatttttctaacttcctaatttttgagtaggttgtattttggtagacagcatattgtaattgtatgtaaatttgtacacaattgtgtgtaaattgtgtataaatcttatatgctttgtctttttagcagtattgtaatacattttcagtgttggtgtttatgaagcgatagtgtattattgcaaatggttaactatttggatgcaataaatttttgtaaaccttttttcttgttcaagcatttaattttaataataatgttacttttttatatcatgagagttgacataatttgttattaaaatatagaggctagtttgtagccaaagaagttttgaaattttgaaatttaggacgtaaatacttttaattcccctaacatatatacttatatatatttgtgtgaaagttttacaacagatttaactactatttactttttctgttttaaagctatgatggcttttgggggcatttaaaaaacttagtcatatcctgaatattttagtaaatgtgaatacatttctgttttagcatgctattatgtagcgtcactcatatttgaaagtaaatgtataatattatgagacagtggtctaacctataaattaatttctatttaattggatttacttaatgaacaaggacagaatattatagattgatcaacacttgtatgtttctggtttagctttttataaaaaaaagtagactaatcatatattttgaattttatataactgaaaatttagagcttaggctttatgtagtttctcaatggcagaataataataccaaataggttgtcaggttttcacatttatacacgtaattttaaagtaatatacttgaaagtgccattagggtagggtttcattggcctttcaaatacctgttagttggattttaaattggttctttctctgaaaagacatctattcatataatttatttcaattcaataattagcctggcattgaaaatacaccataattcctttatatgttcaatataactggggatattttgaccaaacattttctaataatatcatatattttaatttaatatctgtactgggaatgagcctcaagtaatacgatagtagtgtgttcaagttttaacagtattagttttgaggatcattaaactaggcttgtctttagagattgcatactgaacaatcactgaagagaccatttatcccaaaaaagaattatcttttgaaatttctttattcgcttattttgcaggatgtgagaaatatttacaattgagcttttgagagcaaaagaccaaagtgctaggtttttctaaataagcattctttctccctgacaactttgactaagagctgagatttctacatggatgtctgctcccctaacaaacacatttactttattgttgaaatgtgcttaattgggtctagtaatactccacattttttctcataatttctctgtgggtgcgactaaatgctttttttttcatagaagcgaaatttgatgtggagattgctaaaaaaaattgtcccattgttatatttaattatattgggactagaccatagcattttaaatttccaactgttgttgtatcatttgatgataattttgtgtttcaaactagaaaatatgctaatgatttttttttttcctactggcttggtgtgggtatgctgttgatgacggctctgtattgttaatccagcatattttcggaggaaactaatgatttctggatgttatttatgcctaagaagatatttaatgattgtttacctgatttcagcacaattaatggcatggatgtatcacaagtcccttaatcgtttgatgttcactttgctttcattttaaacactttttcaaatgtctgtctcctacacatgttgtctattctctatgcaaatttgctaaatttggaataatttttttctgtgattttttttttgtggtagttctgtttcgttagcaaaactgctttgattctcctttattgtacttgaaaaacaaaggtggcgttttaaattaagtattttacttgtttttccatttgagtaagggttttaaatatctagcaattttacggtaatttttttttcaatttcctttgtctgtatagcacaggtaagtattgcaagtcatttaagtataacacaggtgtccagccagtagataggatctacttgtagatatctgaactggctgtagttgttactggctttcttttttctactagaattcccagtcaggaaagacatatgatgtgtagtggtgacctttgtccttctatggtcaagatttaaacattataaccagtgtttctttcttgttctctgttctttggtgatattgggactttcagaaaataagaaataggtcttcctcaaaaaagaaaaaaaagaaaaagagaaaaaggaagagtttggatttctagtgttaggaaaagtgattcatttttctgacttaatatcctttgtctttaactttgaaatttcaaaataaaattttgaaatttgagatgagtaaattctgtgttttcatttttcaagtataaaaatattgaactagttatttaatatgatcaaatttcccatattaatttgaatatattttttcttgttaaaatgcctctaaaactggtttagatttttgtataaaattagggaatacacatgtaataattcaggcctattgaaacataagtctgtatgaattattaataactgtgggttcttaatttcatagtttttattgttctacctccaagatttttttaaaaagtcatttgatattaattttcctggtaccctcaccaaaaaggatacagagctacttttcattaactacccacattgtaggatttgcgactaaaaaaaaatatttcaaaccattgtttagctttttgattatttggtgacttcattattatctcgtgaattccaccattttggggtacagatcattatgccttagttttatatatatatatatatatatatatatatatatatwttttttttttttttttttttttgagacagagtctcactctgtcacccaggctggagtgcagaggcatgatctcggctcactgcagcctccacttccctgtttcaagcaattctcctgcctcagcctcctgagtagctgagattacaggcacccgccagcacacctggctaatttttgaatttttagtagagatgagatttcaccatgttggccaggctgctctcgaactcctgacctcaagtgatccacccgcctcagcctcccaaagtgctgggattacaggcatgagccaccgtgcctggccagtcatattttttaatagaaaacttaagatactaattttgaacctgagttgaaatatatactaatatgaattttgaagaattccatattccataactttttttttttttttgagacagagtctcgcgttgtcacccaggctggagtgcagtggcatgatctccgctcactgcaacctccgcctcctgggtacaggtgattcacttgcctcagcctcccaagtagctgggactacaggtgcctgccaccatgcccggctaatttttgtatttttagtagagatggggttttgcaatgttggccaggctggtctcaaactcctgacctcaggttatttgcctgccttggcctcccaaattgctgggattacaggcgtgagccatcgtgcccggccacatgttttgttttttaattcctatcctttaaatatatgacatttattaaaacaaagcctcacaccctactaaaatatttaacattccttggctatactcctttgaattattttatatatcaaactttaaaatatggtgtgatgctttagtactacatatacttaggtacctctaaagagcatgcatttaaacccattatcttatttataattctgtaaattaagtactctattatgatattgtacacaaaaaccaatttttaagcaaattttatcaccttgtttatggatgcccagtattttggccttctaaaaatatatttttttccagcaattttcttcaaacctgttctcagaacctcttaaaagataaaatggtcattgtagaatgtatctcagatgacctatcgtgcattttagagtgcatactggattaaatatgtttaaaactccttttatcatctttaaaaactcaagctggttgcagtggctcacacttgcaatcccaatgctttgggaggctgaggtgggaggatcacttgaggccaggagtttaagaccagcctgggcaacgtagtgataccttgtctctactaaaaagaaaaaattagccgggcatggtggtacatgcctgtagttccagctactcaggataccgaggcagaatgattgctttagcccgggagttcaaggttacaaggatatgtgtttgtgccactacattctagcctgggcaacagagcaagactgtctctaaaataaaattaaaaaaaaaattaaagcttgagttcttgcatttctaaatacataaatttaaaatatgcgaaatacacttatttttaaaaatgggggtcagcgcggtggctcatgcctgtaatcccagcactttgggaggctgaggtggatggatcacctgaggtcaggagtttgagaccatcctggtcaacatggtgaaagcctgtttctaataaaactacaacaattagctgggtgtggtggcacacacctgtagtcctacgtactcgggaggctgaggcaggagaattgcttgaacctgggaagcagaggttgcagtgagcctccctcactccaggttgagattgtgctactgcacttcagcctgggtgacagaacaagactttgtctggaaaaaaaaaaaaaaggcatcatctgtatttgcccaggcactcattagcatacaagtattaacaagtagagggtatagtgctggcacagtaaaattaatagcagattgggatttaggatcttaggttctactcctgactttgccactagttagctttgtttctttggctgagtcatttcctatatctaagcctgtttcctcatctgtagaatgacaaagctgtactctgaggtttgtccttctggctctaacattttgtattgcttttgttaatggctcgaaagctccctggtgcaggaggtccttctcttgattgcattttaagaaactcaacatttcgaattattgatttacctatcagcaagaggtggtttactttcctttcctgtttgagcgtttaaacaagcgacattactcatttcctttctagataggattggagttaataaaggctttcttggctttctcctatgtttttttttttttttccccgattgcttgtttgtcattgtgttgttgggctcacttcttattattttatttgtgctttcttttagtaatggtgttatcttggtgttcattatgtactttggaagacttagtatatgtgggttttggggtcctatttattttctcatgcgccagttccgatcattgtttgtttgtgggtttttacccttcctcccatattgttttgctttctccccctctcccttccctccctttcaggaaaatggaggagtggctccattacttctggctctgcccaggttttctgccacaagagtggcacggcctgtgcctctaatgcttctgatagagtcgtgactgctttggatgctacacctgccccaagatgtaatattgagcattgagattccaggggcagtacatcgtcctggaaagcctcaagaaaggaaacttcagagcaaacagaatcaactagggatcatgactatacatccagcatgatccagcatgggtccagccgaggcctccaaaatgatgctttgccagcctcagctggttctcaagtgatgatatccttgaagtctctgtggcccgtgactccagagttaaggtagtggagtttccctttaaagcatctcacagcaggctttgtagatgggacacatctcacttcaacatgcttgctgactactcaggttgaaggtcagcctcagcccttaggtccgttaaattaagttctaattttgaaatgtaggttattatgttataggctaggtttatggtagactgggtctttgacatattggacttcagtaataacttatgcaaaatgattcaacttattctttttagggcttaatttacatagctataaattaggttttcctttggacaaaaggtgttagagggcaaaaataaaacctttagccaggtagtctccatcactctgtatataatttgtgatttggagaaaaatgacctgaagtttgtaattttttggcttctgaatgtactatgattgttctatatgttatgatcttactgaaagttgtcgctaagttgtacttctacagtatgtggatctgatttcactttatatgatttattaataggtatacaattgtattttatctcatgtacatcatatttcttagtctaatgacaatccagaacttgagaatgcattaagtaggtttatgtattgtgactttccgttttttagtagacatattctttggagactgggatttgaaagaagaaaaattgtgtgatttcctacaattaacaaccaaatctttatagttaataggaattttttaaagactttttttgaacttgtaaacacaaactgaaatcaggttgttgaactaggctttcaagtaactagattaggaattgtatttttgttggctgtttagtgttcaacccaaatgatggtatgagatcttgtacttgcaagtaaactgtgtttttccatttctaatccagtattcaatgcttcacatattttatacacacacacacacacacacacacacacacacacacacacatatttattcgtcccaaaattcattattcagattagtttgaggaagtttttctggtccatgagaaatgacagtgtagtattactaaagatggttttaatatataccaacagaaaaaaaaagtgctgtgccagacatagaaatttgctgctaacattttattttagtatcttctagtcttttttagggacatacaaattttagaagttttttttttttaaatagaactatattgtggtttataaattactttttcactgaatattaataaatattttctatcttaatcttatttagaatatcattttaatttctatctcttatggataatcatgtgaaaatactatttaatcagtttctgatattgaatgtttaaacgttttctcaccctttgctattgcagacaacattataataaacatacatgaattttttttttcttttgagacagagttttgttgctcaggttggagtgcaatggcatgatctcagctcactgcaacctccgcctcccgggttcaagcaattctcctgcctcagcctcctgagtagctgggattacaggcatgcgccaccacacccagctaattttcgtacttttagtagagacagggtttcgccatgttggccaggctagtctcgtacacctgacctcaggtgatctgcctgcctctgctttccaaagtgcagggattacaggcatgagccaccacacctggctgaaattttttttaaaaagatgattttagagaatttttccagaaagatgtatatcttcaatttaaagggtttccctttattctgaaactgtttcctaatttggggagggtatgttgtaaatagtctttattttataaatgatgaaagtaaatggaatttgggtttaaatttctttttttggcaaaatgaaaagttggcaaccctgtatttgtcccattttaagaaagcttacagtgtgcaaaccattgatctagaaatgtaagagcaaaactttatagctcaactttagtaagatttaaattggtgtgatctaatcttcactttattgaaatacaaatcagggcagaaatcctcagaaaagcaaacccatctgtggcttcctttagcaattgatgattctgtgtgttgtctaaatattcctgatccatctgtttgagggagaaagcaccaaaaggcatataataaacatttatggaagtgattgcctattttgcttcagtctatttagatgcctttgctatgcatctttgaatatgaatagtaatgaacaatctatctgtcaaataaaatttaggaggcagctaacatgcattaatatctcctgccattgaatgaattcttcattgaaatgtgggtgcgtgctaagaagtgtaaagaggggtttcaaatccagaaataacaaatgttccatcatctcagctacaagtttttgacttagagagtcagtcttgattgcagagaacatgtttatcccatacagattagctcatggcagactgtcaggatcatgccatcttctttttgaacttttctataagctattttcttgttaccgtgatttgtgaatttatattgaaaggatacccagacttatcaaaacatcttgtcttgcacaaaagctgtatgattgctttaatcttacattttcagttatttttcttgagtataaacatggagatttcctaggaatatattttattttaacatatgatggtaggagtaaaagtagtgttttcttatgcttttagtaattgatttttccattagcaaattggtctttgaggagcatcttgagaaattttgttgtgagtgaagcaactgcactattttttttaaagtaacccatttatggtaattcgtgttctttttaccatgtatgtaattaatagcactcatgtcccttctttcccctgtcttgaatattattagagattatttattgctgtaatacttaacatttgtgtatgctttcatctggttcacagcatttatgtagtacattgaaattaaggtccaaaactatcatcctctagtttgaagcaaggtgtcattatatagtggtttattacacattggttttccaagaatatattttgctgttgaataaaacctctcgtggagttttatcttggaatgccatttatctgaacaagttcatttactgttgttgacctgtctgactttgtagttgtaggatggtgtcagcaaagcaaatagaggattggaaggttatgcagcatcaaattgcaattggtaaaaatagtcaatagaatatgtccttcagagttttcaatatattgcagaattgtatagaattgagaaataataagtgtaaagaacatttttaaaagtttttgtttatagcttaggttaaaacatggttttgctagttgtttatttacaatataaaatctattggcacatttatttctattttgattcaaagaagtctgtttttatttttaatttggtgtatttcacccccagatatatagttctttttttattgttttttactctcaagaattgccaagaagatgcttttagaagaaattaaagccaatctttcctctgatgaggatggatcttcagatgatgagccagaagaagggaaaaaaagaactggaaaacaaaatgaagaaaacccaggagatgagggtgagctccccagagagaagtttataatgtcataatttgattccttgactaattcagtctttgaagaatatctgaccaagaaatatcttaatatggcccggcgtgggtggctcacgcctataatctcaggactttgggaggccraagcaggtggatcacttgaggttaagagtttgagaccagcctgaccaacatggtgaaaccctgtctctactaaaagtagctgggcgtgatagtgcgtgcctgtagtcccagctactcaggaggctgaggcaggagaatcacttgaacctgggaggcagaggttgcagtgagccgagatcacgctgctgcactccagcctgggtgacaaagcgagactccatctcaaaaagaagaagaagaagaagaagaaaaaaaatctcttaatacttgtatttagagttcatggaaatgtttaaaactttattaccatgacttctcttgaatatcttgtaataattatggaagttactctaattttgtcagttactgccaataaacagatgattttttttttttttttgagacagagttttgctcttgttgcccaggcaggggtgcaatagcgcaattttggctcactgcaacctctgcctcccgggttcaagcgattctcctgcctcagcctcccgagtagctggaattataggcatgcgccaccacaccctgctaattttgtatttttagtagagacggggtttctccatgttgatcaggctggtcttgaactcccgaactcaggtgatctgcccacctcggcctcccaaagagctgggattacaggtgtgagccactgcacccggccctaaacagatgattttcaaagcaaaatattttataccttacaaagggttctataaatatataggtgatatttagtcaatatttaataatagtaatatgtcaagtctgatgtgtgagattacctgataacaccaatgataccaaagtatgtgtctaactctgatttttttcataagttgcagtagttgtcaacaggcaaaatagatatacgaggcattttaaaggctgaagaaggttttattgatttatttccttcatttagaagcaaaaaatcaagtcaattctgaatcagattcagattctgaagaatctaagaagccaagatacagacataggcttttgcggcacaaattgactgtgagtgacggagaatctggagaagaaaaaaagacaaagcctaaagagcataaagaagtcaaaggcagaaacagaagaaagggtaagatgttttaattctgaatgtaaagaacatattggaccagacagtggcttatgcctgtaatcctagcactttgggaagctgaggtgggcagattgcttgagcccaggagtttaagaccagcctgggcaacatagggaaacctcatctttatgaaaaatagaagaaatagctgggtgtggtggtgtgcacctgtagtcccagctacttgggaggctgaggtgggaggatcacctgagccccggaggtcaaggctgtagtgagcagcgattgcaccactgcattgcagcctgggcgacagagtgagaccctgtctcaaaaacaaaagcaaaaacaaaaaaaatactggttttgtaaactaattatagtaatgaaatttaagtgtatggccaggcacggtggctcatacctgtaatcccagcactttgggaggccaagtcgggtggatcacaaggtcaggagattgagaccatcctggctaacacggtgaaaccccgtctctactaaaaatataagaaattagctgggtttggtggcacgcacctgtagtcccagctactctggaggctgaggcaggagaatcgcttgaacccaggaggcggaggttgcagcagtgagctgagattgcgccattgcagtccaacttgagcggcagagcgagactctttctccaagaaaaataaaaaaaaaaaaatttaagcatatctgctcaaacagttgaccacttatattaagcaaatgtcagtacactggcaacaagtatactatcacatgagattaaaattaataatttagagtgggaagataacccagaaactttagatgacacaaagaatatttttaacctttagattataaagagaaataaatatgatttaataaataaaacattatgtagaaagtataagattgcatacaactgcagaattagtgctttcctgtagaagggtagaaaatgaaattaatttgggtaaatttatgcaagcttatatgcagaacttgactggcatatagtcagagtagatttccatttcattaaaagcctgagtccttttgcattgagggcttacatgtttccagcagtatggtgggcattgaggatacaaaaatgaataaaaatgtatctcagtgattctgataggtaactaggtttggcagtcactggtttagtaagaattattgacctttgtattataaaaaaattatagcaccatgagggacattttgtgtaacgtaattatataatgtggcacaaagaagggcttctttagcttcttgaggggtaggagttaccccagagaaggcttcacaaagaaggcttttacccaacagattaaattcaaaatgtgggagcacgtagattgttgtgaagatttacaacacaagcagggaaaaaaattttaaaacctgtgtaaaatgttggcacatgatggatgggatacaattaatatagtataagctgctctatagataggagtagggaaaggaacaacaggggatgaagctgggcctgtaaaacagagaccagatactggagatctttgtaagcctgtgtttttcacactggagtactgggtggtataccaaggtgtacatctctttggtgtctctatttataatttgaggtttggggaaggtcattttatgttaaataatatatattgggtaattaaatgtgatatttgcctgcgaattttgggtaacaaaaagttcaaagaatttttttgttgttgctgtggtgggctttttgatgactaggggtaaattttgaagactgttgttagtacccaacccatggatggcagatgaactcttctttgccaactgggaataggaacgcatttttgcaagtgtttgggaaatataataggctctaaaggatgcagagccattgaaaagttttttttttttttcaattactgtatttatttttgaactctggacctctggttatccacctacctcggcctcccaaagtgctgggattataggcgtgagccaccgtaccggccttatttttaaattttttgtataacagctatattgagatataactcacaaaccacacagttcaccatttacagtatacaatttagcagtttttagtataatcatagaggattaccaccactttaaaaaatgttttatttgaaatgtatgtacaaagaagtgcacattatcaataagtagacatcttgatgaaaacgtagggcacccagatcaaggaacaagatgttgattactaacacccaagaatcacaatctcagcatgaccacttttttccctattgaaagattttaatcaaagatatcatatgatcagattagttccttactattcagtgagaatgaaggcactgaatgtttggaaggtattgctgtagttgatgacaaatggggttgttggagaagaggaagattgacttgagtcttataggaggttgaattgttaggtcttcttaattggtatgaaagggaaaagtctacaatgagtgtcaggtttttagagttgtcatggtgtatgtacaatatcacagaaatagttaaggttattcagtggagttgtaatgttttacaaatggaaagctaaggacatagtcttggaatcctaaacatttatagggcttttgggcaagagttattcactaaagatgagggggagaagttcttgccacacacatatacaattaatatgtcatggacattttaatgttaataaataatagtacatcattttgtgactacttgtcttataaatttcttttttattattattatttttttatttttattatttatttatttatttattttgagtcggagtcttgctttgtcgcccaggccggagtgcagtggcgcgatctcggctcacactgcaagctctgcctcccgggttcatgccattctcctgcctcagcttccctagtagctgggactacaggcgcccaccaccatgcccggctaattttttatatttttagtagaaacagggtttcaccgtgttagccaggatggtctcgatctcctgacctcgtgatccacccgcctcggcctcccaaaagtgctgggattacaggcgtgagccactgcgcccagcttgtcttataaatttctttgcaatatggctgcaagctcttacagattctataaaggaactgtgtgatttagcatgttatatatcacaacatggattcctgtgcctcttcaacaaaaggggcaatattgattttgcttctgaagcttagttcaatatatagacccttttaatatatatgattacatttgagatttgctttattaaaacctgagttttctgtgatctgtgtttctacagcctgattctgtgggtaatttattacccaagtggttttgttgttgttgttttttgtttgtgtaggagagagtaaacttctaaaatctcatcatatttgtgtttctaatatggattgtgatcatagtggttgatatatagttgaagttgcatgattttctgagttttgtaaattctaatgttcctatattatttggaaatttgaattgagagatgggaaaaaatcagtagtgaatagtctgcttattaaatctagttgaattaaattgaaatgcattgaagaggtataagaacaaagtgcaacatgtgaactctaattttctcctaaattagaaaaatgttacaaaattattttagtgacaatttgaaattgtaaatattgccttcatattagatgatagtaatttttttttcagatgtgataatggtatttagttatgtagggcagtatccttatgcttaggggtaaagtgtcatccgcgcttaatatcacatggttcagtgtaagaaaagttgtgtctgcctgtgtgtgtgtgtgtgtgtgtgtgtgtgtgtgtgtgtgtgtagagagagaaagaaaaaaagcaaatgtggtaaactgctaacaataagtgaatttaggagaagggatacaagtgttcattcaataattctttcaaatttttggtagatttcaaaaattttaaaatgctgggtgaacaattaatactaggcttaaaattatacttaattacaggatttttttgtgtcagtgtgtgtgtttttggtattctcccagctttccagttgcttagctattctttttttttattattgtggtaaaatatatgtaacataaaatttaccattttacccatttttaagtgtatgattcagtgacattaagtacattcacatttttatacaaccataacttctgtctgtccctaaaacgtgtcgtcattccaaatggaatctctttaaccattaaacaataactctttgttcccctctcccccgacatttctttatagcatttatgttctcccatttatagcatttctgttagcatttatgttctctcattttttaaaaagctggaatagatctttgattctgatctcaggttatgatagatttttttaaaaaattattttgaaacaattcttgatttacagaaatgttacacaaatagtgcagagttctgtgtatctttcacctagcttccctgatttaataccctatcatagtaccatgatcaaaaccaggaaattaatattggtacaatactatcaactaagccgggggtttacaaactgcacctgtgggccaaatctgatcctctgcctgtttttataaataagcttttattgaaacacagccatattcattaatttactgttttcacatatgtacaatggcaaagttgagtagagatgagtagttgcaacagagaccatacggtccacaagtcaaaaatatttactatcaaactttttacataaaatgttttatgacctctgaagtaaactatagatcttattcagagattagttttcccactaatgttttctttctgctctatgattcaatccaggatctcacattgcatcgagttataatgtctccttaatctacttcagcctgtgacaattcctcagtctttactttgatgaccttgacacttgtggagtgttgattccttattttctcaactgttccttgatatatatttgtctaatgttttctcatgatcgaattgagattattatgcattttgacagaataccacagaagtgatgttgtgtcttcagtgcatgatatcaagaatagatgatgtcagtatgtctttttttttgagagaagacctcgctctgttgcccaggctggagtacagtggtgcgatcatggctcactgcagactcaacctcctgggctcaagtgatcctctcgtctcagcctcccaagtagctgggaccacaggtgtgtaccatcatgcctggctaatttttaaattttttttgtagagacagaatctccctatgttgcccaggctggtctcaaattcgtgggctcaagtgatcctctcaacttggcctcccaaagggctgggattacaggggtgagccaccatgcccagccgtcaatatgtcttattactctcacggttaacttttgttacttgcttaagttggtgtctgctggtatttttccactgtaaagaagaaaatattatttttctatctatatttagtattttgttgggagatactttgtgaccatgcatatatcctgtttcttatcatacttaagcccactaattttagtatgcatcttgggtgaagcagttagtactgtggtatttgcctagttgtaattttctatttatttcattacttccacatttagtaattgtaagggagatttgttttcccctatttatttattgcattatttatatcaatatgacttatagatttttattttaccagttataatcaaatagtatcatttattttattgctcaaattgttctagctttggttgttgggagctccttcaagttgaatcttgtgtcctttcaacatgtgcctgcccatgtttgaacactgctttgttttctggcactataagatgttgtaagcttatcttgtatttttttctgccctgcttcctctggccagaaagaggttttctcctggaattttatatgcttccattactgtgttaattgtgagaaaaagaaaattgaggattccacatgtagagcctgattttcctggtgttgtggctagaaatagggatttttcttcacagtcttgttgtcagtaccgtctgcatacctttggaatttagcctgccttctggtcaaaaccaggaaacaaagaaagaaaataaccatacgccctcacagctctctcccctccaccaattgtagaggggtcattattcaagttttgatttcagtctccaatctgcctattattgtttccctttccgagttcttcggttgtgtcatcattggtggagacaatctgtaatcttactccatcttggccagcctaccttgcttgttttgaatagccaaacttctttttcattaatttacctttggtaattacatatattttattgacaggtaatttattcttattctgtcaattcatrtacaattgaatacttatattttaatgtacaaccacagttttataattacattagaaatacatctgaattttatgtatatcatgtaaagcattaactggtatattctatattatgtattatccattcacatatatacctctgatgttcttacaatgctctgttttaatgtcgagtcagtggtaaattaagtgaattaggtttctattgaaaaataattaataattttatgtattttttaaaattcaagtgagcagtgaagattcagaagattctgattttcaggaatcaggagttagtgaagaagttagtgaatccgaagatgaacagcggcccagaacaaggtattataattggtttttaaaaaattttaggaattaatctgaatgaccatgccttcaaatgatttatatggttactgttaccaataaagttaagttagtgtgatatataatattttgatttgaaactaattgttatacttaatagtttaaaaagaatctaagcatattttatgtgtagttgaattatgtattctaacctgggtagattttcagtctgcaaaaccactcgtgtctgyagtgttttattgttacgggggaaattgtaggataatagtaaagaggctttatagaaaaactgcctcagtctaactttgggcttttctactttctgtttgtataaataatctatgcttcagtttcctcatctgtaaagtgggggattacaatatacttgactgactattgtgggcattaaatgagacaatacgtgtacaaggtttataatagtacctacctggcaaatagtaagtgctcaatatataaattattggtctcagtagtactacagtaataatgatatgcttgttcttgtaacacgaacagtcactgatctagattacctgtaatttaaaatttggcttccttcttagtatggtatgttagataatactactactacaattttcttatttcccccagaataacataatctttctacagtttatcaaatgaacaatctgtgtgtgtttgtgtatgtatgtctacaaaggtgtctatctgcatttgtaagttttagaacattcgaggtttttttaggttaatacttaccaggttgtgcttagaatatagcaatatattatactttaagtcaatataaaatgaaaatgataagatatgatgagaggttttttttttttttaaaccaagatacaattcagcatgttatactgtggaatacagtggtcttcagaatatttgcaaagttgtgcaacaaacaccactctataatttctgaacatttccatcatccaagaaaacaaccctgtacttactagcagtcattttccattccccatgccctcgtactctaataaacactaaaatctactttctgtctctatggatttgcctgttctggatattttgcatgagttgattcatataatgtatatccttttatgaatggatttttttttcacttagcataatgttttcatggttcatccatgttgtagcctgtatcagtacttcattctttctttaatgattatttttaatagtggtaaaatgcacataacatttaccatcttaaccattttttttctttcatggtattactgggaatttttattttcatcttaacgatttttaagtgtatggcttagtagtgttaagtacattcactttttttgaaccaatctccaaaaccttttccccttgcaaaattgaaatgttactcattaaaccactctctttttcctcttccctgaagcccctggcaaccaccattctattttctgtctctatgaattttactactctaggaacctcatataagtggaatcatacagtatttgtcttttttgactggcttatttcacttagcatcatgtgctccaggttcatgtatgttgaggcatgtttcagaattttcttccttttaaagacttaatgttccattgtataccacgttttgtttatcaatttatttgttgatggacatttgatttgtaaccttttggctatcatgaataatgctgctttgaacatgggtgtagaaatatctcttcaagtccttgctttcatttcttttgggtatatacccagaaaaggaattgcatggtaattctatttttaattttttgacgaactgccataatgtttccatagcagctgcaccattttacatttccattaatagtgaacagggtttcactttctccacatccttactgacagtggttattttgtctggattaatgtagctttstgtaccaatttctaagcccagaaatatttttctcaccaaaagttgttacttttttttttaaatctctgtgacctgttatgaagaaaacagtattcaaatttgtaatctgcttttttttagtgatgatgaatgttttttagtatgtctattggctgtttgtattttatactagaagaatagtcttaatgtccttttatgcatcttcttactcatataacaaacctcccctcaggatactgtaaaatgttgatcattggattaaaatgaagggttaggctgctgctggaatatccattttgaacctattgattttttttctgtttgtttttaggaatgcatacagaggtagaacagttttaaaatagtacataacttattgatggaagtttatcatgaaatattttattttgtgttttaaattttcgtcaggtctgcaaagaaagcagagttggaagaaaatcagcggagctataaacagaaaaagaaaaggcgacgtattaaggttcaagaagattcatccagtgaaaacaaggtaataatgacatttaccacatgcttgaattataaccagtacagtagactatggtaattatgctgttacctctctgttccattcattcattgtattgtactggcttatttacattttacacttgtggaaggattggttattgaatatatatatgtaaaagtattgatttgacattatcatttttttctattccttaatttctaatggaattttatttaagccattctaattcattattttacatttgtagtgatgtgagtgttctattttctgaagacaaaatactatcctgaatgatgacycatatatgaataaatttcttctcatagtgaaatcagccaatttgaatttttgtatttaagcaggcttacataaagtaaaaggtgtctgtaatatgtttgattctgtcaacacaatgctcttcagagggatatttgtcttttgaaaattaacttttaaaatattttaaaatgtacagttcagtggccttaattatattcacaagcagaaactcttcactcattaaacattaacaccatttccttctatcccccatcccctggtaacctctattttcatttatgtctccaagaatttgtgtattttaagtacctcatatatataagttgaatcatgcaatatttgtccttttgtgtctggcttatttcattgacataatattttctaggttcatccatgttttagcatatatcagaatttcattccctttttaaggtgaataatattccattgtaagtgtgtgccacattttgttagcccagtcatctgttgatggacatttgggttgtttctacctttcggctattttgaataatactgctatgaatatgggtgtttacatatctgagtccctgtttttaattattctaggtatatatggaaaaatggaattgctacatcatatagtagttgtatgtttaacttttggaaaactccacactgtttttctctggtatctgtaacatttgacgttcccgttagcaatgtaccaagattccaatttgtctgcatctttgccaacacttcctttgtttctttctttttttctttttttctttttttttttttttttaacaagaaacatcctaatgagtgggaagtggcatttctttgtggttttgttttgtattttcctaatgactggtgatattcaacatcttttcatatgcttatatcttcttttgagaaatgtttattctagttggtagcccatttttaattgagttgtttgttttttttaataggtgttgaagagttgttttttttttttgagacagagtctcgctctgtcgcccaggctggagtctgatggcacgatctcggctccctgcgagctccgcctcctgggttcacaccatcttcctgcctcagcctcctgagtagctgggactacaggcgcacactgccatgcccggctaattttttttttttgtatttttagtagagacggggtttcaccgtgttagccaggatggtctctatctcctgaccttgtgatccacccgcctcggcctcccaaagtgctgggattataggtgtgagccaccgtgcccggccgaagagttgtttttttttttttaatactactctattgctgaatataattctaaaggttttcagcatgttttcttccaccttttcctgctgtgttaattaatggaatatgaaatggataaattaaatgactttgtactgtttacctctaattgtttaaattctgtagagtaattctgaggaagaagaggaggaaaaagaagaggaggaggaagaggaggaggaggaggaagaggaggaggaagatgaaaatgatgattccaagtctcctggaaaaggcagaaagaaaattcggaagattcttaaagatgataaactgagaacagaaacacaaaatgctcttaaggaagaggaagagagacgaaaacgtattgctgagagggagcgtgagcgagaaaaattgagagaggtaactaatttctttcttcttctttttcttttgtagctacagggtcttgctctgttgcccaggctggcctcgaactcttgggctcaagtgatcctcctaccttggcctcctaaacttctgggattacaggcgtgagtcaacacacccagccttaatttatttctattaatgatttattttatttggtatatgacttcaatatatttcagcattttaagagtagaatgttgtaatctaccacagatttcttttttttagacggagtctggctctgttacccaggctggattgcagtggcatgatctcagctcactgcaacctttgcctcctgggttcatgtgattcttgtgcctcagcctcccaagtggccgggactacaggcatgcactaccacacccagctaatttttgtattttttagtagagttggggtttcaccatgttggccaggctggtcttgtgctcctgacctcaagtgatccacctgcctcagcctcccaaagtactgggattacatgtgtgagccaccttgcccagcctcaaccacaggatttctagttgcaattgatttttcctactgtcactatttcatgcaacttaaaatagtcattaagctttattaatttaattaagtgcatggaaagcattgagattcttgaatgatcaccaaaatggttatgttgtattttgggtagagaaatgtttcaaaattacttcttaaatccataaaagatttcagttttttaaatggactttatgttacaaaagttttcaaattcacaggtggagagaataatataataattctccctggatctattaactcagtttcagcagttactaacacaggacgagtcttgtttcatcttttttttttttttttttttttttttttttttgagatggagtttcactcttgtcacccaggctggagtgcagtggcccaatctcggctcactgcaacctccacctcctgggttcaagtgattctcctgtctcagcctcctgagtatctgagattacaggtgcacgccaccatgcctggccgtttcatctattctttttccttcagattatttcagagcaaatctcagaaatcatattctgtttataaatagttgggaatgtattgttaaaagataatggtattttaaacattactgcagtgccattattaaactgaattctctcattgcctcacatagtagttttaaaaaatagttggtatgggcctggcgcggtggctcacgcctgtaatcccaacactttgggaggctgaggcgggtggatcacctgaggtcaggtgttggagaccagcctggccaacatggtgaaaccccgtctctactaaaaatacaaaaaaaattagccaggtatggtggtgcacgcctgtgatctcagcctcttgggaggctgagacaggagaattgcttgaacctgggaggcagagcttgcagtgagccagggttgcaccattgcactttagtctgggtgacaagagcaaaactctgtctcaaaaaaaaaaaatagttggtttgaatcagggtcttaacaagggccatctgcatattctgttgtatttggatgttacatctcttacctaattttaacctagtttctctttggttctttctttttctttacccattcttacagttcatttgcttaagaaaccagattatttttgtaaaattttctatattctgagttttgttatttgcatccctgtggtacagtttcactggcttctatatttcgtataaattggtaataagatctagagtcctgatcagatttagattcagttctctttttggtagaaatactcatgggcagtaatatgtacttccttttggatctcattaagaggtactttaaaactgcttgtccctttttttgtggtacagctcctctaactttgttccactttttcagaatctttttggatattctcagttctttgcatttccacatagtattacgttgttggtttttacaaaaatccctgtggaatttctgttggaattttgttgaatctttcttgtaatgtggccagaagacatcttaacagtgttttgtctcctgttacatgaatatagtgtacttctctatttatttaccttctctttaatttctcttaggaatgttttgtagttttctctgtacaggtctagtacatattttaaaaaatttatccccaagtaattcctgatttttgatgttacattgtattagtccattttcacgctgctaataaagacatacccaagactgggcaatttataaaagaaagagttttattggacttatagttccatgtggcttggggaggcctcacaatcatggtggaaggtaaaaggcacatttcacattgtggcagacgagaagaacttgtgcagggaaactcctctttttaaaactatagatcttgtgagacttattcactatcacaagaacagcacaggaaagacctgcccccgtgattcaattacctcccactgggtccgtcccacaacatgtgggaattcaagatgagatttgggtggggacacagccaagccatatcatatagtaaatgtagtttcacgtaatgttggcataatgaccttgtgtcctaagctctaaatttacttactcgttatagtagcttttttgataaattctttgtgactttcatgtatacgtttgtgttgtctgtaaagaaaaactattttgctaattccattccaatctgtcatttatttttttaaaattataaatggtgaatttcttcaaatgcttttcattgcatctgttggagtgacctagaaaatgtcttgtattccttgaataaaccttgcttagtcacgttatattactccttttatatattgtattgcatttgctgatccttccttccttccttcctcccttccttccttccttcctttctttctttctttttctttctttcaagatagggtcttgctctgtctctcaggctagagtgctatagtgtgatcatagctcactgcagcctcaaactcctgggctcaagcaatcctcttgcctcagctttccaagtagctgggacaacaggcatgtaccaccatacctggttaattttttattttagagattgggtctcattatgctacccaggctggtcttgaccccctggcctcaagtggtcctctcccatcagcctcccaaagtgctgtgactatagtagggagcctccacacctggcatattccatttctttaatacatgtagaactatttagatcttttctttttctttaggtctgttttggtaaatttcaaacttaaggaatttttccatttcatttaagtagtcaaattatttatgtaaatttgtttatagtctttcattatactttgtaggttctgtcatttattgtttctgttaggaatttgtgttttatcattttttccttgattaatctgtgcaaaaagttcacaattttactatctcaaaaaaaaaaaaaacgcagctttggatttcattaattttttttctattgtttgacccttttctatttcattgattttcattcttctttttactgtgtttatccttctttggacttattttctgttctttttctagctacttaaggtggattttggatcttctttaacgtatgcatttttaaaggtataaaatttgccactgtgcatactgtttaaacactgcatcttacagattttggtattttgtgttcatttttactctgctctgaatcttttctaatttctgtgagccagaatatgatctgtcttggtggatgttcaatgtttatattctgctgttgttgggtgacatattctataaattttgatcagattatattgatggctgattatattcacatcttctgtagttttaatggtattctctccaatcagaggagtgttgatgtctccaactataattgttaattcatctctttctccttgtaggtctctcagattttgcttcatgtttgctggaagttgttttgttaggtacatatacatttaggattacatctttctggttaattccccctttaacaacatgtaatgtgactctgtattatctggtaattttctttcacctgaagtctgctgtatttgataataatggtaacgacatcatcatctttcttttccaacatcttaggaaaagtttcatttatacagccaggttgaaagtatttcattgatttcctgtaaacttacttcctagatttttttcattgtcatatttttcattttcatgtttcctttattacattcctatttatgtactaatctttatctatcagtacatctttttatgcatttcatagtaaattgcatacatcatttcatttatctcaaatgctttagcaggtgtatcattagctaaagttcaatatttatgtgttttcctttttatgtaaaaggaaatttacttaaaatgaaaggcaaaaatcttgtgtacatttgtttttgaataatatgtggtgtatattttctcattatttttttctagtaattttgttcccccacaattttatcgtgaaatttgtaaatatatggagagaattgtaaacatgaacacgaatgtacctaccatgtagcttcttcatttcttaacatgttgctgtatttgctttattacatatctgtcttatctatgcatccatcaaccattttattcgtccctgctctaatctgtattatttccttttattctctagctagggtttagtttgtgcttccttttctggttccttaaggtgtaaagttaggttcttgattgtgatctttcttcttttctactgtatgcctttatcgctgtaaatcctcttcttagtactgttttctctacgtcccatatgttttgtattttgtgttttaactttcatttgtctcaaagtgttttctaattttccttgtgatcttttacttgatcctttagttacttatttaatttccacatatttgtgttctttccagttgtcttctgttatggattttttgttgcattcccttgtgactggaaaagatacttcagtctctttatatttattaaggcttttttgtgcctgattatatggtctgtccttgagaatgtgcacttgagagaaaatgtatagtctaccattgttgagtggagtgttctttatatgtctgttaggtctattttttttttttttttaaagacacagtgtcttgctctgttgctcaggctggagtgcagtgacgtgatcatagctcactgtagcctcgaactcctgggctcaagtgatcctcctgcctccgccccttgagtagctgggaccataggtgcatgccaccaccccagctaatttttttaaactgttttacagaggcagggtcttacagtgttgcccaggttggtctccaactcctggcctcaagtgatcctcctgccttggcttcctaaagtggtggaattaaggcatgaaacactgtggccagctccaattggtttatagtgttattcgagtcctatatttccttaattatctttgtctacttgttttacgcttttattgatattgggctatttatgtctccaactgtttctctctttttttgttttagttttcccctactacactgatgtatatttctccttttagttctttcagtgctttcttcatatgtcttggtgctctgttgtttgttgtatttatgtttataattacattttttgagaacctggctttattatcaatacataatatcctatttgtctcttgtaacagtttctgacttaaagtctattttgtctgatgtctatatagtcatctcagctctcttttggttgttatttgcatggaatgtcttttactattctttcactttcagtttatttgtgtctttagatctaaagcgaaccttttttagataaccagtatttggatcattttttaaaaattattatgtccatctatgtctttttgatccaggagtttaatccatttacacttgaggtaagtagtgataaataaggatttacttctgccattttgtgttttcctttttcattttgttcattattttgttcattatttcctccattactgctttcttttgtgtttggttaattttttgcagtgacatattttgattcccatctcactttcatttttgtatattctatattttctttgtggttatcatggagattacatataacatcctaaagttatgagagtcttacttgaattgatgtgaacttaacttcagttgcatacaaaaattctactcttccacagctccattcccctgtatattatgtggtgactctgttacaattattgatatcacaaattacatttttatacatgtcgtgaatggtaacatatattcataattgtattttatgcttttgtcttttaaatcctaaagaaagtaaaaagtgaggttatgaaacaaaattttgtgatactaggttttatatttgcccctgtatgtatctcttctaggagatctttatttctttatatggctttgagttacttctagcatcctttcatttcaacccaaagacttccctgtaggaagcattttttatagggcaggtctagttttaacaaattcatttggcttaggagtgtcttaacttgttcctctattttgaaggataattttgctgggtatagaatcctcagctgatgcctggcacagtagctcacccctgtaatcccagcactttgggagaccgaggcgggaggatcacttgaggccaggagcttaagaccagactgggcaacatagtgagaccttgtctttacaaaaaattaaaaaattatctggatgtggtggcacacacttgtggtctaagctacttgagaggttggaggattgctttagccaggggttcgaggatacagtaagctatgattatgccattgtactatagcctggatgacagagtgagatgctgtgtctattttttaaaaaagaaaaaagaatcctcagctaactttttttttcattcatcactttgaaatatattgtcacactgccttctggcctctaaagtttttgatgagaaattaggtgatgatcttattgaagtttttttgtatgtgttgacttgcttctctcttgctgctttcaatattctctttgtctttggccttcgacagtttgtgtgtaatgtgttttgatctatacgtatttgagtttatcccagtttgagttcattcctgtatttgtagatttaagtctctctccttcaatttgggaagttttccacaattatttcatcaaataattgttgcttctttctttttcttttctccttctgtgactctcgtaatacataagatgttcttcatgatggtttccctcccatccctttttgtttcttcactttagtttttttttttccctttttgatcttcggacttgaggatttcagttaatatcttcatattcactgattcttctgcctgctcaaatctgctattcatcctcttttgattgggccatattttcctatttggctgtatctttgtgattttttttaatactttaagttctagggtacatgtgcacaatgtgcaggtttgttacataggtatacatgtgccatgttggtttgctgcacccatcaactcgtgtgattttttaaaattgcatattgtgtatttgactgttgtaacttggcaactctgcatatgaggttctctcccttttcaagggtttgctgggattttaaaatatatataaattgtagtagacctattgttttaagactcccccacattattttttcaaagagtgttcttgttgtgtgtcatcagtaaagtctctgtccctttcattcatgttcaactaatgttttgaaagatttttttgaacgtctgctgggtgtggtggctcacgcccataatcccagcactttgggaggccaaggcaggcggatcacctggattcaggagttcgagaccagcctagccaacatggtgaaatcctatttctactaaaaatacaaaaaatttagccagacatggtggcacgtgcctgcaatcccagctactcgggaggctgaggcacaagaattgcttgaacccgggaggcagaggttgcagtgagccaagattgcgccattgcattccagcctgggcgacagagcaagactccatctcaaaaaataaaagaaggctttttttttttaatgcctgctctctctgtttgtagattgattgtgctggtgcactcctttaatccataactaggcttccactaaacctaaagataagcctgaggggaaaacttaagattttaataaagatcttttctgagcatgtattttacctggacacacatatggctttctgaattatcctatatacctggttgcttttgagtgtcccaaatttaaaagtagctgcgtgtggtggctcatacctgtagtcccagcaactctggaggctgaggtaggaggatagcttgagcccagttgtgtgaggccagcctgggcaacattgtgagaccctgtttctacaaaaataaagactagttgggcgtggtggtgcacacctatagtcccagctacttgggcggttgaggtggctagatcggttgaggtggctagatcggttgaggtggctggatcaattcaacccaggagttcagtgctgcagtgagctataattacaccacagcactccagccttggtgacaaagcaagaccctgtatcttgaaaaaaaaaattccaaaagtgtcctatctctagctatttgggccttaggtggtgttttgggtgtgttcccctgtaatgccttgccccaggcctgtagtcacgttgcagttgttttgtgtgtgtgtgtgtgtgtgtgttttaaagctgttcttgttgtccttctcaccagagctctgagttaggtgaagaaatgatgagagccttatgtcagtccttcaagtatccttcagacaggttagataaaatttacacaataatttgtaaataacatctgctttgctccctctggtttgtgggaggatactgggaaacagggtgctgctgctttgagactaaaaccttcaccttctggtaggtggtggggcaaggacaagtaaaaatgctgtaaaacgttcctattgtattgaaggtgactttttttctttttcgttattttagagacagggtcttgctatgttgcctgggttagcctcaaattcttgggttcaagcgatcctcctgtctaggcctagttgtttgtactacaggcggtcaccaccatgcctggctaagatgttgttttcttgattgggtatttgcttggttgctgtaaacctttgactgtgttccagagctctgacaaagttggttcagaaagtttctacttgtttacaaaatagttctgtgtgggaactggagtttggagcttcctaatctattgttttgttgatatctacattttcccttcttttttttttttgttttttttttggagacagtcttactctgtcacccagcttggaatgatgcagtagcatgatcactgtagcctggaattcctgggctcaagcaattctcccacttcagccttctgagtagctagaagtacaggagcaagctaatctcttcatttttgaaagttgttttccctgggtatagaattctaaattgatactttaaaaaaatctctttaaagatgttacttctttgtgacattttgtttgttatctttctcctttttccttcatctttgctcctctgcatgtgccttttatttcttggaaagatagtcttaaaagatttttcagtattttaagattttctgttaatgtctggctttcggaaattgaagatttttattttctttgtttatcctgctctgggttccttgaacttgttggatctgtgagtttatagtttcatcaaatttttgttggtttgttttagagacagggtcttactctgttgcccatgctagagtgcagtggtacgataattggtcactgtaacctcaaactcctgggctcaagagatactcttgcctcagcttccggagtggctaggactagaggcatgccctattgctaatttttaaacttttcgtagaaacaaggtcttgctatgttgcccaagctggcctcaaacttgtgacctcaagtgatcctcacaccttggcctcccaaagatcttggattacaggtgtgagctaccatatccagcttccatcaaatttttggaaagttcacatcattattttttgaaataatttttttctgttctatttttctttgggacttatatattatgctctttaatattgttccataggtttcttattttcccccctctgtttcattttggatagtttttcttgctttgtcttcaattttgttgatcttttcttctgcactattatgatattaatccacttagtgaattacagtgtactataattttcatcactaggaattccatttagttttttgaaatatcttctatttttgttttcattgtgttcatgttttcagtgtttgggcattttttttttttttttttctgagatggaggctcgctctatcacccaggctggagtgcagtggtgcgatctctctgctcactggaacctccgcctcctgggttcaagcgattctcctgcctcagcctcctgagtagctgggactacaggcgtgtgccaccatgcccagctaattttttatatatttttagtagagacgaggtttcaccacgttgcccaggctggtctgaaactcctgagctcaagcgattcacctacctctgcctcccaaagtgctgggattacaggtgtgagccaccacacccggcctatttgggcatttttaatcagctgtctcactttacttgtctgcctatttcattatttctgttacttcttgtcccatttttgttgactcttttttcccctggttattcttcatattttttttcttcttgacaaacctagtaatgttttattaaaaagttcagtttaattttgaagcttttaaaaaagcctggttaatgcgtttcttcaatactctttaatttatgaattgctttgacccactgctaagatttggtctcttcgtggtctctactgaatgccctgggttataaacgaagaggctactgtgcctcctctgaaatcgaatgcctcccagcaccatgtgatcactgggagctgtttagctcacagcttcttggtcatgctctgcctggcctcacaaagtttcactcctcatgtgtgcattttaatgttcagctatgactcaaagtgaatcctgtcttgattttgagttctttttgtgtagctcttttttctttgtagttctgccccacaacttcagtcatctcagcctgacctttgtttcttcaacttgatatatctccagtgctctccttgggaatcccttttccctgatccttcaggcaccaattcaaggggaatataggggtcttgttggttttcctactctgagggatcagggtcccgtggtgtctttatttaatgactgaaaaaaatttttttcatatattttgcctacttttctacttgattacagcaggaaggtaaacctggttcctaataaaccatcatgactggaagcagaagtttggctcaaccttttaatattttggtcatatgattttttttcctttattttcccttcaattcagatatgggagatatttcatgtctgtatttatttttactacaccttaagtgattatttgtcctaagtttttctcctatttcattgctgtgtatttatcattttttaaaatttcagcttttagtttagatacggggtgggggggtacatgtacaggtttgttactaggtatattgtgtgatgctcaggtttgggatgtggatcccatcaccgtggtagtgaacatagtacccaatagttgttcagcctatgccctcttccttccctccccctccagtagttcatagtgtctattgttcccatgttgatgtccatgtgtgctcagtgtttagttcccacttgggagaacatgtggtatttggttttctgttcctatgtgaatttgcttagatttatagcctccagctgcctccaagttgctgtagaggacatgattttcttctttatggctgcatagtattccgtggtgtatatgtaccacattttgtttacctaatccaccattcatggtcacctaggctgattacatgtctttgctattgtgaatagcatggcaatgaacttatgagtacttgtgtcttttttggaagaattatttattttcctttgggtatatacccagtattattagttaaataaagtttccttatattatagcttgagtgcataaacacatctacttagtcactaataggcagatgatttctttttaacttatctcctcctacatttaggatgaagatacactaatcctcaatcctgaagacaacacttaataacaaaagtatcatcaagtcactgatgaacatatggttcagaaatcttaattaaagccttgtatattagttttttttattgtggcattaaaatgtaccacacacttaacctcttaagacaaacttatttgtctcacgggtcaggaagttgggaatagcttagtgagcgtggctctactgggttttctgcttagtttcccaccaagccgaaattaagatgttaactagagttttgctttcatctaagactttgtatccttttccaactcacttgttggtagaatttagttcctttcagttattacacttaggtccttagctactagagttctctctccacaacatggcagattgtttcatctttgagatcaatagaaaagcatttcagtcatttaaagggctcactttaattaggtcaggctcacctagaatatctcccttttgattaaatcagagtcagcttattagtgggccaattatgcgaatgatagcccaatcatatttacaggtctcaaccatactcagaaggtgaggggattatgcagggtgtttatatcagatgacggtaattctggggccattttaggattctgtgtaccacaccttgtaaacaggacaagacatttagggaattttccatttttatataatggctttaccccagtgatatgaagctactacatatccaggctaggacacagtaataatttagtgaatacttagcctatgccagatactttgcatacattgccttattcagtctccagaacaaccttgtggaaactattgataatcattcccagtttgcagattcagacacagaagctaagagggtttaggtagcttgatgaaatggaatttgggtctgaatggcctatgctatttttacttcaccacactgtttctcagcgttaatcttggtttgtatatcacaattttatgtaagtacaatatctattcagataatttactgcaaatctgtgacttatttgtagttttttggatgtgacaatgatcgtatggttttacaaagaggaagtgtccttttaaagagacatttacaaacattttatagatgacattgcatattttcttgtgttcgcttcaaaatgatttgtgggatctggggaactggacaatgggtaaaatgctgtcagtgaaacaaaactggccttaagttgataattttctttttcttttgagacggagtctcactctgtcgcccaggctagagtgcagtggcgcaatcacggctctccgcaacctccacctctcaggttcaagcgattctcctgcctcagcctcctgagtagctgggactataggcgcgcgccactgcgcttggctaattttgttgttgttattgtatttttagtagagatgggatttcaccatattgaccaggttggtctcaaactcctgacctcatgatccacccaccttggcctcccaaagtgctgggattacaggcatgagtgaccgtgcccggccttaagttgataatttttgaagctgagtgatgggtaataggatttattattctcttccatctacttttgtgtatgtttgaaaatttctatattgaacattaacaaattcatttgttaactagttttaattgtaaataagaaaaaagtgcctaaaattttatttcttcaccattgtaatttttgttttttaatttttttttaaagttttttttgtttgtttgtgtttttttttttttttttttgagatggagctttgctctttcacccaggctggaatgaagtggcacgatctcggctcattgcaacctccgctgccaggttcaatccattctcctgtctcggcctccagagtagctgggattacaggcgcccgccaccagcctggctaatttttgtatattttgtagagacagggtttcaccatgttggccaggctggtcttgaactcttgacctcaggcgatccatccccctcagcctaccaaagtgttaggattataggagtgagccaccgtgcccaactgcgtaatgtttttatgattttaaaatcacgagtttctatttttttttcatggaaccataaaactgtttatcacaagcatttattttactaaactagtattttgtaatgtttaagagcatggactcgggggatcaaccctctgggtaaatctcagtgtcatgatactcaatagtcgtatgaccttgtgcaggttactttacttctctgtccctcagttttttcatctgtcaaatggtaatacttgtacctatcttgcgtagttactgaatatactatgtaacggatagagattaggataagacagcaaaaaatatatgcacacacacacttgttacctgtgtgcatatattatatctacttaagttttattctaaataaggagcttgtgataattgtttccgttttgtaattagaaggtattatatgttcctatcatgatttttgagcctgtggttctgaaaccagtgtttctaaatatttttttcttttcacatcatgtatttacagtgtttttcagtggtagtcatgttgacatcctgagtcgcacagttcttgtttgggactgtcttcttcctcctccttccttcttcctccttcttctttcttcttcctcctccttcctcctccttccttcttcttcctcctccttcttcctccttcctcctccttccttcttcttccttcttcttttttcttcctcctccttcctccttcttccttctccttcctccttccttcttccttcttccttcttcttcttctttcttcttcttcctcctcctcctccctcctcctccctccttcctcctccttccacctccttcctccttcctgcttcctcctcctcctccttcttccttctccttcttcttccttctttcttctttttttttttttggcatagcaaccaacaacagggaacactgcttttttcacaactctgtgtaataaatgttgttgaaatatccagggtgagatctgttgagctaaattactgacattatcagagtgatttaaaattttttggagagttttgattttagaagacataaaaccctgggctctgtcctggctttattgaagcaaaatagtagtgtattagttctgagattgggtaatttataaagaaaagagttttcattgactcacggttttgcaggctgtgcaggaaatatagtggcttctgcttccggggaggcctcaggaagcttccaatcatggcagaaagcaaagggggagtgaggcacctcacatggtgggagcaggagcaagagagtgagggagaggtgctgcacagttttaaacaactggatcttgtgagaactcgctcactgtcacaagaatagcaccaaaggggatggtgttaaaccattcatgagaaatccaccttcatgatccagccacctcccaccaggccccacctccaacattggggattacaattaacatgagatttggtggggacacagatccaaatcataccaattggatttgtggtgtgggagtaaatgtgtctatattttggaaaatctcccttggtaagactgaccattgcttgaatgatttctttgagcttaactatcaacaactccttttcttgtaggtgatagaaattgaagatgcttcacccaccaagtgtccaataacaaccaagttggktttagatgaagatgaagaaaccaaagaacctttagtgcagkttcayagaaatatggttatcaaattgaaaccccatcaagtagatggtaagaaactattagatgattcaataatttttagttaaatttttaccaatatttgggtgtgaggcagctgcctcacatcctgctaagtcctggaggtaaattggtgagtggggtggggaatccacaattcccctgcctttatggagctcataaacaaatgaggaagaacaaaattgggtgatttcaaacacaatgagcgttataaaaagagaaagaagtgctacttacaaatgggtagatatagcaagtaggtttcacctaattagcaaagactggcctaagggcagctaggggttgggaagagctgtagctagctaaaagcctttttcagaaaatgctatttcagcatttttaggtatgttttctttattagagttgaatcagtaagtcagttttgagtgtttatgtgaattaatcataagggaggttctgtagttcctaccttttgagttgctagtcccctttcttgctcagtgtttactatcgaataaaggaaaagatgatgaaattatctcatgggtttttttttcctgattgactcaataaactcaaaggtatttttgataggaagccattctctttttggataaagttgctctctttttacaaaaattattattattattttttgagatggagtctcgctctgtcactcaggctggagtacagtggtgctataacagctcactgcaatctctgcctcctggcctcaagtgattctcccaactcagcctcctgagtatctgggactacaggtgcacaccaccaccacgcccagctaattttttgtattttagtagagacggggtttcaccatgttggccaggctggtctcgaactcctgacctcaagtgatctacccgcctcggccttccaaagtgcttggattacaggcgtgagccactgtgcccggccacgtttctcttttagagtattcttatgtttctttgaaccatctcagggaatacagaacatctactgtggatagcttagagaagatgaaggaaagtccccctgttctatgtttgtgttaacttgtttctgctttagtttggtgggaaaaaatcccatttagatgtaagaaattatttagctaagtgtttttttaatgctgtttcttagaagttttggttatgtttttgatgtgtttatgtaaaggaagtttttaacttggacctttaaatttaacttaatgaagctgttatttttaggtgttcagtttatgtgggattgctgctgtgagtctgtgaaaaaaacaaagaaatctccaggttcaggatgcattcttgcccactgtatgggccttggtaagactttacaggtaagagctgaagaatatgaaggtatcctgtttttgtggattcattaatatatattggattctattatgtttcaggcacagtcgtaggggctgaagataaagcagtgaacaagaataacaagatctgtctccaaggagcttatattctagtggaggagagagctgctaatcaaataagaaatatgtactttcagaaaatgaatgttaagggaggatattgagttaggaaaggcatcttttaggaggtaatgtttgagcagaggtcctaatgaagcgaggctgtggggtttcaggtatggccaacaacaactgcaaagattctaaggtagaaattacctttttttttttttttttttttttttttacaacttttaacggtttatgatgttaaagtaatgacaaagtaaagtatcttttactattaaaattgctgcatttctaaatggcaggagttgtagcagagatgtaaaattggtgaatgtatttgtacttttaaaccataaagtaattatagatttaatgggtcagaacacattaaagtggaaaaatattatgtaacatgattctcttctaaatgagcgatggtattttttgaaagactatagggacattctgtggagacctaggacttagtattggtatgggatcattttatactattcacattgatcatagaatcatggagctttagagttggaagagcctgatacatcatctagttgaactttggcattttactatctctttccctgtgccttgcctggtttggaaattctggccgtttattgtttaagcaaaacaaagctataatattgtaagattgcttaatttattaaatttttttgtggatatttaaacgaaggtgacaatctgttttcttataggtggtaagttttcttcatacagttcttttgtgtgacaaactggatttcagcayggcgttagtggtttgtcctcttaatactgctttgaattggatgaatgaatttgagaagtggcaagagggattaaaagatgatgagaagcttgaggtaacttattttaaatgttttctattattaaaatagtcacatgaaattcatatagtaaactatttttaattttttttaatttttaatgttttttaaccagtgatgcatatttcagtgggaatatttaatattcacatgtttttagtagctacttaaaaaaatctttatttccccacaaaaggtttctgaattagcaactgtgaaacgtcctcaggagagaagctacatgctgcagaggtggcaagaagatggtggtgttatgatcataggctatgagatgtatagaaatcttgctcaaggaaggaatgtgaagagtcggaaacttaaagaaatatttaacaaagctttggttgatccaggtaaggtattaatagacagtgacataaagaagcaagttgaataaaaaatgtgtttatattttaacaaatagtaattgcacagctactaagtatctggtctttgttgtggttatccttcaggtttttgccttttagaaaattcttagtatttcaatagaataaaatcacccttaatgtcgccagctgttcagaatttatttgctgagtctgaaagtgtttagggttttaggggataccttgtaaacacttaaaaatgcatcaaatgcctgtgttgcaatcaaagattcttccagctatccaaatattaggtgataacaagagctctctccatatcctgaaaacagtttgtgtctttccaaacttcatgtcattagaagaattgctgcttgcttatctccttttaaggggccatcagtatgaaaggttaatattttcaatactgttgatccttatgtgatagtaatctgatgtgagagccagatgttgatatatttgccacttggaaaagcaacacgttgtactgtctgcaaaactaaaattattttttaatctacgattattaatttgtgcaactttttcttcatatgtttatcttgtcatatcatatttaagacactattgaggttttatttttgttgagaaagtctgggtaattgtcattgtcaaagtgatagtaatctttagaatccttggctttgcctyttttttaaagataatgaggtagttaatacatagcaaaataactgccatcacaaatctaaggcctaataataagtttatctctttcccacgattaaataggtgtttataaatcttgtggctggtttattgttgaaaaattataagctagtgtctagtatcattgtagcagattttttccacaagatttccttgaaactgtttaatacaacagtttcaggtgcttagtgtacttatttgttcatgaaaaaaatkaagaaaaaaaaraaattaaagcttctaacatgaagggtaacatttgtcattgccatattttatcatttagtgacatttaaaaaaaatttttggccgggcatggtggtgcactcctgtagtcccagctactcaggaggctgaggcagaagaatcgctcaaacctgggagctggaggttccagtgagccaagattgtgccactgcactcccatctgggtgacagagcgagactccatctcaaaaataaaaaacaaaaaaacaaaaaaaaacttttcattttggaataattttctgtttacatgaaagttgaaaaggtagtgcagagagttcccatataccctacatctggttcctcaattgttaacatcttacattgccatggtagatttgtcaaaactaagaaattgacacattattattaataacttcaaactgcatttgtattgcaccagtttttctatccagggttctacattgtatttagctgtcatgtctctaacagtcttctggtctatgacggtttctcaatctttattttttcattatctcatcagtcttaaggaggaccgtccaggtagatatcctgtagagtgttctctgatctgaatttatagtttttcttgtgattagactgagattagactgaggttttgaaagaatataccagaggtgacataccctttttgtcacatcatatctcatatcgggggtacatgataagcacttgctgttactgatgatgttaactttcatcacttggctagggtagagtttgtcaggtttctctcctgtagagctgctacttttacctgtccctcatctgttcattggaatccagtcactcaatctagcccacctgaatgggaggatggtggaaattaagctgtatctcctatagtgggtaatatctacacataaaatttggatttttttaaagaaaaaattatcttttcttacccatttatttagcctttgatttatataattatatactcatctatttttagttcgtgcattggactataaaccattactgcattttttttttttttttgctcaaattgtttcactttgaccattgggagctttttttaaggtgaggtcctctaccctttgatatgtccctatccttttggctttgagcactttattactttctggcattacaggatgctccaggttcatgttatattgtcctggccccagaatcagccatttcttgaagacatcatggttccttttactgaaaattgacatttacaaatgtaaacacacccatataatttgcaaatatatccttccattctgtgagttgtctttttacttttttatatcatcttttcagtactaatctttaaaattttgattacatttaatttacctatttttttcttgtgttgcttttgcatttagtgcatatccaagtattcattgcttaatcgaaggtcatgaattttttcacctgtgttttcttattttatagttctagctcttgtatttatgtttatgatctattttcagtttatttttgtatatggcatgaggtgggagtccaacttcattttttgtattttgatatccagttgttctaacaccatttgttgaaaagactattctttcttcattgaagagtcttgacaccattgttgaaaatcaattgaccatagatgtatgtgtttatttctaggctctcaatattattgtattgatctatatgtctgtccttatgccagtgtgacattgttttaattactgtagctttgtggtaagttttgcaatcaggaagaagtcctacagctttatttttctgtctcaaagttgttttgctatttgaggttccttgaaatttcatttgaatttgatgattggcttttatatttcctcaaagaaactagctgggattctgttagatattgcattgaatctgtagattaatttgaggaatattgccatcttaacaatattaaatcttcccctccatgaacatctaatttctctccgtttatttaggtctttaatttcttttaataatgaaatttgatttaggtcctttaatttctttagtgtaaaagtcttggacttattttcttaaatttattcctaaatattttattctttttgagccttttggaaataaaattgttttaattttattttcagataattctttgttagtgtatagaaatacaacagatttttgtatactgattctgtatcctgcaacttagttgagtccatttataagttctaatagttgtatgtgtgcgctcacgcgtgtgtgtgcgcgcgcacgcacgcgatttagttttctattaagaaaatcatagtctatgagtagaaatagttttactttttcctttccaatatgaatatcttcaacttctttttcttgcctaattgcccttcttagaaatttccatacaatgtcgaacgtaagtggtcagagcagttggttgtcatgtttttgatctcagggaaagctttcagttctccaccattaagtatgacattagctgtggatttctaataggtgtcttttatcaggttgagtaagttctacattgggttatattttttgtttgttttgataattaaaaaaataaatacctagattacccttgttaaaacttaagaggggctggtttctccattaggttttactggatgttcttcaggaaactgaagctctacttttattttcttttccagagtatatataagtattagagatagttcctctgccatagctgggtaaccatctgcaacaagaatattctaatatccatcatgtataacatggaatatattaaaactgttgttaagttttaaggtttagtgatagtatctagatataattttctttgccacctaagtctaaagtgtcaggatctgttcagtacttctaaatttattagaagggatctgttcagtataacacttaattttccagtacatgttttccattttatgcccaatttatcttctctgatttggaacaaattagtgatagtgaagaatcatataaatggcagcagagtatgtgaagactgaagtttgggtgtaatgttaaagaaaagtctaaattgaagttcaagatggaaacaaaatgtcagaaccagacagttttgggtatgagattcttaaggatgagctgaggttgtaaacttataaggtaggctattagatcagaagcctggaaaattgggagtatgtattaggattggaaacagtgtttagagctgaccagagttaagatagtagtgttcawctttcaacttagctgctctggttatctcttcctgcgtaacaattatcccaagccttagtagcttaaagtgacaagaatcagctgggtgcaatggctcatacctgtaataacaatactttgggaggccaaggcaggaggattgcttgaggctgggagtttgaggccagcctgggcaacatagtgagaccccatatctacaaaaaaataaaagaattaaccaggtgtggtggcacacacctgtagtctcagctattcaggaagctgacatgggatgattgcttgagtccaggagttcaaggaagcagtgaactatgatcactgagatcataatcatcacagagtgtgagacccagtttcttaaaaaagaaagtgacaacattttgttaactttcctagttttactgggtcagggatttaatagaggtttacttggacagttctaaacattttatcaacttttctctctaatatctttatggttttttatgyaaaaaaattcaccaataggtggcaatgtaacactgaaaaataatttgcatttgttactattataatagcatgtgacaaaacctttatttgacctttcttccctaacttaccatttgttttgaggcatatttttctacttaatgtacttaaacaatctggtggagttttctaattcacattactgtttttagaagaatgttccacattttgtagcttgagaggacataatttttwtgtgtgtgcatgaatgtgcatawgcacaggattaactcaaggtactgtttgctttaagcaataasatatatctatgtaattttataaaataatgacaggtttccatagtgtattgaaccatcttaagttaacagactcttttagtcaggcttgaatttttgaacagaagaaattttcttcaagtctttctctaaattcctgttcttctgctctccagagcctcatggctgccattccccctgtagtttctgtataattatttataagtgtaggtattttgaaaccctcctatctgatatatatatgtcattgtttgggaattaagttttctagaaagtatataaggtaacaaacatttcattttatgtaagtatgtatgtatgtatttagggggcagggagatggggatctcattctgttacccaggctggagtgcagtagcatgattatagctcactgtagcttcaaatcctgggctcaagtgatcctcccagttcagccttctgaggagctaagactacaggagtgtgccgccatgcccaactacatttttttttttttttttggtagagacagggtcttactgtgttgcccaggctggtctcgaactcctgacaacacctagataattatttggagatgaggatctcactgtgttacccaagctggtctcgaactcctgacacacaactaattttttggagacgagggtctcgttatgttgcttaggttagtcttggcctcctggcctcaagcaatccttctgcctcagcctcctgagtagtagctggcattacaggtgtgagccaccaagtccagctaaaacttactcctttcgaacattaaaaatacttatttttaattttttatgttagtaaatgttatatwcatttctatcttataattcatattctatttaatatgatgaataacatgtttaatatatgaataacaattttaactttttcattgactcagggttattaatgagtgcatttacttttatttttattttatttaatttttttttttgagacggagtctcactctgtcacccaggctggagcgcagtggcgcgatctcggctcactgcgagctccgcctcccgggttcacgccattctcctgcctcagcctcccgagtagctgggactacaggcgcctgccaccacgcctggctaatttttttttcttgtatttttttagtggaaacggggtttcaccgtgttagccaggatggtctctatctcctgacctcgtgatccgcccgtcttggcctgccaaagtgctgggattacaggcgtgagccaccgcgcctggcttacttttattcttaattcttctagttcttcagatatccgtactaaccatagggctaccactctccttccattgccatgccaacaaatagttcttttaagttaaagaaattataaaagtaatacatatccttaagcaaaataaaaacagaagaaaatgttgtatattgaaaagtaaaagttccctacctcctagtctcattattgtttcatttatatccgtataggaattttttgtgcttacagaagcatgtattctccttatttggtattgcaacatttaggtggtcctcaaagccaccctcaggcttggtaactcataagaaggactcacagaactcagaaaatccattagactcatggttatggtttattacagcaaaaatatacaaatgggatcataatatggataactattctgcaacacactcctttttatttagtaatatatttgtcatatctttcaaggtttgcacatagagatatacatcattttttcagattatttatttttctataagttattggggtacaggtggtatttggttacatgagtaagttctttagtggtgatttgtgagatcctggtgcatccatcacccgagcagtatatgctacaccatatatgttgtcttttatcccttgccctcctcctactcttaccccaaagtccccaaagtccgttgtgtcattcttatgcctttgtgtcctcatagcctagcttccacatatcagtgagaacatttgatgtttgcttttctattcctgagttacttcacttagaataatagtcccaagtctcatccaggtaattgcaaatactgttaattcattcctttttatggctgtgtagtattccatcatatatatatatatatatatatatatatatatatatatatatatatatatatatatatatatatatatatatatgccacaatttctttatccactcattcattgatgggcatttgggctggttccacaattttgcaactgtgaattgtgctgctataaatatgcatgtgcaaatatcttttttgaataatgacttcttttcctctgggtagatacacagtagtgggattgctggatcaaattgtggttctacttttagttctttaaggaatctccacactgttttccatagcggctgtactagtttacattcctaccagcagtgtagaagtgttccctgattgctgcattcacaccaacatctactgttttttgattatggccatgcttgcaggagtaaggtggtatcacattgtgtttttgatttgcatttcactgatcattagtgatgttgagcattttttcatatgtttgttggctatttgcatatcttcttttgagaattgtctgttcatgttcttagcccactttgtggtaagattgtttggtttttttcttactgatttgtttgagttcattgtagattctggatattagtcctttgtcagatgtatagatagtgaagattttctcccactccgtgggttgtctgtttactctgctgactgttccttttgccatgcaaaagctctttagtttaattaggtcccggctatttatctttgtttttattgcatttgcttttgggttcttgaccatgaaatccttgactaagccaatgtctagaagggtttttccaatctcatcttctagaatttttatagtttcaggtcttaggtttaagtccttaatccatcatgaggtgatttttgtrtaagatgagagacgaagatgcagtttaattctcctacatgtgggtagccaattatcccagcaccatttgttgaaaagggtgtcttttccccactttatgtttttgtttgctttgtcgaagattagttggctctaagtatttgggtttatttctgagtcctctattctgttccattggtctgtgtgcttatttttataccagtaccaagcttttttggtgactgtggcctttacagaatagtttgaaatcaggtagtgtgatgcctccagatttgttctttttgcttagtcttgctttggctatgcgggctcttttttggttccatatgaattttagaattgttttttctaactctgaagaatgatggtgttattttgatggggattgcattgaatttgtagattgcttttggcagtatggtcattttcaccatattgattctacccattcatgagcatgggatgtgtttccatttgtttgtgtcgcctatgatttctttcagcagtgttttgtagttttccttgtagaggtcttttgactcctttgttaggtatattcctatctttcttgtttatttatttatttatgtatttatttatgcagctattgtaaaaggggttgagttcttgatttgattctccacttggttgctgttggtgtatagaagagctactgatttgtgtacattaatcttgtatccggaaaccttgctgaattcttttatcagttctaggagctttgtggaggagtccttagggttttcaaggtaaacgataatcgtcagcaaacagggacagtttgacttcctctttactgatttggattccctttatttctttttttctttttctttttctttttttgagatggagtctcgctctgtcgcccaggctggagtgcagtggtgcgatcttggctcactgcaagctccgcctcccgggttcacgccattctcctgcctcagcctcccgagtagctgggactacaggcaccggccaccacgcccagctaattttttttgtatttttagtagagacggggtttcactgtgttagccaggatggtctcgatctcctgacctcgtgatctgcccgctcagcctcccaaagtgctgggattacaggcgtgagccaccgcacccggcccagatcccctttatttctttcgtctgattgctctggctaggacttccagtactatgttgaagaggagtggtgagggtgggcatccttgtcttctttccgttctcagagggaatgctttcagcttttctccattcagtattatgttggctatgggtttgtcatagatggcttttattacattaagatatgtcccttgtatgtcgattttgctgagggttttaatcatatagggatgctggattttgtcgaatgctttttctgaatctattgagatgatcatgtgatttttgtttttaattctgtttatgtggtgtatcacatttatttacttgtatgtgttaaaccatccctgcatccctgatatgaaacccacttgatcatggtggattatctttttggcatgttgttggatttggctagctaatatttttgttaaggattttagcatctatgttcattgaggataatggtctgtagttttcttttttggtcgtgatctttcctggttttgctattacggtgatgaatagggatgaattagggagggttacttctttctctgtcttgtgggatagtgtcaaaaggattggtaccaatgctttgaatgtctggtagaattctgctgtgaattggtctggtcctggacttttttttcttggtaatttttaaattgccatttcagtctcgctgcttgttactggtctgttcggggtatcaaattcttcctgatttaagctaggagggttgtatttttccaggagtttatccacctcttgtaggttttctagtttatgtgcgtaaaggtattcataatagccttgaatgatcttttgtgtttcagtggtgtcagttgtactatctcctgtttcgtttctcagtgactttatttggattttctctcttcttttcttggttaatcttgctaatgttctatcaattttattttatcttttcaaggaactagcttattgtttcatttatcttttgtattttttgttttgttttgtttcaatttcatttagtactgctctgatcttggttatttcctttcttctgctgggtttgggtttgttttgtttttgtttctctagttcctagtgaccttagattgtctgtttgtgctctttcggactttttgatgtaggcgttcagggctatgaactttcctcttagcactgcctcagctgtatcccagaggttttgataggctgtgtcattattgtattcaggtgggtgtattcagctcccacgcaaaccgaaaggctggtcttgtctcactcccatggtgtaccgcaccccctacccctccagcgccgaaacagccccgagtgtgtttgagtctggcttgaaaacttgtccccggctttccacctccaagctgcaaaagaaaagggctttagttcatcccccacctgtgaagtctgcaatctggatttgcgccctccccggagttctggccaggaggcttcttgccccattcaaattgttaaaaagttcagctagagaagtccttctccctgtggagttttaccctctgctctgatggccatcctcctgatggatccctgtgttgccaggcaggaatgggctgcttggggatccagcaagctcccagtgcctttctgctacttcctctacccctgtatttcgctcggcttggctttctaacttgactmaactccagctaaagtcaggaatttctccagcaaacagaccttcagcttctccagtgggggtgtgtctacctcattaattttaactctgtgacttattccattatcccatggtttaagccccatttaccagatcccctctgacaaatttttaggttgttttcaattttcctccgtaacaaaccgtgctgcagagaacattcttttatgtatctttgggtgcctgtggaagagtatctttgggaccaattcctagaaattgaaatatgggtcaaagggtttacacattttgcattttgataattattgtaaaattgacttccaaaatttttgatactaatttagactcccacagagtgtatgagagtacccatttcaacgcatcctcatggataccgaatattaagtggtaaaaccatttaaatcactgctgtaaaaggcatttttttctctgtagaaaatgttttcagattcaaagtaagggatgcataatttttaaatacaaagctagagattttagttttacaaaatattagtttttttttkttgttgttgttgttgttkttttttactatttgtgtagccccaactgaatactgaataacagttgttattatttgatctgtcatactgaagctgttacttttgaagtcatgtaaaagttgcattttctctaatgcttaccagatgggagatagtttgacagctgctttgttgaaatcagcaattaagtaatatgtgtgtatatgttaaccagcaagcaaatagagtatgtattatgccctggaaaaaatatatatcagctgggcgtggtggcttatgccggtaatcccagcacttgggaggccaaggcgggcagatcacttgaggtcaggagtttgagaccagcctgaccaacatggtgaaacctcgtctttactaaaaatgcaaaaaaattagccaggcatggtggcgggcacctgtaatcccagctactcgataggctgaggcaggagaattacctgaacccgggaggtggaggttgcagtgacccaagattgtgccactgcattccagcctgggcgacagagggagactccatctcaaataaaaaagaaaagaaaagaaaaaaaatatgtatgttattttaacaaataagcctttagtatttcttctaaaagagtccacagatgctgtggaacatatttgttcaggtacaaatgcattccatagtaataaaatgttgttattttttatattgcaatcccaaatattttctgagtttaagcttttaagatcttttatagcttaaaagctgttctccctaccctccatacccatgtaacaaccagtttcactttcttttatcakttaaaatttttccccagcaatgartgttagttatttggactaagtgggaagtattatatggtctgttgtgacatatattattcttaaagtgtaacttttgaaatttgtcttttcatgtatatatacattgctcttagtctttgctgatagtttaagttgatatactaatgctgaaatagctttaaagacttttcaattttaaaagacatttttaaaaataggctatgtctgttgggggaactttttccctcttgttgtttttatttttgcttatttttgtaaactcagaggaccctgactaccatttatagtggtatttcaatgctctaccatttggatataattaatatagttagtgctgtattaaccaaatacgggagcagataaaatatgtttatacttacaacgatgtcattttatcttcctgtaagatcagcactttaaagggattaactttatttacttaaatggatcacattttcagttttattatatattaattgtgttatttttctgtttatttttgtaggccctgattttgttgtttgtgatgaaggccatattctaaaaaatgaagcatctgctgtttctaaagctatgaattctatacgatcaaggaggaggattattttaacaggaacaccacttcaaaataacctaattgagtgtgagttaatatctctgattatgcagtagaatattggtatttcctcagatatatttttgtaacgttaccatttacctttcttctacttattctagtatagtcctagaccatgatctacataggttcatcttagtctgctgtgaaagaataacatacttttcaaatgagatgctttataaatgagtggtaaaatacagttaagagatacgctattgtgaatgttcatatataaatatggaatgtgaattattgcaagagtatcagaagtcttaatgattgctttagaaagtacataagcatatgtgattactccagataattttaaggggatattccagttttggggcatgtactgtcaagaaatcagaaagaaatgggaactgtgaacattttagtaaagtggagatgggagaaggagaggtttgctgaatccatggcaggacagtttgctgaggctaaaggtagttgatgtgaacctagggaaatgacttgtgaattaccctcrttttcgtatgtctgtggtgacactaaagaagggaacatgagattattcagcaagtaactaattgaaatttcctgttataatctctcactttttttctttttcccactgtaatggctttttgttatttttctctgtgttacattcctttagtgtatttatggtaactttttgctattttattatttgtaatactagtcatttcactttagcctatactttatgtttgtttttatctgttccagttttcctcttttctattctgttaccctatttatagaaatgctgtttcatattgtggtcctatatagtatgggacaagtgatggctctgttaatttttacaaaatgggttagtcttacaaaatacattagtaattaattttttttttttactatttgtgtagccccaactgaatactgaataacagttgttattatttgatctctcaaatattatttggttattctggaaatgaatcagttaatataaattaacttgcttagtagcttattacctcctatttattgttttgacttagtatctcctttcttcacaagatagcctcactgaccataaaatcatggttagattaatggaccacttgttttatacttcatatctcttataaagaataatagtgagtttgaataaactgtccttaggtatttttaaaaaacgttcatgtctagtatttagggatggtttttacttcaattttctctctcgttttggtaattcacttgtagatcagacttataaccatgtttattctatacttagcttgatattctttctttatagcttaattctaatgcatgtgtttttgacatgagcatttcattggggaatttttctaagtctttttaacgattgttaatgttgttaatgaataatgtcttctctcttagatcattgtatggttaattttatcaaggaaaatttacttggatccattaaggagttcaggaatagatttataaatccaattcaaaatggtcagtgtgcagattctaccatggtagatgtcagagtgatgaaaaaacgtgctcacattctctatgagatgttagctggatgtgttcaggtacaaatatgttccatagtaataaaatattcttacttttttatataacaatcccaacatattttctgagcttaaagtttaataattttgtgttttctttcccgctctttcagtagatagttttacagttatatctccttgcgttgtcttaaaaaatttctgctgcattcaacttttaaaaaagaagttccgctgagtttaaaacatagttgattcatttgccaggtgtaaagcctcatatcttattatgttaatgtttagatttttcatccttaagatagggagttccttaagaggaacatagctactatgatgaagttcctatgctcaccctaattctgtagtacagtattataaatctcacttttttgaaatggttataggagaggccagtatgaattaagagaggagccacttttaaagtaatcctggagaaacagttttgttactttcaagtatatataataacctgaacagactagtggtgtcgtttacatacagattttcagtgaatctatattaatgaatggataagtgtctagagactgagctggcagttaatagatctcaagatacgcactttctctgtagatgttaggtactgatgatagcctcaaagatgttttaacaaatgagacaggctattcttttggttggatatacagtttgccctccatatctgcaggttctgcatccatggattcaacctaccatggatcaaaaatatttttttaaaaaatagataaaatggacagaggctaggtacagtggtgcacacctgtaattccagcactttaagaggccaaggtgggaggatcacttgagcccaggagttcaaggctgcagtgagctaaaatcatgccactacactccaggctgggtgacagagcaagaccctgtctctaaaaaaagttttaaaaaattagccagccacggtggtgcgcacctatagtctctgtcacttgggaggctgaggcaggaggattgcttgagcccaggaattcaagactgcaaggagctaagattatgccactgtacttcagcctcaatgatagagtaagaccctgtctcttaaaaaaaagaaagaaaataattaagaaaaaaatggatgattgtgtctgtactgaacatgtacagacttttttcttgtcattatttcctaaacaatagagtatagcaactatttacatagtatttgtattgtgtgaggcattataagtaatctggggatgatttaaagtatatgggaggatgtttatatgttatatgcaaacactacattatttatataagtgacttgaactttcatggattttgctatctgtggaggtggggtgggttctggaaccagtctcccatagatactgaggcatgactgtacttgccatcattataaggagtagttgttccgtttggtcaggttggctacatgtgctagcaagtaccctgtttctgtattgctgctactacccaggcagcatttttctttctggtttaaggagtaatttctatttagcacattggtgttctgtttttctactcttacaataaaatggtttcaagagtgcttgtagaggggttgctttcttaattgggcaaatattccctctaaaattatatgttattgtttgacatattagcatatctttctaagaagccaactcagactgcattagactttgattcctaggttttattacatgattaaagcaaggcattttgctcacactacctactacatcccctccataccttttgttatttttttttctgtacagagaagactattttgaaaacttaaattgctcacttggtaatgtgattgcttcaatttaaaacctacctggtgtgttgcagtgtctttttaccagtgtaccatattgtatagtcatatgaaatacattgtgtagataattgtgggtttagaaagggtaaatatatttaagaaaatgttttcttatatgtttagtgcctatttatttatgtgtatatttcagttataagcaatgagaacttgtagttcattcctgttaaatatttagattaattttcattctctttcttgttaattacagaggaaagattatacagcattaacaaaattcttgcctccaaaacacgaatatgtgttagctgtgagaatgacttctattcagtgcaagctctatcagtactacttagatcacttaacaggtaaacaatacaccttgttgatttcatcttctctataaagacattctttttccaaagaagattatttcagtcatcttactatgtctgttgttctttttcagttttgcatttgaataaaatgggtatgcttaaaagcataaaatatttctaattaaaacactgatgctgtcaaaattaaaatcaagaagcaaattgatgaaaaagatatacagcacatatgaataatgcccttaatttgtaaagagcttttatttcagaaaaattatgaatgtgaataaatccataaaagaagatatacaaaattccagagtatttttttaaaaagtatttacccacattaataataaaaggtgtataagttaaattcatgagtttgtttctcagttatttaattaacaaaggttgaaggcaaaagtaaaatagaaggcaaggcatgtagtatgcctaaaatacaccaaaatgctaacagaagttgttttctgggtgcttttgttatgaagaccttctagtttatttcttgtatttttctatgctttaaaataatacaatgaatagtttttgttttaccatcaataagctttttgtgtgtgtgtgtgtgtctgtgtctctctgtgcctgaagatgtctgtcttcacacaacaaaacctaatctttggactggagtgagatttcttacttgttgatcacttattctggtacctttccccaaatgatattactgatttaattaggagatacaggttagagggtgctctttggccaattgtgaatacagtaattgatcaaaaaaaaaaggaggatggaagtacgtacacacatattaacatgataattatagctaaagtggtactcttttttaatagcagtgcatcctagagagtaaaatatgatggttctcaagaaacattctgctggggaaaacagtgtttgaatcttagtattttatggaactgcttttttgcttttataaaagcaatttttgtattgacttttggaagaaaatcagttccaataaagcacacattttcatttgtatatctgtcagaagctgatagatttactatactattctgttttgaataataaaaattgcaggcataattaaataaccaaatagttatcccaatgagagagttgctgtatagtttaagagacagatgttcagatctgtctttaattaatctctgagtaataaggagtaataaatttggtcatttaatattttttccttttaaaatgttttatattagggaaaatgctcacaatagtgttttcaggttttatagaattagttgtctttaataaccaatcataggctgagcatggtggttcatgcctgtaatcacagcactttgggaggctgaagtgggaggattacttgagctcaggagttggggactagcctgggcagcatagtgaaaccttatctccacgaaaaatcaaaaaattagccgggtatggtaatgcacacctgtagtcccagctacttgggaggctgaggcgggaggtttgcttgatcctgagaggtcaaggctgcagtgagacatgattgtgccactggatttcagcctaggcaacagagcactaccttgtctcaacaacaacaacaaccaccaccaccaatcacaaatggtaacagctcaggtataaatgttaagctctactcttttgagttgacctcatggaggtagatagaatgatagatacccgaatctgggaagtatgtgtgtgttgagggagggatagagagaggttggttaatgggtacagacacatagttagatagaaggaataagttctactgtttgatagcagaatggggtgactgtagttaacaacagtgcattttatatttcaaaatagctggaagagaggactcgaaatgtttccaacatataaaaatgataaatactcaaggtgatggataccctgaataccctgacttgatcattgcatattctatgcatgtaacaaaatatcacatgcactcccaaaatatgtaaaaataatatgtatcaatttttaaaaattttaaaaaaacactctttttgagagcaatgcaattatttaagaatttagggggctttgctttattctttgtgactatcattgataggagtaaatatctaaagcactaattgccatagctaaaatctaaaagatatgattgttaaattatcacctggtaccgtgaatctttaagttttagggtgtggggttttccccttaccaaatgcaatattacccatagagtagaataacctgagttaaatagcctctttgaaaaacattcataaaaggccaagtgggttatatgaatggctactctgtcttgattctcagtacaaatcttcacagtatttctcttgaaatatcacctgcctattttacttgcatttaaaatgtttggtattttgtctgttaaatattccagaaattttttgtttctacattaggcttttttagactgtggttacttttaagaagttcacccaaattttgtttttaacattagcagcagtttcatattaattttagtgataatttataatatttgcagaatgaaagtcctaagggactggcttttaaagaatattgaggaaatctaaaatcctcttaatttttcttagttttctttttttcagtgtaattctatggtttgccttttattgtcaggtatcagaagtttataataacatgtaagcctctgcaattcagtaaacacttaaggttttataagcatgtagatacttaattttttaataactaaatattagtctggctttaaacttaaaatccacacactgtcttattttgacaactgtgcaaaaaatagaacacaggaaaagatagcccatggaatgtgagaaaatattgcaaaacatatatctgataagggattcacatgcagaatatagttgtcccttggtatatgtgggggattggttctaggacctgcctgtgtataccaaaatttgctcatacacaaatcccgcagaacctgcatatatgaaaagtcaaacataggtttcacattctgtgaatactgtattttcaatcaacatttggttgaaacaaagtctgtataagtggacccgtgtggtttatacctttggtgcgcaagggtcaactgtatgtaaagaactcctacaactcaacaacaaagaaacagtctgtttcaaaaagaagcaaaggatttgaatagacatttctctaaagaagatatacaaatggccaataagcacataaaaaaatgctcaacatatctactcattagaggaatgcaaatcaaacgtacagtgagataccatttcacacccattgtggtggccattataaaaaaaaaaaaggaaaataagtgcttatgaggatgtggagaaagtggaaccctgtacattgctagtaggaatgtcagatgatgtggctactatggaaaaacattgtagtaactcagaaagttagacatagaattaccatttgatctaatagttccacttataggtatacccagaagaattgaaagcaggaactcaagcagatactgggacacttatgtttatagttgcatcattcataatggcaaaaaaaggtggaagcaacccaaatgtccattgatggatgaatgcataaacaaaatgtggtatggacatacttcagtggaatattagccttataaaggggggaaattccgacatttactaccacatagatgaagcttgaagacattaatgctaagtgaaatatatcagacacaaaaaggcaaatactgtatacttctgcttaaaggtacctagagtagccaaactctacgagtagaaagtagaatggtgattaccaggttctgggggacgaagggaatgggaagttactgttaatgggtactaagttctgtttggaatgatgaaaaagttctagaaatagagagtgatgatgtttgtacaacattgtgattatacttaatgccactcaattgtgtacttaaaaggtagttaaaacagtaaattttttattttattttatttttattttactttaagttctgggatacatgtgcagaacgtgcaggtttgttacgtaagtatacatgtgccatggtggtgtgctgtacctatcaagccatcatctagttttcaagccccacatggattaggtatttgtcctaatgctcttcctccccttgcccctcaccccccaacaggccccagtatgtgatgtgcccctccctgtgtccatgtgttctcatttaaaacagtaaatttttaaaatgtatattttaccagaatttaaaaagtacccccaaatggagcacagtaatatgcttttgtctctaaaaatgcatggacccaagtgccactctttagagattgattcaaaaggtctggagtagggccgatgcatctatagttttatgagccctacaggtgattttgatggaccatcagcttaagaaccattgctccaaatttttttctttggtaaggggtgagctgagacctgagatgagtgaactagacaaggggaacatggagaaatgacactgaaatgttaactttgatgggtttctctaagtggtggaaatattaattcttttgtattttacttgttatatacatttctgcaaaattacaaaatccaagaaatatacatatatgtaaaacttccataatcagaaaaatactttaaagtttcattttgtttttaattgacacatggtaattgtacatattaatgggcacagagtgatattttgatacatgtatacattgtgtagtgataaaattagggtaatttagcataactatcacttcaaacacttgtcatttctttgtggtgagaacattcaaaattctcttctagctgttttttaaaattatatttcttttaattaaaaatatttatttaaacattttttatatagagagatggggtcttgctatgttgcccaggctcgtcttgaacttctgggctcaagtgataccccatcacagcctcccaaagtgctgggattacaggtgtgagccaccatgcttgcatgaaatagcctcatctggctatttcaataagttattaagttaaatttagtgtttaaaaatattatgactaacattggaatagtgtacttcaagctgggaaaagaatgtataatagtaatttccaaatgtggttgtactgtcagaatcaccattaaatgcagaacactactaaatttacaaagataaaatgatactaagtgtttctgaggctatagagaaatgagccctcttgatggtaacataaattggacagtaatttggaaagggacgtcaaaattaatttcaattgtatgcttttttccaaaggaaatggtcagaaatgtatgcagagatttatattaaaagatgttaatctcagggtttgtttcaaaacttagttttctggctacagaaatagcaatgtgtgttcattgtgaaatatatatgaaatattgaaaggcactaatacaataaaaactacctataatcttataaactagaagttggaactgctagttatttaatatttaatatcttgctttccagtttttaaaatgtatgtgtgacacttaaatgtcataaacacacactacataaacacacaatacatatacattgtgtttatatactatatatatatatttatttatttattatttttttaatggctggaattatattatccagcttgtgacctaaagtgaactgttacttgttgtggcattatttataataatgaaaaattgaaaattaacccaaatcctcaacttttggggatagtttatattatgrtatatcaccataatctaataccatgcaggaagatacattaaatattataacatagaatattgtgtgttaatatttaggaatatatagaatatattatgtaataaagatgaaatagtacccatttctgtgaaataaaaaggatatgtatgaaaatgcatagcaatgtgatcaaaaagataatgccacaaaatattttttagtgtacactctaatattttcaaattagtagaattgtgtttataatgtgtattaaattacctcttcaaattggctctatccccttctctctgttttgatatgacatttatcagctcttctgactccatcaaccacgtctcaagatctcttccacattcctgatcattttaactctgctgcattaagttagtatattctgacatatcttccagctaagtagtttttgtctttggatgtgtgtcttatgctattaagaggaatttaattgaaatgtaaaactcaatggctttctcctgaggtcaggaacaaaacaaggatgtcacttttgcttcttatatttaacattttctagaggttctggccaggacaattataccagaaaactaaaagtatgccacagtgtcatggaaggggtaaaactatttcagtttgcaggtgacatgatattgtatagagaaaaaatttattgttttaagttttgtgggtacatagtaggtatatatatttatggggtacatgagatattttaatgcagccatgcaatgcataatcacatcagggtaaatgaggtatccatctcaagcattcatccttaaatgacaaacaagtcatttatattattttatttattttaaagtgtacagcaaattattgttgcctgtagtcaccctgttctataaaatattagctcttattcattctacctaactatatttttgtacctaatgtccatctctcctttccccctgccctactacccttcgcagcctctattaactgctgttctacattctatctctgtgagttcagttgttttaaattttagctcctggacgggtatggtggctcatgcctgtaatcccagcactttgggaggccagggcaggtggatggcttaagggcaggagttcaagaccagcctagccaacatggtgaaaccctgtctataaaaaaaaatacaaaagtcgaggtggcatgtgcctgtaatcctggctactcaggaggctgaagcaggagaatcgcttgaatctgggaggcagaggctgcagcaagctttggtcatgccactgcattccagcctttgtgacagagctgcctcaaaacaaaaaacaaaaaacttagctccccaaaataagtgagaatatgtaaaatttgtctttcgtgctgtttcatgttgtttgaaatgacaggatctcattctcttttatggctgcatagtactccattgtgtacatgtaccatattttctttattcattcatctgttgataaactttgggttgcttccaaatcttggctgttataaacagtgctgcaacaaacataggagtgccaatctcttcaatatactgattttctttcttctgagtatatatccagctgtgggattgcaggatcatatggtagctctatttttgcttttttgaggaacctccaaacttttctccatagtggttgtactaatttacattcccaacagcagtgtatgtgggttcccttttctccacctcctcgccagcgtttgtctgtcttttggataaaagccactttaaagggtgagatgatatcttattgtagttttgattagcatttctcagatgaccaatgatgttgagtaccttttcttatacctattttccatttgcatgtcttcttttgagaaatgtctactcagatcttttgccaattttttaattaggttgttagaatttttttccatttgacttgtttcagctccttatatattgtggtcattaatcccttgtcagatgcgtagtttgcaggtattttctcccatcctgtgggttgtctcttcactttgttggattgtattctttcctatgcagaagctttttaacttgatatgatcccatctgtccatttttttgtgttggttgcttctgcttttgaggtattactcaaatctttgcccagtccaatgtcctgtagagtttctccagtggtttctcttagtaattccatagtttaaggtattagatttaagtttttaatccatttgaatatgatttttatatatggcaatagataggtgtccagattcattcttctgcgtatggatatccagttttcccagcaccacttactgaagagactatcctttccccagtgcatgttcatggcacctgtgtagagtatgcgttcactgtaggtgtgtgaacttgtttctgggttaattattctgtttcattggcctatgtgtcttttttttttttttttttgagacggggtctcgctctgttgtccaggctggagtgcagtggtgcaatctcggctcactgcaagctctgcctcctgggttcacgccattcttctgcctcagcctcccaagtagctgggactacaggcacccaccactgtgctggactaatttttcgtatttttagtagaggcggggtttcactgtggtctcgatctcctgacctcatgatccgcctgcctcggcctcccaaagtgctgggattacaggtgtgagccactgtgcccggccggcctatgtgtcttttttatgctagtacgatgctgttttgattacagtagttctatagtatactttgaagttatgtaatgtgattcctccagttttgttcatttagctcaggatagctttcactattctgggtctttcgtggttccttataaatttcaggatagttttttcaatttctgtgaagaatatcattggtatttatttcatagggattgctttcaatatgaagattgctttaggtggtgtggacattttaacaatattgattcttttgatccatgaacatggaatgtctttacattttttggtgtcctcttccatttcttgcatcaatgttttatatttttcattgtagagttcttttacttcttttttttttttttttttttttgagacagagtctctgtcacccaggctggggtgcagtggtgcgatcttggctctctgcaacctccacctcctggtttcagtgattctcatgcctcagcctcccaaatagctgggattacacgtgtgcaccaccatgctccgctaatttttgtatttttagtagaggcagggttttgtcatgttggccagcctgctcttgaattcctggcctcaagtgatccacccgcattgatctcccaaagtgctgggattacaggcatgagccaccgtgccctgcctcgcttcttaaattcctgaatattttgttttatttgtagctattgtaaataagattactttcttgatttcttcaaattgttcactgttggcatatagaaatgccaatgatttttgtatattgattttgttacttgccactttactgaaattgctgatcagttcgaatagttttttggtggagtctttagttttttttctttcccaaatataaggtcatgtcatctgcaaacaaagataatttgacttcttcctttcccatttgtatgcgctttatttctttatcttctttgattactcttactaggacttccagtatgatgttgaataacagtaatgaaagtgggcatccttgttgtgttcaagatcttagagcaaagactttcagttttttcccattcagtatgatactagctgtcggtatgtcgtatatagctttaatatgttgaagtatgttcctctgatacccagttttttagggctttttattatgaagggatgttgaatattatcacatgtgcttccagcatgaattgaaatgattatatggtttttatcctttattttgttcataacgatgtatcacattgattgatttccatatatgtgtgtgtgtatatttatatgtgtgtatgtatgtatttttgtgtgtgtgtgggttttttttttttttttttgtagagatgaggtctctatgttgcccaggcttgtcttgaactcctgggctcaagggatcctccttcttcggcctcccgaagtgctgggattacaggtgtgagccatcacactcagctgatttccataaactgagccatcgttgcatccctaggataaatcccacttggtcatgatgaatgacctttttaatgtgttgttcaatttgttttgctagtattttgttgaggttttttgtatgaatgatcatcaggaatattggcctgtagttttctttttttgatgtgtccttgtctggttttggtatcattgtaatactggtctcagaaagaatttggaagtattccttctctattttgcagaatagtttgaggaggattggaattagtacttcttggaatgtttggtaaaattcagcagtgaaggtattaggtacctggcttttcattttttaatttttctttgggggatggggttggggctttacatgccataatatgtttattttattttattttacattttcattttaggttcaggggtacatgtgcacataaattggggtaaatttacccatacatgtacccatgaacctaaaatgaaaattctttaggtaaattggggtctctaggttttctttgctttggagactttttattattactttgatctcattacttgttattggtctgttcaggttttggatttcttcctggttcaatcttagtagattgcatgtgtctaggaatttatccatttcttctaggttttccaatttattggcatatagttggtcatagtagcctctaatggtcatttaaatttctgtggtatcagttttaatgtctccttttccatttctgatttcatttatttgggtattctctcttttttttcataagtagtctgactaaaagtttgttgagtttatcttttcaaaaaaccaagtgtttgtttcattgatcttttctacttttctacttttaaactttttgatgtgttgttgaattaggttagtattttattgagggttttaatatctatgttsatcagtgatattggcctatggttttcttttctttcagcatctttgtctgcctttggtatcagggtgatgcttacctcacaaaaagagtttggaagtatttcctgtaattctgttttttggaagagtttaagaattggtattcrtggttttttgaatgtttggtagaattcagttttgaagctatctggttctgggtgatttttgttgggaggtttttttttattactacttatttctttttcttaattctatttttaatttaattattttgttttgttttatttgagacagagtattgctccatcacccaggctggagtgcagtggtgcgatctcagctcactgcaacctctgcctcccaggttcaagcagttctcctgcctcagcctcccaagtagctgggattacaggcgcccaccaccatgcttggctaattttttgtatttttagtagagacagggtttcgccatgttggccaggctgttctcgaactcctgacctcaggtgatccacctgccttggcctcccaaagttctgggattacagacgtgagccatcttaattttattcgtataaatttatggggtacatgtgtaattttgttacatggatatattatagtggtgaagtcagggcttttagtgtatacacagaataatgtacattctacccattaagtagtttctcattcactcttctcgtttcccccgacccttccaagtctccattgtctgtcattccacactctacatccatgtgttcacattatttagccccacttataagggagaacatgacactatttatctttctgtgtctcaattgtttcacttaagataatggcctccagttccatccatgttactgcagaagacatgcttttgttcttttttgtggccaaatagtattccactgtgtatatataccacgtgttctttgttcatcttttgatagacacttaggttgatttcatagctttgctattgtgaatagtgctacaataaacatgtaagtgcaagtatctttttttttatgtttttgatataatgatttctttctcttttggtagatacctagtagtgggattgctggatcaaatgttagttctatttttagttctttgagtaatctctgtactgtttttcatggagtttgtgctaatttacattcccaccaatagtgtaaacatattctctttcctccgcatctttgccaacatttattttttgactttttaataatagccattctaactggggaagatatgtcattgtggttttgatttgcatttttctgacgtttagtgatgttgagaattttttcatatgcttgttggccatttgttatatcttcttttgaaaaatgtctatttatgtcttttgcccactttttaatggaattatttgttttgttttgtgttgttgtttgagttccttgtaaattctagatatcagtcccctgttggatgtctagtttggaaatattttctcccattctgcagattgtttgttcactcagttaattatttcttttgctgctttttatttaagtcccatttgtctgtttttgttttagttgctttgcttttgaggtcatagtgatgaattatttgcctaggccaatgtccagaatgattttctccaggtttactttctctaggttacttctctaggtttacttctagtatttttattgtttcagctcttacatttaagtctttaatctatcttgagttgatttttgcatatggttagagataatggtccagtttcattcttctgcatatgggaatccagttttcttagaaccatttattgaaaagagtgtcctttccccagtatatgtttttattgactttgtcaaaggtcagttgactgtcagtatgtgtctctatttctgtgttctgtattctgttccattgatctttgtgtctatttttataccagtaccatgctgttttggttactgtagccttgtagggtaatatgaagtcaagtaatgtgataccttcagctttgttcaagaattaatattattggccaggcacggtagctcacatctgtaatcctagtactttgggaggccgaggcaggcggatcacttgaggccaggagttcaagaccaacctggccaacatggcaaaaccctgtccctactaaaaatacaaaaaaaaaaaaaaaattagccgagcatggtggcaggcacctgtagtctcagctactcgggaggctgaggcaggagaatggcttgaacccgggaggcggagattgcagtgagccgagattgcgccactgtactccagcctaggcaacaagagcgaaactccatctaggaaaaaaaaaaagaattatattattaaaatgaccatactacccaaagcaatctacagattcaaacctaactctatcaaaataccaatgtcattttttatagaattagaaaaaacaatcctaaaagtcatatggaaccaaataagagcccaagtagccttggtctctttatttgtaattggtctgttgaggctatttcttttttattcagtgttgatatattgtatgtttgtaggaatttatttcctgtagattattcaatttcttggtatataatttttcatactagttctttatgatccttctttatttctgaggcattggttgtaatgtcttcatgtctattttatttatttgagtcctctctcttttttcttaataggctaagggtttgttggcttggcttatttttttcaaaaaaacaacttttccccctatatcttatctattatttgatttactaatgctttgatccttatttccttccttctgcaagctttgggtttagcttattctttttctagctcctagaggtataaagataggttccttatttgagatctttttttgacataggcatttatcattaaaacattcctcttcttactaaagtattttctttaaccacattcaaatgaaattagaaaccaataactgaaggaaagtttaaaaatttacaaatacatgtaaattaaacaacatatatctaaataaccaatggaccaaagaagaaatcacaagggaaattaaaaaatgcttagaggttaatgaaaacaaaaacacagggtactagaatatgggatataacttaagtaatacttagagagaaatgtatggtggtaaatacctgtattaaaaaagaagaaagatctcaaatttataattcaaccttctactttgcaaattaaacccaaaacaagcagaaggaaggaaataataaagaaatgtgaggaacagaaaaacagtagggaaaatcattgaaaccaaaggtaggttctttgaaaagattaacataatcgacaaaccttccttcacttacaaagtaatgaaaaaaaaaggcacagctaaaataagtgccgactacagtgggtcatgcctattaatcccagcctttcgggaggccaaggcagaacaatcctttaaagctaggagtttaagaacagcctggtcaacaaagcgagaccctgtctctacaaaaaataaaaaaaagaattagccaaacctggtggcatgtgcctgtagtaccagcttttgggaggctgaggcaggcagatggcttgagcccgcaggagttcgaggttgcagtaagctatgattgcatcactgcactccagcctgggtgacagtgtaagaccctgtatcaaaaaaacaaaaacaagaacagaaagaaaaatgacctaaagtaaggaatgaaagagtatcactactaaccttacagaaataaaaagaattataagtgaatattgtgaacagctgtatgccgagaaattatatacctcattttcatagcagtgatttctgttacacaatggaaataacctctatcaggcaaaataatactcagcagatttttatgcattattaatgtttcatatcactactaaattttctctcactcgtggaggcaaaatttgctaattatttaaacaacttacatagtttaaaaccgtggataggaaaatatgttattgcttaaatgctgttttttccttttaatcagttttgttcttttgcatattaccttcttgataattttattatattaatgaaacgtgcattcattttctttatgttttataggaaaatgataattctgttgaaattattctggatagagcagagctaatatttacattttatacatcaaaaacataatttttggaaggtcttttttttttttttttaagagacaaggttttgctctttcatccaggcgggagtgctgtggtgcaatcatagttcattgtaacctcaaactcctgggctcaagtgattctcccacttcagcctcccaagtatctagggtatctagggctataggtgtgtgccatcatacctggctaatgtttttgtttttcttggtggagacagagtctcgctgtgttgtccaggcctgtcttgaactcctggcctcaagcggtcctcctgcctcggcctcccaaagtgctgtgattacaggtgtgagctactgtcacttgcctagaagtaatttttttgagtgagcatagttggcgagagtcagtaaaggactatctgcatggagcaaagtttatttataacaggagtttgtaatctagggtccatggatagaatttaggggattatatgtacctggataagaaaaaaattatatattgatttcccttaacctctagctaaagcagcagcatttttcccagtgatgaatagaggcaacaatctatagtagtgttagtgataaccatgactttgttaccaatagaaatcagaaatatttttacatgttgttcctgatacctcaaaatcatttatgtttatcaatacttcagaattttaggtatttattaaacctgtgcatattttgttacttaatgcattaattttaaaaagcacatatttctgtagtacaaattctttaatattttgataatttctatatgatgggtttcttttgtaatcctatttgttttatgtgtttcaaaacgatattccaagagaatttataagcttctctacactgccaaaagtgtttatgtcacaagtaagattaaaactcctaatctagaaacttggttgatayagacaatttttgtgtctttaaccatatttcttttgatcaggtgtgggcaataatagtgaaggtggaagaggaaaggcaggtgcaaagcttttccaagattttcagatgttaagtagaatatggactcatccttggtgtttgcagctagactacattagcaaagaaaataaggtaagtcaggtaacttagtttaaaagcatctattggaagcagaataaacttagacaaaaaattgacctacagactgtatattcaaattttctattgctttgttctattctatgtcttatttctaatttctatatgtcttgcatgtattatgattataggagtgttaaatgttattttattgagcccattttaaaaaactttttattttgaaataattttatacttatagaaaagttgcaaaaatagttctgagaattcccctatacctttgacccagtttcttctaatatcagcatgttgcattagtatagtaaagttatcaaaactaagaaattaactttggtacaatactattaactaaatggcagactttatttggatttcttcaatgtttttacttatgtcttttttgttttccatgatccaatctaggacctcccattgcatttagtaagcatatctgtcctgtcttctttgtctactaaaatctgtaatagttcctcagtccttcctcagctcgtgccaattaacttattcttaaatgaacatcaatataatttccagtgtaagttgagatattctattaaaatagtggtcatttttttttctctagggttattttgatgaagacagtatggatgaatttatagcctcagattctgatgaaacctccatgagtttaagctccgatgattatacaaagtaaatcgaatactttttcgtgccatcctgtattgacaaagttaaaacccctacttgctgattgacctcttataattgacgtttacatctttcctatgcttttctaacaatctgaatgtgtttttttktttgtttgtttgtttgtttttagaaagaagaaaaaagggaaaaaggggaaaaaagatagtagctcaagtggaagtggcagtgacaatgatgttgaagtgattaaggtctggaattcaagatctcggggaggtggtgaaggaaatgtggatgaaacaggaaacaatccttctgtttctttaaaactggaagaaagtgagtctaatgaatgttgcctttatcatggaacagtaatttggaaaatgtcatgtcgttagtccttttttcagtcacttacctgactaattgactcaaaggaatctttcctcaattgatgagtctaatcaagtactcataattacagtaaatatctgatgaatctttaattataagcaagctactctgtgctctctggtatttgggggaaaggtaaaaagaaaaactaatgtttatttacttgtatatacctaaactctattattttcactacatgtgttagctaactgaattcttgagcaggcttgcaatgtagttgatagttttaaaaatgagtaggagaactggtattcagacctaaaaatgtctaatctcaaagccaccatgatattttcacttaactgtatgggaataaatggaaacatttcagataatcaagtgtgattgtagttaatttttagtcagtaatatacagtaaaactaattttaatcatttagtgtttttcctttgtgattcttcataatctgcaattatctactttaggtttcctgtgtattatgtacagtttctatcacctcttttgttttctttctgtctctcttgtgcatgaaagtgaagtcttagattgaactctgcagtggtttaagttgtctttacctatatgtaagttgaaggattagtgttgagacactgtatcctactagtgcagcctgtatgcctaggagcttaaaaactgggaccaaatgtmtgcctatttgaaatagcagattatgaagagagaacaaggtagtggctctaaatatttggcatttgggagttgtggagcaaagcagttaactgtctataaggagaagagagttgtgggggccacctaggttagtgatcctgtgatcagataaacttggctggtctcaggcctacagctgaaataacttggtgattaattattttaattttatttttataatttcaacttttatattcgggggtacatatgctagttgattaacatgggtatattgcatgatgctcagctttggggtatgattgatcccatccccaggtactgaacatagtactcagtagttagtttttcagtctttgccccctttctctctccccactctagtagtcctccgtgtctgtcgctctcctctttatatccrtgtgtacccagtgtttagctcttacttatatgtaagaacacgccgtatttggttttctgtttctgtgttaattcacttagtatataatggcctccagctgtatccctgttgctgcaaaggacatgattttgttctttattgtggctgtgtatattctatggtttatatgtaccacattttctctatccaatccactgttgatgggcacctgggttgattccatgtttttgctgttgtgaatagtgctgtaataaatatatgagtgcatgtgtctttctggcagatttattttccttttgttttatacttgtaatgagattgctgggtcaaattgcagttctgctttaagttctttgagaaatctctaaactgccttccataggcggtgaactaatttacaatcccaccaacataaatgttcccttttctttgccccttctccagcatctgctgttttttgactttttaataatagccattctgactggtgtgagattgtgtctcattgtggtttggatttgcatttctcctgtggttaatgatgatgagcatttttcatgtttgttggctgcttgtatgttctcttttgagaagtatctgttcttgtcttttgcccactttttaatggagttacttgtttttttgctgttgaattaagttccttatagattctggatattcattgttggatacatagtttgtgagtattttctctcattctgtaagttgtctgtttactctgttgatagttttttttttgttattttgtgtttttgtttttttgtttgtttgtttgttttttgtttttgctgtgcagaagctctttagtttaattaggtcccagttgtcaatttttgtttctgttgcaattgtttttgaggaattagtcataaattctttctgactcggtgatttctttataaacatttctctcttcagtacctccatggaatagacagatggcagtctaacagtagactctgacttctcttaagaaatcaggggaatagtaaaaattaaactacaaaatttctcttctcattcttctcttctgttaccccataaaacagtttactatcaatgttcatcttctggatagatataaagaatatttttatcagaataataaattattatagtgtaatttaaggcaatgagaagttcctgtatctccttccctgctgctgctgccccaatctgccttttccacataaattcctcagtctctcatctcataattaaaaatatataaagtttacatgttcctggaaattattttcttaaaatactcttgttgaattttttctcataacttatggctaacaggagcagaagagtagaccagtcagtgtgcatcatcctgtgctataaatgggttacgtaagagtatactgagattttttttttaaagtgtactgagatattgatcctttgtcacttgggaatacaattagaatctgaggcagctggtttgcctccgtaaatgagtagtctcttctctttttcctggtatgctatataagcattaacgttttttacatatgccataatgtgaatgggttggaaagcactgggggcagaatgtaggaggctacatgttgtgagcccaaaaacacacagggaaggccatcagttccaaaagacaaattttgaccacttgtctaggatttttgtttcattttagttgtgtgcagtcaaatataagtcatttgtatatggatatattttatatatttttgtagcttatatacgtgtatagtatattagaagcattctccagaactaatagataataaaatttatttttttctttgcatctaaattaactccatataaaatggagtatatcataatgtatggacatacgtagctggtattgtataactttaaaaaaaatgactttcttacagtaaatataagaaaatctgaataggaagtattaaggggctastctgcctccttagcgcagtaggcagcacatcggtctcataatctgaaggaagtattaaagggttaacaatgttgtacctggaatttgaaatggatattaaataattaattacctataattgagctacaatatgatttttgccacatattttattttcacgtcaaagagttactgtttgctttaatccttttgtagtagctgtctcgtttttctgagaagcagcatcttgaatgagtcatttaagtttagcttacatcatccccatttctgtgttttaaatgttttttattagaaggagagttcatgatcacgaaatgactatgtaaattacttcaaagtgttagatttattattacttaagtatttttagagtaagcttcattggtaagcatttgcattttaaaacgtatgtaattgtatggatataaagttttgtgacagaatccttgtatatgatgtagagccgtaatattagtactaatataccatatttattcactcaacagatatttataaagtgcttactatatgcccagacataaggagggaactgataagcctaaatggtaaattgaagaaggtatgctatggaaatcctagggagatgctagtcttgagactagcagctttgattttcatttatccagggacaggatttgagacttcgagccctctataagttggagagttctgtgaccccttctcaaagctgaatccctttaaagtttacaatcccatcgacaatccagggagttgacaaggaagcttatctatttcagccagggctcttggttgggaaaaatagttacattgaatttacggtcatggccttcacctcacatactttatggtttgaatttatattactcatatagtctaaaagatccgaaactgaaatattaacttcacaagtaattctgagttggtgattccctggagacctggtagaagcaaatgtagaatcactctggagatatatgaccttaaccaaggctacccagaaatttcacagattgtagctacacctgagaaaataaccttaggaaaagctaggaacagaaagtattagtagtcaacctgaggaaagttagcatacaaaataaatggcatgattagattctcaagaacttctgataatagaagtatttgataaagactataagtatgtctaaaatgatatttttaaaattcctaatcataactttatgccagaaaatttaaaacttaaaatacacaatatttaagaaaaatatactcagcaatgagcattcgttgcagttatttcatattagccaaaaacaagaaacaatctagatgtctatgaggagaactaataaatgatagtgtattcatgcagtggaatactacatggtagttagaatgattgaacgggagctccatgtcaagcatgagtaaatctcgctttgagtgaaaaagtaatttgtaggattttacaaacagtatagccatttgtacagtttagtgatacacatgcagtaaaaaacataaaacactgcaaaaaatggtaaatatataatttaggggtttagttacctattggaaaggaaggaaggaaagagaatgggatcatgtaggatcatatattaggcttcagcttcatccgaagttttaacagtgttaaaatttgatgaagatggaatgtggaagcacatttgtttcttatatcttayatacttttctgagcatttaaatttttgtaacaaaaatatattttaaaatactttgcattaaaaagcaattgagaaagtgtataaacatgctaaacctgcatatttcttattttgaatcaaactatgtttaaatcttttaataaattattttatgctactttctccttccacctttcatagtcaaagtttgtggggaaaatatataagaacgaaatcatttaatatgatatgctgattctggggtcaattcttgttggcggtttccagatcctagtagcacagtgaaatgttttctacccccaaggtcttttctctcgtggtaactgagcctttccatctctgttgattcctgtctcatggagtatgtttgggggcattttactctcttagggcctggtgggaaggggatggtttctcttctctttgggtctctgtctttctgagctccactcctaccccgagggtttgtctcttacacttgcactctctcagagtcaatctcttgcttgttctcttatttggcatctccttcctttctctttttctatctagagctcactcttctgggatagtctctgtccttctgtgctgtatgtgcgtgtgcctgcctttctcttttttccctcccctctcccaagtccccatcagtttctttcttactctccccatgggtaggtctttttctgtctctcttgctytctttccatttcttttctaatttacctacttatgttccatttgtcttatttaggtaaagctacttcttcttctaatccaagcagcccagctccagactggtacaaagattttgttacagatgctgatgctgaggttttagagcattctgggaaaatggtacttctctttgaaattcttcgaatggcagaggaaattggggataaagtgtaagtgctttaccatatttattatataaattaaccttttgattatgtttttattgcttaaacaatgtatttgaacaaatctgttgcttttccttccttcctaaagatgtgatttatttggtcattgtagtgctaggccaatacaagcaactatcttttttgtaagccactagttctgattgcatattcaggttatttcttcagtgtaaatttctgcttctacctrttgcaacttgaacttatttccttgggtagagctcttagttgaaatttgtgtttctccatcttcaaaatcatttttcggtttatgtagtgtgacttctaccgtgttgctttactgagatttccccctgtaaagtcactagtgaccttctaatcctcaaatctagtggacatctctcaggctttattttattttacctgcttgattattctttcttcttcttcttcttttttttttttttttcattatgagacagggtcttgctctgttgcccaggctggagtgcagtggcacaatcacagcttactgcagtcttgacctcccaggctcaggtgatcctcccacctcagcctctccagtagctgggactacaggcgcacaccaccatgcccagctagtgtttttatttttagcagagatagggtttcaccgtgttgcccaggctgatctcgaactcttgagctcaagcaatttgtgcgcctcagcctcccaaagtgctgggattacaggtgtgagccaccacacctggcctgattattctttctttatcatttattctttgttttttgttccacttctaacatttttgccaccattcctttctttgcatcttcaccccccttcaaattacttttccaaaaacattatttttttttttttgagacggagttttgctgttgttgcccaggcgggagtgcaatggtgcgatctcggctcatcgcaacctccgcctcccaggttcaagtgattctcctgcctgagcctcctgagtagctgggattccaggcacgcaccaccacgcccagctaattttgtatttttagtagagatggggtttctccatgttggtcaggctggtctcgaactcctgacctcaggtaatctgcctgcctcagcctcccaaagtgctgggattacaggcgtgagacaccacgcccggcctccaaaaacatatttttaaagttttgaacaagacttactgtctaggctgctaggtcccaacatctgattataaacgatttttaaaagtatctgagatgcttttttttttttttttttgagacggagttttgctcttgtcacccaggctggagtgcagtggcgcaatctcagctcactaaaatcacctccacttcctgggttcaagtgattctccagccttgcctcctgagtagctgggattacaggcacacaccaccacgcccagctaattttgtttttttaatagagacggggtttcaccacgttggcctagctggtcttgaactcctgacctcaggtgatccacccgcctcagcctcccaaaatgctgggattacaggtgtgagccaccgcgcctagcttgagatgcttttaataaaaattttaaataaggctaaaataaaataatcttttatgtttaaaaaaatctcaaaatatggtctgaaacaaaagagttcttcatgttgtctgcaactggaaaaggttaatagagagaaccattagtatagacatttaatcctaacaacttttttccttttctactgtaagacttctctgagttcagtggttcccagaaccagccttaattgctaactgactaaaatcaacctctttccagtatagtaacccagattgcagattaattccaatttaataattagtatttctaagactttaattttttcacttacgggaactttcaagaacttaatttgtagcacagaaagaattgattcaattatgtttttgattttgggaaagataaactactgaggggtcaaagcataggccttggtcatttgagctgagcaccaggagtcaattcattttcttaccaacattctagaagtagttaactgggagatagtagactccaacagtgtggagctcaggaagtcatacaataaaaaacacttaagtggttaactccaacagccgtttcatagcttcaattgttttcagttctactaaatctgaagatatgtagcagggaatgttgaaggatcttcaggagtcataagtaccttcttctcctatagtatagcttttagaataaaaataaaacttaaagcatacttgccacaggtatattgtttcttatatactgatctactttgtttgcatatataaagggcaatagaagacctcttatattctctttctagattttatttcttttctagtgtgtaagtatgttataaattctgtccagtgggttagaccagaatagtcattttagaactatttctcagagcccctgcaaattggtgaccgaaaggagagggtaagggaacagtaacatttttcctccttctcccgtaatgcctaaaacagcttgcttttataatttattttatttgaactctacacaaaacttgatgtgaccaaatagttttcatggctaaaaaggagttagaaaattactagggcagagaatgaggaatttgcagacatacttgaaatgtaatgacaaagtgttatagaatgcatgtaattttaaattactgaaatacttgtaatagggaaactttttacattctctaaaacagtgtcttttatagagcagaagttttaaattttgatgaagtctaatttatcaacttttaaaacaatgatactttgtgtcatgtgtaaataattttttacctaacccatgttatgaagattttcttctgtgttcttctaaacattctgttcttacagtttttacagttagatttatgctccattttaagttattttttgcataaggtatgcagtttaggttgaagttcactttttttcatgtggatgttcagttttgctaagaccattgtttttgtcatgtggatgttcagtttcgctaagaccattgtgtaggtttttttttttttttttttgagacagagtctcgctctgtcacccaagctggagtgcagtggtgcgatctccactcactgcaagctccgcctcctgggttcacgccattctcctacctcagcctcccgagtagctgggactacgggcgcccaccacagtgcccagcttattttttttgtatttttagtagagacggaatttcaccgtgttagccaggatggtctcgatctcctgacctcgtgatccacccgtctcggtctcccaaaatgctgggattacaggcgtgagccactgcgcccggctaccaagaccattggttaaaagactatccttttaccattgaaatgcctgggccctacaattaattatcctatgtggctctctatctggactctattctgttctattgatctgtgcctgtccctttactacactgtcttggttactgtaactttgtaagtaatgaaatcatgaagagtcagccctccaactttgtttttctttttcagaattgtcttccctcctctgaggtggcattctcatatacattttacaatcaccttgtaatttctacaaaaaaatcctgctgggatttttgttacaattgtgttaaatttgtagatcgatttaggaagaagtgatatctttactaggaatcttctaatccataaacactaatctgtttttttagccttgttttcagccagtccctcatatctctggacttgattgaagattttcttgaattagctagtagggagaagacagaagataaagataaaccccttatttataaaggtgagctacaaatatttctgtgtcgtaattttaaaaatactgatttaaacataccatacaaacattttagcaacaaaagaaacaaaactacccagtctcacaactctatcatatcaaaatttttttgcaatgtctatttgtccttatccatatatatgtatagtctttttcaaaataaaattgtattgtttatatttgaggtttacaacatggtgttatgggatacatatagatagtaaaatggctactgtagtgaagcagatgaacatatctatcatctcacatagttttttttggtgacaagagcagctaatatcaacttaagaaaaattcctaatacagcagtctttgttgttgaaattgttggataaattaaaactttttggtttctaaagcagttttattgagagataattcacatcctgtacaattcacccatttaaagtgtagaactcaatggttttaatatattcacagagatgtacaaacatcactagagtcagtttttgaacattttaatcactaccaaataaaactctgtaccctttaactattactcccctatccagcccaaaactccctcacataagcaaccactaatctcctttatgtttctaatagattcatatattctggaccagtcacataaatggaaacatgtaatatgtggtcttgatagatattagggttgttctcacctttcagctgttgtgaatagtgctgttgtgtacatttgttacacaggttttcatttatttaaacaaacggcaataccaaactgttttctacactgcctgtactatttcagtcctaccagcaatgtacaagcatttcagtttctccacattcttgtcaacacttgttatttttcatttttgtttttgttataaccatcctaatggttgtgaagtggtatcttatgattttaattttcatttctctaatgactaataatgttgaacatcttttaatgtacttgttgactatttctttatcttctttggaaaaaatgtttattcaggtcctttgcccatttttgaattggattgcttatctttttgttgttgaaatgtgttttaaaaaatatattctacatactaggcccctatcatatatatgatttgcaaatattttctctcattctgtgggttatcttttgctttcattaaaaaaaaaatagttccggtgatctgtatcactttcttttatttatttatttttaatttttcgtagagatgaggtctccctctatttgcccagactggtcttgaactcctgggctgaagcagtcctccctcgttggcctcccaaagtgctgggattaaggtgtgagccaccatacctggccatctgttgctttcttgagtgtgtcctctgatgcgcaaaaatattttattttgttgacatccaatttattttttcttttgtggcttgtgcttttactgtcatagctgagaaaccatttcgaaataaaaagtcgtgaagctttaacccctgtgtttgcttaaaagagttttatagttttagtccttgcacttaggtctttgatccattttgagttaatttttatgcatgatatgaggtaaaggctcaacttcagtcttttgctgtggttatccatttgtcccaggactgtttgttgaaaagaatattctttctttattgaatagtttttgtcactcttattaaaaaggaattgatgatggagacacatgtttgtttcctgaccctcaattctattccattgatctatatgtcagtcgctgtgctaatactgcactatttcattaccattgctttgaaagtgatgttgaaattggaaagtgtggctattccagatctcttggaattcaacatcaaccttagaatctcctataaatttctacaaagaagtcagcttagatgctaatagggattgtgttgaatgtatagttaattttaggaagtactgccatcttaatattatgtcttatccatgaacatggggtgttttgctgtttatttaggtctcttatttatttcaccaatattttatagtttgcagagtatacattttacacttttgttaaatgtatttgtacatattttatttctgaggctgagtgaaatttgttcttagtgaattctttaggattttttatatacaagatcatgtcatctgcaagtacagataatttcctttctaatctgaatggcttttatttgtttgcttatccagttgccctggttaagacctcaagtacaatrttgagtgaaagtggcaagagctggcatccttgtcttgtctctaatcatagtgtgaaggaatccagtttttcaacattttgtatgatgttagttttgtggatactatttatcaagttgaggaaattatcttctctttctagtttgttaaatgtgtttgtcatgaaagagtgtgacatactatcttgatttctctgcagctattgagatgatcatgtcatgttttttttttccccattctattaacatagtgtattactttgattttcacatgttaaaccaaccttgcatacctgggataaatcccacttgtcatggtgtataattctttttatatggtgctggatttagtttgctagtgttttttgttgttggcaatggaatgttttaattggctttttttgtcctgattatgaaagtattattatatcttgcatatataatattggctgtataatattctgtcatatggctgtacataacttatttaatcatttgattgctttctctaatttttcaactttttttttttttagagacagggtcttgctctgtcacccaagctgaagtgcagtcgagcaatcttggctcactacagcctctgcctcctgggttcaagcgattcttgtgcctcagcctcctgagtagctgggattacaggtgtgtgccaccatgcctggctaatttttgtattttttgtagagatggggttttgacatgttggctgggtcttgaactcctggcctcaagtgatccacccgccttggcctcttaaagcactgggattacaggcgtgagctaccacacctggcctaatttttcaacattttaaatttttgtacataagtttatatctgcgttttaaacttttttgcttaagatagattcctaagaggagaaatcatttaccaacaggtatgatcttttttaggacttttgaaacattgtcaacttattttccagaacagttggattagtactcctagtaggaatccttgaatgatcactacaccattgccataataactaaaacctttcttaatagatgaataatgatatcttgtatttgttttaatttgcatttattttataaccagtaacatagattgtctctgctaatctctttttgcttttactgctgactgatggctatgtttctgtctgcctgcaatgctctctccacccgcactatcttcttcacctgattaattcctatccattcttcatctttcatgtccagtgacactcctcagtactgacttccctcctcctgactccaatgtctgattttttccttttaatttttgtgggtgcatggtaggtgttatgtattcatgggttacatgagatattttgatacatgcatgcaatagataataattacatcagggtaaatgggatatctatcacctcaaacatttatcctttgtgatacaaaaaatccatttatactcttagttatttaaaaatatacaatttttaattatttttgacggtagtcaccctgttgtgctagcaattactagtttttattcattccaactatatatttgtacctgctaaccatcagtacttccaccccaaccacccactacccttcccagcctgtggtaaccatccttctactctgtatctccatgagttcaattatttttatttttagatcccacaaataaatgacaacatgcaaagtttgtctttctctgcctagcttatttcacttaatgacctccagttccatccatgttgttgtaaatgacaggatctttctcttttatggctgaatactattccattgtatataagtatcacattttcattatccattcatctgttgatggacacttaggttgtctccaagtcttggctattgtgaacagtgctacaatagacagtgcagatatgtcttcgatataccgatttccattattttgggtatatacctaggagtgggattgctggatccttttttttttttttttttttttttttttttttttttttttttttggtggggggagacaaggtcttgctctgtcacccaggctggagtgcagtggtgtgatcttggctcactgcaacttccacctcctgagttcaagggattctcccacctccgcctccccagtagctgggactacaggcatacactaccacgcccagctaatttttgtatttttttggtagagacagggtttcaccatgttggccaggctggtctcaaactcttgacctcaggttatctgcctgccttggcctcccaaagtgctgggattatataagtgagccactgcgtctggctgggattgccggattctatggtagctctatttttaattttttgaggaacctctgaactgttctccatagtggttttactaatttgtgttcccaccagcagtgtacaagagttcccttttctccaaatcctctctagtatttgttactccctgactttggataaaagccaagttaactggggtgggaagatatctcatagtttgatttgcatttttctgataatgaatgatgttgagcaccttttcctatacctgtttgccattggtatgtcttcttttgagaaatgattattattttgtccattttaaaatcagattattaaattttttttcctgtagagttgtttgagttctttatatattccggttattaatcgcttgtcagatgggtagttttcatatattttctcccatcctgtgggttgtctcttcactttgttgactgtgtcctttgttgcgcagaagctttttaacttgatgaaatcacatttgtctgtttttgcttttgttgcctctgcttgttgggtattactcaaaaaatctttgcctagtccaatgtcctggagagtttccccaatgttttcttgtagtagatttgcagtttgaggtctaagatttaaatctttaatccattttgacttgatttttatatatggcgagagataggggtctagtttttttctcctgaatatgtatatccagttttccccagcaccatttgctgaagagactgtcttttccccagggtatattcatggcaactttgtcaaaaatgagttcactgcagatttatacatttatctcagggttctctattgtgttgatctatgtgtttttatgccagtaccatagtgttttggttactatagttctgtagtataaagtcaggtaatgtgattcttacacttttgttcttttggcttagtatagctttggctattttgggtcttttgtggttccatataaatttttagggttgttttttgtatttctgtgaagaatgtcactggtattctatacagattgtaatgaatctgtagattgctttgggtagtatggacattttaataatatcgattattccaatccctgaacctggaatatcattctatgattttgtgtcttcagtttctttcagcatctttttatagttttcattgtagagatctttcacttctttggttaattcctaagtattttatttatagctattgtacatgggattactttcttgatgtcttaaaaaattttcttttaatttgtaagtttctttatttctctttcaggttgtttgctgttggtatatagaaatgctactgatttgtgtatgttgggtttatatcctgccacttcacagaatttctttatcatttctaatagttttctggtggagttttcagatttttccaagttaagatcagatcatctgcaaacaaggataatttgatttttttctttccaattttgatgccccttatttcttgttcttgtctaattactctagctaggacttccactactatgttgaataagtgatagaagtgggcatccttgtcatgttcttgatcttagaggaaagccttttagtttttctttctttagtatgatactagctatgggtctgtcatagatggcttttattatttttgaggtatgttccttatgtacttagtttttttagtgttttttcataaagggatgttgaattttgtcaaatgctttcttaccatgaattgaaatgatcatatggttttgttttttgttttttttttgagacggtctcactctgttgcccagactggaatgcaatggcgtgatcttggctcaccgcagtctctgccttgcaggttcaagtgattctcctgcttcagcctcctgagtagctgggattacaggcgtgtgccaccgcgcctaactaatttttgcatttttagtagagacgaggtttcaccatgttggccagacaggtcttgaactcctgacctcgagcggtccacctgcctcggccttccagagagctgggattacagacgtgagccaccacaccccggcgatcatatgggttttgtctttcatgctgttgatatgatgtatcacatcaatttgtatatgttgaactattcttgcatccctggagataagccccagttggtcatgatggatgatcattttattattgaattccgtttgctactgttttgttgaggatttttacattagtattcaccagtgatattggcttatagtttaatttttttatgtgtgtttatctggttttgttatcagggtaatactggccttgtaaaatgagtttggaagtattctgttctctacttttcagaatattttgagtaggatttgtcttatttcttatttaaatgtttgatagaattcagcagtgaagctattgggtcctgggattttccttgctgggtgactttttattatggcttcaatctcattactttttattggtctgttcagattttggacttcttcacggttcaatcttggtaggttgtgtgtgtctagaaatttatccatttcttctaaagttttccaatttatcggcatatagttgctgataatagcaactaatgattctttgaatttctgctgtaacagttgtaatatctttattttcatctctgattttatttttttgggtcttctctcttttttgcttagtctgtctcaaagtttgtcagttttgtttattttcttcaaaaaacctgttttttgtttcattgatcttttgtattgttttctttatttcaagtttatttatttctgctctgatctttatttctcttctactaattctgggcttggtttgttcttgcttttctaattcttctcttctcttcttttttgttttttttttctttttttttgagacaaggtctcgttttgttgcctaggctggaatacagtggcgcaatctcggctcactgcaacctctgcctctcaggttcaaatgattcttccgcctcagcctcctgagtagctgagattacaggcgcccgccaccatgcccagctaatttttgtatttttagtagagacagggtttcactgtgttggccaggctggtctcaaactcctgacctcaggtgatccacccgcctcagcctcccaaagtgctgtcattacaggcatgagccaccgcgaccagcctctgattctttaagatgccttgttacattatttgcagtttttctgcttttttgatataggcatttatagctataagctttcctcttagtactgctttccctgtgtcttatgttttttggtatgttgtgtttccattatcattttttaaagaaaatttttgatttccttcttaattccttcattggcccactggtcattcaggaatgtgttgtttaaattctatgtatttgtatagtttccaaaataccttgttattaatttctccttttattccactgtggtgagagaagatacttgatattatttcaggttgtttttgatgttttaagacttgttttgtgacctaacatatggatgatccacatgctgaggaaaaaaatgtgtattctgtagctgttggatgaaatattctgtaaatatgtattaggtccatttggtctatagtgtagataaagtgtgatgtttcttagttgattttctgtgtgtagtgttgaagtctccagctattattttattggggtctatctctctctttggctgtaacagtatttgctttgtatatgtgggtgctcccagggttgagtgcatatatattttaaattgttatatcctcttgtagaattgaactgtatcattatatagtgtccttctttgtctcttcttacagtttttatcttgaaatctattttgtcctatataagtatagctgttcctgctctttttggtttccattggcatggaatatccttttttatccctttattttcagcctatgtgtatttttacaggtgaagtgtgttcttgtaggcaacagatcattgggtattttttaaaatccattgagcccctctgtcttttgattggagagtttagtccatttacattgaatgttattattgattagtagggacctactcctgccattttgttatttgttttctagttgttttttgggctcgtcttctttccttccttcttatcttccttttaatgaaggtgattttctctagtggtatggtttagtttcttcctttttgtttgtttgtttatccattatatgttttttggtttgtggctcccatgaggcttggaaattctatcttaaaacccattattgtaagctgataacaactttacactgtttttataaacaaagaaagaaacaggcaaaaagaaaactaataaaaattctacaccttaactttgtccactttttagctttttgttgtttctgtttatatcttattgtactatgtcttgatatgttgttgtagttatttttgttgcttcaacatttagtctttctacttataataagagtaatttatacaccacagttacgctgttataatattctgtatttttctatgtacttactgtttttagtgagttttgtacctttagaggatttcttactgctcattcatgtccttttctttctgattaattacttcctttagcctttcttgtaggacaggtttggtgtggataaaatccctcagcttttgtttgtctggaaagtttttatttttcttttatgtttagaggttattttttccatttatataattctagggtgaaagttttttccttgagcactttaaatatttcatgctactcttctcctggcctgaaagatttccactgaaaagtctgctgccagacatattggagatccattgtatgttacttgtttcttttctcttgctgcttttaggatcctttctttatccttgacatttgggagttattaagtgccttgaagtagtcttttttgggttagatctgcttgatattctataaccttctacttgaatattagtatctttctttagatttgggtttctctgttattatccctttgaataaactttctacgccagtctttctctctacctcctgtttaagaccgatatctcttagatttgctttttttgtagctattttctatgccttgtaggcctgctttattcttttttattcttttctcttttgtctcctgtgactgtgtattttcaagtagcttatcttcaggctcactaattctttcttttgctttatcaattttgctattaagagactcttatgcattctttagtatgtcagttgcattttttgactccagaatgtctgctttgttcattttaattattccagcctcttcattaaatttatctgattggagtctgaattcctcctgtgttatcttgaatttcattgtttcctcaaatcagctattttgtgttctctctctgaaaggtcacatatctctgtctttcccggattttcccgattccctgtttagttcatttgatgaggtcatatttctctaaatggtcttgatgcttatggattttcgttggtgtcttggcattgaagagttaggtatttattgtagtctttgcagtctgggcttgtttgtacctgtcatttttgggaaggctttccaggtatttgaagggacttgggtgttgtgatctaactttttagtcactgaagctgtgtccacattaggggtcaccctaaggccagtaacgctgtagttcttgcagccttgtagaggtaccattttggtggtcttgtataagatccaaaagaattgtctgcattaccagatggagaatcttgttctcttcctttactttctcccaaacaaatggagtctctctgtgctgagttgcctggagctgggggtggggggtgggtgacacaagcacccctgtgactaccactgcgggtatagcacttggtcagatcttaagccagcagagcaatgggtcttgcccaaggcccactgtaaccactacctggttactgcctatgtttgctcaaggcccaagggctgtacattcagcaagtggtgaagcctgccagtactgggtctttcccttcatgttggcaaattctcttagtccctgggcgggtatagagatgctttctggagccagggcctggagccagaaatgttagaaatatacctagtgctttattctactatggctaaactggcacagaaataacaaaacaaagtccttcctactcttctctttcttttcctcaggcagaggagcctctcttcgtggccaccaccaggacaggcccgcagagagtactgccagtgtaccgccagtgttcacttaaggcctaagggctatttagtcagcttttggtgaatgctgccaggccagagactcacccttcagggcagtgggctccactctgccccaggctcagtccacaaattccattcaagagctaaggcctggaattggggacccaagagcccgtttgttgcttttgtccgctgtggccaacctggtagctacactgctagataaagtcccctttactcttccctctccttttctcaaacaggaagagcctctctttgtagccaccacaacttctaataagctgggtctcaccataacctaacacatttctgtctaatccatgccccacaatgtgtactacctggttattgctgctgatgattcagggcccaagggctctttggtcagcaggtgatgaatcctgccatgactgggtccctcgattcaaggcaatgggttgccttctggcccagggagctagggcctggaatgggggcttcacgattctgcccagggccctgtcctactgtgactgagctggtatccaagttgcaaaacaaagtgctttttctcttcccttttctctcctcaagtagaaagcagaggtctcttttggagctctaagctgcgctacctggaattggaggagtgaggagtggtggcataagcactctcttagccgccccagtggtatctgactaagtcaagtgcccccattttactggctccaagccctttacagcactaggacttgcccagaagttgcagtccttgtggcctagatagcctttcagttttatttagggccccagtgcactttagcccactgtggcgtgacttactaaaactcaacttctgatcactgtgatggatgattcccctctggtttgggcaggtttatatgctcccttcatgtgtgtaggctgagttccaattcaaagtcctatgatcactgcactctccttcccgcaagtgcactgattctctccctatgacacgtggccacttctgggggttgaggtagcagtggcattggcgattcaagattgtctttccccttctgtgcctctttcagtgatatgaagttaagatcaggtactataattgctcacctgatttttgtttcttatgatggtgcttttttgtgtagatagtcataacatttgctgtttatgctgggaggttgatcagtagcagcttctattcagccatcttattccacctccttccccagtactgccctgattgaatgagttggtatttgttcctgtttctgttttttggaattgtttgtaaagcattgagcttaattatttaaatgtttgttagaattcagcattgaagccatcttggcctgggctcttcttataggtagttttttttctttttagtattatggtaaatatatatataacataaaatttactattttgacagtaaaaaggcaacctaccatatgggaaaaatatttgcaaatcatacatctgataaggggttaatatcaaaaatacataaaggattcctacaacacaacaacaaaaataatatgatttaaatatgggcaaaagagttgatagacatttctctaaaaatgatatacaaatggccaagaagcacatgaaaagatgtctagcatcactaatccttagggaaatgcaaatgaaaactgtaatgagataccaccacacacccattaggatgggctactatgaaaaaacaataatgagagttggtgaggatatggagacattggaactcttgtgtactgttggttagaatgtaaaatggtatagctgctgtggaaaacagtgtggtgttcctcaaaaaattaaaaatagtattaccatgagatccagaagtactacttctgggtatatacccacaagaattgagttcagggtgtcagagaagtatttgtatttgtacgcccacattatagcagcattattcatgaccaaatcatggaagcaagtcaaatgtccatcaacagataactggataaacaaaatgtggtatatacatacagtggaacataatttagccttaataaggaaggaaactttgacacatggtggaacatgtatgaatcttgaagacaatatgccaagtgatctaagccagtctaaaaaggacaaatattacatgattcctattatgaggttcctagagtagtgaaatttgtagagacataaaatagaatggtgtttgccagggcctgtgggtaaggggaaatggggagtgtgagagaacagataactccacggggcttcccagagtgctccatgttgtatggggattatgtctgtctcataaatatatgtatcattggagacaggttcattactacccatttttgtatactctttgtctagcaccaagctagacatgtagtaggtccatagtaaatacttgttgaactggtaagggaataaattacccttatctgtaacttccctagtttttttatacagagaatgatgctctagttaggcattttcctaggtatatacttgcamtttttatctttctcatttccccrctttctttgtttctagagtgagtttttggcatatctttaacatatatatgtgtagtatatatgtgtatttttacatttgactgtagttaaatataagcttaaatatattttttttctattatcactatacattttattagattctatgttctggcagtttttcattattgaaaagcctatgttacaaaaacataccaatttactaccatcaataaatggaaaatgcttatcttaatatgtattgtaactacattttcttcatctttaatgggtaaaaacagttgtcattgttttcattaataattttttgaccactagtagggttgtacttcttttatatgcttgctagtttatttctgattttgtaaattatctttagcaaatgtttactaatcagattggtctgcctttgagttactgctattaccactaccactaccattaccattaccactgtgtattgagcactgagcaagatttaaggggtactacaggaaatcatggtgtagaagaggaacagacacatatattatgtgccataatagaggcaggtgtaatttgtcatgggatcttgagtgataatattaagaactcagtaagcttttaattaccatgtgacaggcaccattctaagtagtttttaaaatattatctcattgaatcctcataacaaccctatgcaataggtactctgattatcttcattttacagataaagaaactgaggcacaaggagtttaattacttgccataagtgaaaatgttagtaaatggtgaaactgagattaaactcagggagtgtcactccaaagtctgtgttcttaactactaacctataatgactctatcagtttttaagtgttggattcatcgaggtggtattagagatattcatttgcattataataaaaggtgagtatgttgaaatgctttttaaaatagtcatatcattttccattcatttatgattatttattttaataattatcctgttcaagtgaacaattaatgcaaatgtgactccagcctcttacctttttatgcaagtatccatctcaaattctttttttcttggatgtgtatgcctttttttctaattgaaaaaaaaatcataaataaaatgactttcwtaagcattaatgaatttttaacaaggaaattctgggttttctatatcagtgaagatataggtaagaaacatggaaaagcatcytttttttaactaatgtactaaatttaaagagcttgctggaaagacataagtaaatctcagttttgttaactgttttattttaargctctggggcatgatagaattttgcttggattggaaatagtagcattgtgtttacagttaaataattagaatagaaattatgtatgataaaatataaaagtgtcataagcccttaatctcttggtattttagtatcaatgcaagtcttgggtaaaatttcacctcacttcttcctggtgtagattaaaggaaaaaaaaaacttaaactcactgtctaaaattgacatgtcatatcattaactcataaagtcgtactcctttacacacacacacacacatacacacacaccacatttgaaatggaaacgtacactgaaatttgcagctaccccatagaataatttttggcacatagtaggcattcagtaaagatttgttcagtgaatgaataaaggcattctttatctctcatttttatttgatcattatcaagttgttgataaggagaaaaacgtggccatttacagatataacttaaaacatgcctcatgagcgaaatgtaagtttaatcatrttcttttgacagttttaaggattctaatcaaggaaacccttttaagaaattctcatgtagatgaaataggctttaaaaatacctgtgctcatcactatctatttgaatgaaatctgtggttaatttatttataatgtaatgactccttgattaagaaragtatataatgtattttgctatacaaatagaatatatataacccacttttaaatgatgagcaaggtggaaaatctgttcttaccagtaagcagagcgatatatcaaattccttttgtgttcttttgttaaattttcaggtgaggggaagtggcttcgaaacattgactattaccgtttagatggttccactactgcacagtcaaggaagaagtgggctgaagaatttaatgatgaaactaatgtgaggtaggaaaaattttctgtatatgtagaaacattaaaataattaattttaaaatttacataaagttcactatttttattgtgtatttgaatgtttttagcaaatgcaaggtacagtcaggttgcaaaacagtgtcatcactccctaaccactgaattcacttatggaatcatataatttgtagccttttgagtctcacttctttcacttagtgagatttatttgagaatcatttacattgttgcatataccaataatttttaaaaattgttgtatagtcttccattatagggctatatcacagtttgttcagctacttccacttgagggacatttgagttgtttccaggttttggaattaaaatcaaagctgctctaagctttcatgttcaagtttttgtgtgaacataagtatttacttaaatgaaacaaaagcctaggattgtgattgctgggtcatatagtaagtgtacatttatctttgtaagaaactatcaagcagttttccaaagtgactgtacaatttttcattcccacccgcagttgtatgagagttccagtttccttacattcttgtctgtacatggtattgtcattttttaaaaaaattattttactcattctaatgtatgtgtagtggcatctcttgtgattttaatttgctattccctaatgataaattatgttgagcatcttttcatgtgcttattgaccattttaatatcattaactgtagatacaaggcaatttgtgtgtgtattgatattgttttaagctgttagtaattgacaaaatcaagctacatttggaaagaaaaagttttatatatagtcatatgttgcttaacaaccagtatacattctgagaaatgcatcattaggcaattttgtcactatgcaaatatcatagagtgtactgtacatcagtaggctttctgtgatatagcttattgctcctaggctgcaaaactgtacagcatgttactgtactgaatactgtaggcaattggaacacaatggtatttgtgtatgtaacatatctaaacagaaaagatacagtaaaaatatgtattatactcttatgagattgcctttgtacatgctgtctgttattgaccaacacattatgtggcacatgactatacatacatctaaacatatgcacatacgcatacgtatacacatacacaaacataagaaagcatggcatttaagaaaaggataaaggagatggggttagtttagtagaaagatggctgaagtatgccttaataaatattttaaactatggagaatattatactgtgtgtttaaaacatgttttaattttagcagcatcatgaactagacctaggcttaaggctagagaaatttcagttacattttaggaagattattaattattgaaaacccgtagcctaagagagcttacaaagggatgatttgagtatagttaaattataaatgtatatgattgattatataattgtttaaagaataaatacatttttatattctgtgtttttcatgtttaaacaaattattatttgtacatgagtgtgaagaagtaattttattgagtaactcaaatttctcaaacataatctaaacctttggcttgctaggtttcccaaattttaaaatacgacagaggcatataatctgtcacgtgacatttatacttgatgactagtagggaaaaacattgaaatgtagatgttgagctgtcagcttggcttactcactagtgaattacccctaaacatatgccaaaaagcatgtcattcaaattcatgcttcaggcatatactggttgagtatttcttatccaaaatgcttgggggtgctagggacccgaagaatttcagatatgggatttttttcagatttttgaatatttgtattatattcttacctgttgagcataccaaatctgaaaatctaaatccaaaatgccccaatgagcattttcttcgagtgttacgttggcactcaaaaagttttggagtttggtgaatttaggatttcagacttacagatttgggctgttcaacctgtacatgtatattatggatttggggagttgctcttgagtagctgaacccatacacatgaaatccacagatgttatgctgtctctcaaaatgcacaaacaaacagaaaatgaaacaaaaaacaaaatgaaaagagcaaggaaaaaatccacaaatgttttagattatatctctgtaaattctaatttttcatgactcagtaattttcagtaaataggatataaatataatccttgtttatgccaaagcaatctgaaagacacattaaaataaactttaagataatgaccatttgtaacgttgttgttttgtgtgacctggaagtagttttcagcagtctcagagtgcctcgttagcttgatactatttttggtttgtttctcttttaatttagaaatgattatagattcacctgaacttgcaagtacagagaggtcctgtgaaccctttacctaattttccccaatggttaaatcttatatttcaatatcaaaactaagaagttgacagtgtttcaatgtttgcatatatctttttttccacatatacacaatcaagatacagaaatattccatcaccacaaagctcgctctctctcactacccttttatagtcacacccatttttactgccaaccttgtcactaaccttaacccctgacaatgactaatttatgctccatctctattattttatcatattaagactgtcatataaatggtatcattctctatatgtgacctcttgagattggcttttttcagtcagcataatgcccttgagttccatccaagttgtcacatgtatcaatagtttgttcctttttattacagagtagtattctatgggatggatgtaccacagatgtttaatcattcacttattgcaggacattttcattttgtccaggtttggctattataactaaagctgctgtgaacactgtgttccagctttttgtgtggacctaagttttcatttctctaggataaatgcccaggtatgctgtggctaggtcatatggtaagtacttttttaggaaactgccaaactcttaattagaatggctgtaccattttatagtcctaccaagcagtgtgtgagaaatcaagtttctctacatcctcaccagcatttgctattatcactgttttttattttaggagttctgataggtatgtagtggtatcttattgtggtcttaatttgcagttccctgacaaccagttatattgaacatcttatgtgtttatttgccatcaaatattgtatatcctcttgggtgaaaatctctttatgtctttttgtccattttcttattggattgcttgtttttttattgtagggttttgagagttctttatataatctagatatgtgtcctttgtcagatatatggtttgcaaatacttcctgccagtttatggcttgtcttttcatccccttcacagggtctttcagagaacaaagattttaattttgatgaaatctagtttgtcaatgtttgtttctttgttttgatcatggttctgatgtcaagtctaagaactcttcctcaaagccctaggtcttgaagactttgtcctgtgttgtattttacaagttttataattttaccttttatgtttaagtccatgttgtattgagttaatttttgtataaggtgtgaagtttaaaggttcatatttttggctgtggatgttcaattgctgcagcatcatttgttgaaaaaaactatctgtggcagtgcacagtggctcatacttgtaatcctagtggtttgggaggctgagcccaggaattcaagaccagcctgagcatcacagcgagaccctgtctctaaaaaaaaaaaaatacccaggcatggtgatgcacaccagtactcccagctactctggaggctgatgtgggaggatcacttgagatcaggaggtcgaggctgcagtgagccatgattgtaccacttcactccagcctgggtaacagaggaagacactgtctcaaaaaaaaaaaagaacgaagaaaaaaccatacttcctttactgaattggttttgcacctttgtgaaaaatcagttggctatacttgttttgggctgtttttcagtttgctattctattcctttattccatatgtctttctctgcatcattactacatagtcttgattactgtagctgtgtactaagccttaatatcacattgaatgattcttcccactttgttctacctttcacagattgttttagctatttttatatgaattttagaataatcttgtctagacctacaaaagttttgcaataattttaataggtattgtattaaacctattactaatttgtagagaattgatatcatttttcaactgtaatacttttagcagcagagaattgataactttattgttttctgatcagtgaacacagtgtatgtctccattagttgatctttgatttcttccatcagtgttttgtagttttcagtatacaggtcctgtagatcttttgttagatttacacccaggtatttctctttttgagttattgtaaatgttactgtatttttaatttttgtttccatgtgttcattgctcaaatatagaaatgcaattgatttttgtgttgatcttttgtctgtaatcttgctgacttcatttgttctaggagtttgttttatagatttctggggattttctaagtagatcattgtactatccacaaggagggatagttttatttcttcttttatgatctgtatgctgtttgtttccttttcttgtcttgctgcaagaaaagtctccaactataattgtgaatttgtctgtttctcctttaagttatgtcaggttttgcttccgatattttcagctctgtttattatgcatgtttagtattgctatgtccctccctatacctcatactagttaaaacttaagagtaatatagttagtagcaatggtgagagtggacatccttaccttcttcctgatcttaggagaaaagcattctgtcttcattaactatgatgttagctgtaaggttgtttttttgggtgggggggttgtttttgtttgtttttgttttgagacaaggtttctgtctatcaccatgactggagttctgtggtgtgatcatacctcactgcagcctcgaactcctaggctcaagggatcctcctgcctcagcctctttgagtaggaatgcacagccatgttgtactttttttgtaattactcttcatcaagttgaggtggttcccctctattcttaattttctgagtttttatgacgaataggtgtttacatttgacaaatgctttttctgcctcagtttgtatcatctgttatttcttcttaatctgttaatatggtgtgctatgtagattggtttttgaatactgaaccaacttttcatgcctggaataaaactccacttgatcgtaaggataattcttttgatatagtacttggttctgtttgctaatactttgttgagagatatttatgagagttactcttatatattcagttgttttcgtgttgtcattgtctggttttggtatcaggttaatatcgacctcataaaataagtcaataattgttttctattttctgacaaaaattatggggatttgtgttaatcttaaatgtttggtaaaatttgccagtgaaaccagttctggccttgaagatttctttttttgggagtttaaaaatcactaattaaatttcctcagtagttttaggattattcaaatgatctattttatattgaatgtgttgttgtagtttgtgcttttgtaagaattggttcatttcatcgtaatttcaaatatatgtgtagaattgttcatagcattttcttaatatccttttcatgtctttagggtctatagtgatagcttctgtttcacttctgatactggtaatttgtgtgttttctttttactagtcttgctagaggtttgtcagtttcattaattgttacaaataactagtgttttattcccttgattttctttttctttttttttttttcctattttaatttcatcttgcttttggtttgttttgctcttgttctactttctggaggtagaagcttagattactaatttgatttgagactttttttcttttctcatgtaagcatttagtgttataaatttcgctttcagcactgctttagttatacaaactttgatgtgttatattttcatttagttcagtatatttttatttcagaattcatctttggctcagctagaagcatgttgtttaatttccatgcgtttggaggttcccattatttttctgttgtggatttctagttcaattatgttcaggaaatataatctgtatgatttcaattcttttaagtttgttatgctttgttttatgtctcaagtagactggcccttgaagagaatatgtactctgctgttgttgggtggagtgttctataaatactgattagattttgtttttcgatgaggttcttgtatttttctttacttttgctgattttttttttttggctatgtggttatcagtttttgagaggaaggttgaaatctccaactataattgtggatttttctgtttctccttcagttctgtcaggttttgcttctgatattttcagctctgttgtttattatgcacatttagtattgctgtgcccctgtctatccctcataatcttctttgctctgaaatctgttttatctgatactaatataaccactcttgttttattttgattggtgtttgcacggtatatagtttttcatccttttacttcaactcacctatgttgttgtatttgaagtgagtttcttgtagacagcatgtgattgggtcatgttttttgttttattttttatccacttaatttttcttttaaatggtgtatatagaccgtttatatttaatgtaaggcttcagtctaccattttatttttttgttcagttggttctctttcattttattttcttttgtttatgatttctttttcctcccttcctgtgggttagttttatatttttgaaattctattttgattcatctgtagttttttttagtgtttctctttgtatagctttgatagtggttgctgtaggtattacatcatacctatacacacacttattacagtctactggtgtcattttgccagtttaattgatgtgcagaaaccttacctctttatatccttttgattccctttttataatatgactgtctcaagtgtttaaccatatcagtcagtgtaatcattctttcttcaaccatagaatataatttagaaaacacaacagaatgaaattgttgtattgacttatatttattatttgctgttacttctccctaatgtttcagtattcctttttatatcatttgctttgtatttagagaacttattgtagccattcctttttttttaagcagggtcttgctctgtcacccaggctggcatacagtggtgcaatttcagctcactgcagccttgacctcctaggcttaagccatcctcccacctcagcgtcccaagtagctgggactacaggtgggcaccaccacacctggctaatttctgtattttttgtagagatggggttgtaccatattgcccaggctggtcttgaactcctgagctcaagtgatccacctgctttggcctcccaatgtgctgggattacaggcgtgagccaccatgcctggcctagccattctttaacagcaagtccgctggcaacaaatgatttccccttcattcttgaatggtatttcagctggatatagaattctgggttggcaattctttcctttcagtacttgaaaaatatgtgtcactaccttctcgtctccctggtttcttatgagaaacctgctgtttgaattgtttttccccccttagataaggtgtcgtttctctcttctttcaagattatttttctacgtttttggaagatgactgatatattttgtcacgtatttgtttgggtttatcctgtttgtggttcattcagctacttaagctgcaggtttatgtttcttaatacattttggtaattttcagtcattatttctttgaatttcagcccctccttccttctcctcttcttttaggactctaatgacaaaaatattaaatcttttgttatagtcccatgggtacatgagtctcttttccattccatttttctctgttgttcagattaggccatttctgttgtttagtcttcaaaatcaccaaatcttctgttctctgctttctactgaacacattctgagtttttaatttctgttatatttttcagttctaattttttttttttttgagacagggtctcactctcgcccaagctggagtgcagtagcaagatttcagctcactgcacactccaccttccaggttcaagcaattctcatgcctcagccacccaagtagctgggattgcaggcatgcaccaccacacccagctaacttttgtaattttagtacagacggggtttcaccatgttggccagactggtttggaactcctgacctcaagtaatctgcgtgcctttgcctcccaacttgctgggattacaggcctgagctgctgtgcccagcctaaaattttcagttgattctttttttatgtcttcttgtttctttgctgagactgtttgtttcatttgtctcaagtatgttaataattgcttatgaggcatttttataatgactactttaaaaatccttgtcagacaattctaacatctatgtcatctcagtgttggtgtctgttgattgtcttttctcgttgaacttgagatttttctggttcttattatgagaaagttctatttaaactgggcatgttggttactatatcatgagatgctggattttatttaaatcttttggtatagtaggcatcttctgacaaatgttttggcagggcatgagacgccctaccacattgttgccagttgatagtgggagttcagtctcctcactaggcctctactggtattaccttggctgggtggggggacagaggctcaagattacctgtttacttctttccagatggcctccactgacatcacagggggtgactcattagttattattggatggtggtataattccagtaggaagggaaggggttttcttgtaactgctgggtgtgggtggatgtattgtttccctacatggtcttcattgacactgttgggtcacagggaggaccttgtgaaatcagacttgtctgaccccaccctggtagtgccttgttataacttggttacggtagaaaggtgaggattcagctgcattttttgctgtactgtttggttggaattgagtggttatcctaacattttctgtcttgctgtgctgcccctttcctggtcctttggctggagggtaggcttttcttggagatttttttgacagcaccttctggagttcttcagcaaccaatctaggatacatgaggcagaaagaaagtctgtaacagctgggctcggtggctcacacctgtaatcccagcattttgggaagtgaggcaggaggatcacttgagcccaggagttgaagaccagtctgggcaacatagtgagaccctatctccacaaaaattttaaaaattagctgggtgcattagtgcatttctggagtcccagctacttgggaggctgaggtgggaggagtgcttgagcccagcaagtcaaggctgcagtgagctgtgatcatgccattgcactccagtgtgggtgacaattcaagaccctgtcgcaaaaaaaacaagcttttaaaaataaaaaggtagcccatgaaactcagtaccacattatcctttatatcctgagggccctacccatctgcctcatccttctgacttttcagagctgccttctgttccttgtatgtatacaagattggtaatttgggcttcattaaaattaaggacttctgttcaccaaaggtgtgatagttaattttatgtgtcattttgactgcactaagagatgcccatgcagctgataaaacacttctggatatgtctgtgagggtgctcctgaaagggtatttgaattaatagactgagtaaagaagattgccctcatcagtgtgagtgggcatcatcctacccattgagggcctgaatagaccaaaaatgcagaggaagggcaaatttgctctctctttctttgagctgggacatccatcttatcgagcccttggagattggtaatcatggttcttcagccttcagactcagacagactaggacttataccaactgcccccacccacaaccctacccccggattttcaggcctttgaactgggaccaggatttatacgattagctccctggttttgcagcttgtgaacagtacattgtagcacttcacagcttccataatcacagtgaggctaatgccgtaatatgtctacacacacacacacacacacacacacacacacacgcatgtacacacaagttcttaactccttttggttctgtttctctggaaaaccctgactaatacaaacgtcatttcacattaagagtgtaaaggcaagccacaaagttggaraagctatttccaatatatagatataaaaaggtctcatccaggatatataaataactcttaaaaatcaattggataaactagacaacccaatagaaaaatgggcaaaaacttgaacaggactttacaaaagacgatatctgaatggccaataaatgtatgaaagcatggtgatccttattaattatcagagaaattcaagttaaaaatggttttgacaaaagatgcaaaagcaattaaatggagagagcatagccttttcaaaaactggtattgaaacaattagactttcataggccaaaaacaaacctttacttaagccttacccatattttaaaaaatcaagtcaaaaggaatcataaatctaaatgtaaaactattatacttgtataagaaaacagaagaaaatcttctgcatctagggttagtcagagttcttagtcatgatgccaaaggcatataacccattaaataaaaaatcaataattggacttaatcaaaaataaaaacttttgtctgtgaaagactcttagggaaaggaaaagacaacttatagacttggagaaaatatttgcaatttgcatatttaacaaaggactcattcagaatgtataaagaactcagaaagaaaacaacccagttagtaaatgggcaaaggacttgaactgacacttctctgaagaaggctatgcatgtcaaataagcatatgaaaagatagcatcactagccattagggaaatgtaatttaggtgaggctagtggctcaggcctgcaatcccagggctttgggaggctgaggtgagaggatcacttgaggccatgggttcaagaccagcctgggcaacatggtgagaatctgtctttacaaaaaattaaatacaattagctgggcatggtggcacatgtctatagtcataactacttaggaggctgaggaaggaggatcacttgagcccaggaattcgaggttgcagtgagctatgattgtgccactgcactccaacctgggagacagagtgagatcttgtctctaaaaaagaaagaaaatgtaatttaaaaccacatgagttgtcacttcacacctatcagcatggctaaaataaaaaatagtgacaacattaaatgcttgtgaggatatagagaaactagatctatcctacattactagtgggaatataaaataacaaccattctgggaaacaatttggcagtttaaaaaaacaaaactaaacaactaaacatacttgtcatataaccttgcaattacactctcagaaatgtatcccatggaaatgaaaacattttcacataaaaacctaaacacaaatgttcacagcagcttttatttagaatggtcctcaactagaaacaaccaaatgttatttaacatgtgaatggataaacaaattgtggtatatctatgtagtggaatgctgctcagcttactgatccaagcaacaacttatatggatctcatgctaactggaaaatgccattcttgatttgacagaagtataatgatagagaactgatctgtagttgacagggtttagggttaggggaagggcatgaatacgaagggataacacaaggaaggtgtttttttgtgatgacagaacagttctgtatcctgctatggtaatggttatgtgattctacatgcatgataaaattttgtagaactatacatcaaacaaaaaactgatgaaacccaaatgagctctgtacttgagttcataccaacatcaatttcctggttttgacaatgtattgttgttatataagttgtaggttaccattggaagccgagagtgaaggatatatgggagctcgactgctgtaatttttgtgaaccttaaactgtttttgaaaggttataataaaaacaaaaagatagtaccatgagttgtcaaggacctgaacaactggaagcctcatataatgctggtgggaatatgaattggaataactactttatagaacaatttgttcagtttaacagtgcatgtaaataccctatgactcagcaattccactcttagatatgtacctgacagaaatgcttttatcaaaagacacgtataatatggtttataggagcattatgcaaataatgctttatattttaattatgtttgttttgagcatatactttaatactaatacttagtattaagaatatctaaaaaaggtattgggtagtttatctcaatatggacttgcgtattgaagttctttaaggtttcatgtgtgttgtgtgtgtgtgtatgtatgtatgtatgtgtgttttttaacctacatagtttataccattctatatgcttgattcttttgtatagctctatgccatcttttgcttatgtgggatagatattaataactggaataattttggaccagcatttacccatataccttcaagtatgtcctctaatgaaagatgctacagtttattctctgtaatgactatgtgttatagaggtataaagatgaaacttgtcatcataatcccactgaccacagagaaccactattaacattgtgtttatatgttttgtttttaatgcatttgcaattgtatttagtaaggctctatattctgcttttcttccgcataacatagtattttggatttttaatggtaacatagccagagtgtaatttacttctctatgttatacatattgtttaattttcaaccttatgctactgtaaaataacactgtgataaatacattttcttcaaaattggtcaacttttgtgataatttctatagtctgtattcatagatgtgtggtagctccaaattgacataaaacatgaatttagtatctctatttattttataccaggatttttctttagtatataatatgattggtagactaaattgtaaactttttcccatcatttaaatttagagtttctttgcattctagtgtatagtgaatgctataaatgtaattagtatggcattttagtcattaattttctttcatgaaagaaaagaaaaacattttgtgttgattattgagagcttattatattccagggatttttgtcactctgtaagttaccagcaataagcaaattattaaataaattactgtacaatcatccaatgaaatactatgcagctaccaagcatgatgtttaccaagaaatttggggaaatgttcataatacatattgtatatacagttactatcctgactgcaaaatttaaaaagtatatatttagaaaaaaagaaaactgtaggaaatatatcatgatttgaatggaggttgtttctggggagtggaactgagtaattcttttccttagagttgtttttattttcaaaaagtgtttatccaatctttttcaaattaaattttcattaatatcaaagtaatatatttacatatttttaaaaaacagatagttttacaaggcttcaaataaaaaccagtcccgtgaccaaacctctttctacctgtgatttctactttctggaggtaaccaatttcaactcttggcaattcttacttacttacatacatcctttctaaagtgtaaggtagtaatttaccacaagcacaggcacacttttcctcattcgttttcccagtataatttttcataatatttgcctaaattaatttgcagtattttctttattgtggctacgtaaatatttgtaagccacttgaatactgtgattgtttttcctttttcgtgtacttgtttattatattttgctgaagtattcattcgtttttaccatttgcttagttttctatatacctatcaccaattcattcctaaattatcctgtagaaatattgtaaatcctggccaggcatggtagcacatgtctgtaatcccagcactttgggaggccgaggtgggcagattaccttaggtcaggagttcaagaccagcctggccaacatggtgaaaccctatctctactaaaaatacaaaaattaaccaggcatggtggtgttcctgtaatcccagctgctcaggaggctgaggcaggagaatcacttgaacctgggaggcagaggttgcagtgagtcgagattgcgccattgcactcccgcctgggtgacagagtgagtctccgtctcaaaaaaaaaaaaaaaaaaaaaaaaagggaaagaaagaaagaaaccttataaatgcttgtgttccaacaaatcaggtaatctatcagtttctttttttttttctttagacacccttcctggagccccgtgtctgtcttcttgcttctgttttatctacctcagtaccttgcatctgtctaacgcctctccttacattctttatgctgtattataaatgttgagtcacccctacatattcacctacttttgcattttccttcattttgatgtacttagtgcccctagctgtacccaatacaatatagactttcaggttacatataaattctctaaatttattcagaaatctgtagataaaaccttgactacattgtaaatatttgatttttcatttcatctttattcttaaatcagacgattttattttccaacaataggattcttcctgggcatatgtattatcatcctgactccttagataatatattattttcttcagtaagtaagaaatgaattctctgaactcttgatagttaaaaaaaaactaagtatcaaaaagtcatattgtaattaaaatatttgtaaagtactaattactgaagcatttattctatattttcattttcagaggacgattatttatcatttctactaaagcaggatctctaggaattaatctggtagctgctaatcgagtaattatattcgacgcttcttggaatccatcttatgacatccagagtatattcagagtttatcgctttggacaaactaagcctgtttatgtatataggttcttagctcaggtaggtttataattctmtttttcatattgaaagtttatgtgaaactgataatattttagagatatggaacatatgtgtattacagagagggaaacaaagttggaaataccatttctgtacataaagcagcagaagtcagttttggcttttcttgattttctgttttgtagtgtatccatttctgtgatgtcatctttctcaggttgagattgttttgcatgaacacatttagcagatgctacccccagcagatgcaacccctctcagcctgcctccaaatctgggcttcttaaccagaaactgggttttttttggtagatccttgcttatttgatcttctttagtacataagttgattgacaactttatgtaaactctttcctgttatttgtttatttattcaattttcttttatttttttctttcctgttaagtttaaaacttctgtacattctcatttataatttgtattatatttaatatacatttaatataatgtatacatttaattaatgtagtttatatgtaatggatatggtattttatatttgttttctgtcttgaaattatagaaaataaaacgatataaaggcattttatggtgtttgttgatagcttattatattacattgaaaaggaatcaaactgctctcttgcattctaacttcaatatttacctaaatgttttttgtgtctgtccctttatttctgtttactctggtatctgcctgctgtcctcctcctacagagtacagaaataaataaagcaacacttgaatgcattttggtcagttaatatagaataattatcagtaatgtaattttatttattatggtaaactatgctaaacagatgaaatctttcatgaattaagcaaaattgctgatgagtttttctttatggcaatmtactaccataaagttttaccatttcatattaaccagtaaccgtatttatccttgattaagtttcatgcttacaaaattttatttttttgtatattcttccttctttttacaaagggaaccatggaagataagatttatgatcggcaagtaactaagcagtcactgtcttttcgagttgttgatcagcagcaggtggagcgtcattttactatgaatgagcttactgaactttatacttttgagccagacttattagatgaccctaattcagaaaagaagaagaagagggatactcccatgctgccaaaggtaaacatatttagattattggcttaacaaaccaacgtggactaaggaaattttactactgatatcaaatttagtcatctgattaaggctatatttcagaatttttcaaggataataaaatgatatttaatgaattttgtctagaaaattataaatgatagggtgcttgatctgttctccatatagcaccacaaaaagatagtatattctgaaacacatattttatgccacatataatatatctaattagcatattttctaatatactttacacttcaacttttataagaagtagcagacaaattttccaattagaaaaggggaaattacttcgaatttattcatatggtgaatttcgggttgcaggaaaccagttaattttataaacgtgtattatttgctgactttgagaggtatactgtgagagaatactaagaaaaacaagacattgttcagattatctccctcaatccagcagctgaaaagcagatagtcctgttttcattttcaagatgaggaaactgaggttcagagaggctaggtaacttacccaagtttacacaccatattgtaaagctggtcttcaaatcatatctgaccaactcaaaagcattactcttaatcattataattttttgtcctccaaatggagattagaaagttattttcaaatacaagaagcaaagcagaggacctgggatttccagaattgaatgacatttaggatgctttattttagtttaaataaatctggactttaaaatatagaatgctttcacagtcagtaatattgtgtgatataactgttaagatggtataatatagtcagtttagcttatgtcttgtgaaggttaaatactcctcaaatttatggaaaactttaaggtttacaaaggcctgtctcatatacattatctcaggaagctgagatttagagtttgtgattacacaagggtacatgaccagtaagtgttacagctagaatttgaacccagtagttttctttctctcttctcccctccccctctctcccccacccccacctccctcctcccctctctccctctccctcttcccctctctccctctccctcttcccctctctccctctccctcttcccctctctccctctccctcttcccctctctccctcttcccctctctccctctccctctctccctctctccctctctccctctctccctctctccctctctccctctctccctttccccctctccctctccctctccttctacctctttttgagacagtctcactgtgtcgcccaggctggagtgcagtggcgcaatctcagctcactgcaacctccacctcctgggttcaagcgattctcctgcctcagcctcccaagtagctaggactataggcgcctgccaccacgcccagcaatttttttttctatttttagtagagatggggttttactatgttggccaggttggtcttgaactcctgaccttgtgatccacccacctcagcctcccaaagtgctgggattacaggtgtgagccaccgcgcctggtccttttttttgttcttttttcttttttactttaagttctgttatacgtgtgctgaacatgcagtttgttacataggtatacatgtgccatggtggtttgctgcacctatcaacccgtcatctaggttttaagccctgcatacattaggtatttgtcctaatgttctccctcccctttccccccaccccctgacaggccccagtgggtgatgtaaccctccccatgtccatatgttctcattgttcaactgccacttatgagtgagaacatgcagtgtttggttttctgttcttgtgttagtttgctgaggatgatggtttccagcttcatccatgtccctgcaaaggacttgaactcattctttttatggctgcatagtattccttggtgtgtatgtgccacattttctttatccagtctgtcattgatgggcatttgggttggttccaggtctttgctattgtaaatagtgctgtgataaacatacgtgtgcatgtgtctttatagtagaatgatttataatcctttgggtatatacccagtaatgagattgctgagtcaaatggtatttctggttctagatccttgaggaatcgccacactgtcttccataatggttgaactaacactcccaccaacagtgtaaaagcgttcctatttctccacatcctcaccagcatctgttgtttcctgacttatttaatgatcattattctaactggtgtgagatggcatctcattgtgaacccagtcgttttcaaactgtgttacaaggaaccccaggagatgctttagggactgctaccatgtggctaagcaagtacagaggggccaggcaatgaacactctgatcccgacatcccatttcagtcagagcccctcttttatctttttaatgtattggacttcaacataagatttaattcaaagagaggacgtgcctgctttttaaaaaaaagtttttaaaacacaatgccatgttgcctttctatcacagtaactaaaaactgtgagagatctatccaggaagtacaatcagatacctgaaggagctgataatccggttggggagaaaaaagtaacattcttaaaagggaaagaatgaagtgctgatgtgactggtgctgagtatctttgcttataataggggaaggatggagcattcagatacaattttgatgggagaaaaatcagacttggttggcctataaaagatggttagtatttaattggataaagggaagaatcaagtgtgaatgagagattgaacagtttgggcaaagggacagaggtaagaatttatgtaccaggcttaagggatgatgaaattggcctggcattgatgaagagtggaggttagataagtaggaaagccatgaaaggcaaatggaggcattgcgctttaaaataatgtttactataagttcttgaatgggactgttgtatgatgaatctgggcttttagaaaattagcctggagtgattattgtgggctcgatcagacatttcatgaaaataaatggtagaactcaactgataatagactagcttttaaagggataggcagcgaaaatgttttttttttctttgagacagagtctcactctgttgcccaggctggagtgcagcggcatgatctcggctcactgcagcctccgcctcctgggttcaaatgattcttgtgcctcggcttcccgagtagctgaggttatagacatgtgccaccacacccagctaatttttatatttttagtagagatggggtttcaccatgttggccaggctggtctcaaactcccgacctcagatgattcacctgccttggcctcccaaaatgctgggattgcaggtatgagctaccttgcccagccaaaaaattttatcttaaataatgaagcttagttattcattcattgatttaaactttttggggtgcctatgatatgccaattgtactggtctctaaggatacactcataaataagtctaggattctgttcccaagaagctatagtcttaaaagcttaccttaagcaagtaatatagtaagagttacagatcctataatagaaatctgtgcaggtgccaaggaaggaatattcatttctttcttggaaagtttgggatggatattgatgtgcttgaacagatgttgaaagtagaactgggtaactgtttgcattgctaagacggcagaagagcaaaaggcctttcaagatggggaatagaaaaaaagaagcacatgcataacatggcatgataagtttgaagaacctcaagtagttaaaaataaataagagtataaggagatactggtagagtaagggtgagtgtgggaagaggtaaaagtaaagactggaaaggtaggtgggaatcaaatcatagaaattagtttgtaagttgtgttataggttgtggtatctatttaacaattttaagcaagagactaccgtcacattttcattttagaaaaaaatcattttatgtatcagtgtggaggatggatcagagaaaagaaaatggatattaagatacttgttaggatgctactaaaatgattcaggtgggagaggtaatacaggcctgatatgagatgttagcagtggagacagagaagtactgggcataatatagatactcagtaattattaatgttcccttgatttataattagaatttcatgtaagatttccactagtttaatagaatttgaaaactggtcatctgaaatgggtacgttttgatattcatggcgagggatttcttggtacgtttggatattcatggtgatggattttttggtatttgaagctgcttttattcaaggtattttgaagttggttcctgttattatagtacaattgcaaacaccttccttcttgtccatgatttttaagatgaaagactgctaaaaatgatacattttcatcctttcaattgctgttatctaagtaataattaaattccatgcttttatgaggtttttttgtcttttggtagtcccgaaagcacttctttttaacttacttgatatgtgattactgtatctctttctgcttcatcacttcctccttaggtcattattacttaattcctgttcctccatttctcttcttgttcagtttttacttctctacttctaatttgatttaatacctcagacttaattagccacctgactatttttcttgtctttgtacctctttaaaggcaagaactgcattctgtgcttccttcagtatccttagtgaataatgcaatgcttggcacttttttattattattatactttaagttctggggtacatgtacacaacgtgcaggtttgttacatatgtatacgtgtgccatgttggtgtgctgcacccattaactcgtcgtctaggttaggtatatctcctaatgctatccctcccccctccccccaccccatgacaggccctggtatgtgatgttctccttcctgtgtccaagtgttctcattgttcaattcccacctatgagtgagaacatggggtgtttggttttctatccttgcaatagtttgctgagaatgatggtttccagcttcatccatgtccctacaaaggacaggaactcatcattttttatggctgcatagtattccatggtgtatatgtgccacattttcttaatccagtctatcattggtgggcatttgggttggttccaagtctttgctattgtgaatagtaaacatacatgcscatgtgtttttctagcagcatgatttataatcctttgggtatatacccagtaatgggattgctgggtcaaatggtatttctagttctggatccttgaggaatcgccacactgtcttccacaatggttgaactagtttacagtcccaccaacagtgtaaaagtgttcctatttctccacatcctctccagcacctgttgtttcctgactttttgatgattgccattccaactggtatgagatggtatctcattgtggttttgatttgcatttgtctgatgaccagtgatgatgagcattttttcatgtgtctgttggctgcataaatgtcttcttttgagaagtgtctgttcatacccttcactcacttgttgacggggttgtttgtttgttttcttgtaaatatgtttgagttcattgtagattctggttattagccctttgtcagatgggtagattgcaaaaattttctcccattctataggttgcccattcactctgatggtagtttcttttgctgtgcggaggctctttagtttaattagatcccatttgtcaattttggcttttgttgccattgcttttggtgtcttagacatgaagtccttgcccatgcctatttcctgaatggtattgcctaggttttcttctagggattttatggttttaggtctaccatttaagtctttaatccatcttgaattaatttttgtataaggcgtaaggaagggatccagttccagctttctacatatggctagccagttttcccagcacaccatttattaaacagggaatcctttccccatttcttgtttttgtcaggtttgtcaaagatcagatggttgtagatgtgtgatattgtttccgagggctctattctgttccattggtctatatctctgttttggtaccagtaccatgctgttttggttactatagccttgtagtatagtttgaagtcaggtagcgtgatgcctcccgctttgttcttttggcttaggattgacttggcaatgcggggtcttttttggttccatatgaactttaaagtagttttttccaattctgtgaagaaagtcattggtagcttgatggggatggcattgaatctttaaattaccttgggcagtgtggccattttcatgatattgattcttcctatccatgagcatggaatgttcttccatttgtttgtgtcctcttttatttcattgagcagtggtttgtagttctccttgaagaggtccttcacatcccttgtaagttggattcctaggtattttattctctttgaagcaactgagaatgggagttcactcatgatttggctctctgtttgtctcttattagtgtataggaatgcttgtgatttttgcacattgattttgtatcctggactttgctgaagttgtttatcagcttaaggagattttgggctgagacaatggggttttctagatatacagtcatgtcatctgcaaacagggacaatttgacttcctcttttcctaattgaataccctttatttctttctcctgcctgattgccctggccagaacttccaacactatgttgaataggagtggtgagagagggcatccctgtcttgtgccagttttcaaagggaatacttccagtttttgcccattcagtatgatattggctgtgggtatgtcataaatagctcttattattttgagatacgtcccatcaatacctaatttattgagagtttttagcatgaaggttgttgaattttgtcaaaggccttttctgcatctattgagataatcatgtggtttttgtctttgcttctgtttatatgctggattacgtttattgatttgcatatgttgaaccagccttgcatcccagggatgaagcccacttgatcatggtggataattgcttggcacttttatctagacttttttgaaattctagttgtctttatagtgttccttagtgatccatatatcattgaaaagcagtgttggaattagacttacttttcaagcagtaaaattgagatgaagattggttagtctgtcacagtgggtttgtggaaggaagagaattcgagctttaatttatatcttcagttagattcttaatttgctatcttagcttcattcaccactctactcattactttattatttttattttattttatttcatttcatttcatttcatttcatttcatttttgagacaaggtctcgttctattgcctaggctggtcctgaactcctggcatcatgtgatcctcctgccttggcctcccaaagtgttaggattacaggcatgagccactatgcctgtccactttattattttaaatcccctcattggattcttactgttgctgcttttcccttttggaaatataatagccttgacrtcctgtgaacctattttttaataagttgatttaagggcctcctgaatcatctctaccaagtatctgtgcatctttttagttgttcaggataatgtttctcagccattttgaaactgtagcatgatctagacttataagtagtttaacacaagtttctagcaataccgatttgttaacttattcttaatggcttgtgtttaaaatgttaaattaatagctaacctctgttaacgtttatgtaaatgttaaattgatagctaacctgttaacatttatgtaaattatgttagagaaagtaccttttctggtaataaacttattaattatacagatatcagagatgaaaattttggtcaaggtcatgttttattttattttgagacagtctcactctgtcacccaggatggagtgcagtgctgcaatctcagttcactgcaacctccgcctctggggttcaagtgattctcgtgcctcagccacctgagtagctgggattacaggcatgcgccaccacgcctggctaatttttgtatttttcatagagatgggctttctccatgttggccaggctggtctcgaactcctggcctcaagtgatcgacccacctcggtctcctaaagtgctgggattacaggcatgagtcaccacctgcagccaaggttatattttataatatgcttaagtgggtgttttgttcctcttaagtacagtatacacagcctactctgtaccttttattaagaaaacaaaagccaataaaactggcatagaaatgtttttatacttcccttttccagcactggactacgtatgtctttttaaatgtgaactacttgatgattacagggagaacaaaatggggatttaaattaaagtatcttaagtgaggctttaggtttgttttctctacgctgaatttgtgtgcagtgttctcccctttctttagtcctgtattcaaactttaatacttcaaagcataatttactgaacagagatgttattgtacagttttattagccggcagatggtaatataaggtttcaccttagtcattcttaataccagtgtgaaatacattccattaaaataatttgatgtaaagtatgaaatagctaatccacttatttcaggaactttctggtaacctgcctacatttacttttgagaataaaggttcaaaataacacatttaattgtagagcaagtgttagtagcctatggggtatgaaccacatggtggtatgtgaacctaatatttgttgtcatattcttctaggaagccatgctcataattgaagcatatataaggtttgatgtcattgtctcctacttctttgccttttttttaatcacaggttttggatttttttgtttaataaaacaagtttgaatattattcctatctttgtatttactagtataaaatgattgttattcatctgkatatgaatagaccaccagaaaaaataacgggcatcagaaaaattgtttgaattctaccatttctttgcagattacaaaagtgtcctattcgttttttgttggggtgattgatgccaagtaaaaagagcagcttgtttaagccctctcctaaataacttgccaaccacccttttcagatgtaatcttaggcaaaccatgtaagctttctaagcctcatttttctgaagaaaataagaatagtgccagtacttctctcacaaaggaggtaattcatgtaaacatactacctagcacatagtaagtgttcaaatgttagctgctgtttttgtttccataattgttattaatattaccattatagtaggttcatttctctgaaatacttatggacttacatttttggaatttcagaggagtcatgtgaggtcctgatcctgagtagaaaattaagcttgatatatgacagaccagtagaaaactaaaaacatttaggagccagaggagatcatctcagctaagctgcagaagacataggtatttgaggcttgcattcccccagagatcagttgtaatcaggaaggaatatattagatattgatcttcactttcaataaagttagcatgcagttgacaaagaacattgaaaggggttttttttcttaaataatataagcaactttagaataaagtctaccttatagccagctgatgcttctgtagtaattttccaaagtaaagagatgcttctattttccctccacaaactacacaataaatacttgttaacagactgaccatactttatttatagtgctgttttgtcttattttttattgtaccaccttatgacacaagaaaaactattaaggagccatttaccaagtcttttagggaaaacatttgggttacagaaaccatggagccaatgataccctgagatggcagcctccctaacgctggcaagctgtcttataaataattgtccatggaaacatcaatgtagataaggcagccttrctggcagtgttggggtggagggcagagttggggatggtatgcaagattctattggggagagtttaggatagactttaaaaagtgtctccttatggagagttggaagtactagaaatatttgctgcttaaggtcatagaaatcctgaaatttaaaataccaggtttgcatttaataaaygctcatttaataaatgaattaaatggtaagcttttttactttataggcaaattaaaatatctattctctctagaatatgaacttcctattagcctaggaaggcaagaactatattaatgcatcttcatcactctatccccaatacctggcataatacataatatagcacatagcaagtattcaataaaaatgtgctatgtgaacaaatgaatttttgtgctaaaattgcaagctaaatgttgtgaggcaatagttgacatgcctttgaaatagtgtttttccttgtgtgtacttcttggagaatcacctggtggcttgattaaaaatgcagattcctagtcggacacagtggcacacacctctaatctcagcactttgggaggccaaggtgggaggattgcttgaatccaggagttcaggatcagcctggtcaacgtggcaagactctgtctctacaaaaaattagccaggcttggtggcatgcacctgtagtctcagctgttttggagactgagttgggaggatcccttgaacctaggaggtcgaggctgcagtgagcaagtttgtaccactacactccagcctgggtgacagagtgagaccctgtctcaaaaaaaaaaaaatgcagattcctggcttcatctaagacctactgaatcagaatttctggaggtaggccttgggaatctatttttgacaaggtctaccactcttgtgtgtacaaggtatgtagtagtataatttgcctttacaatagttatcagctaaacctttgaattaaaaaaacaaacagtatctaagctttattgagcaatgtttatgccaggaactgtgctaaggattttactagcattaccttatttaatccttacaaagcaggtacaattttttctattttctgatgaaattatggcatggaaagtggtggcaccggggcttgaactcagtgctgtgactccagactccacactctttaaccattacactatactatcctgacattaatattctatatgattaagcttgcggagaagtaaattgaggtttgatatgactttacaccgttttaatcaatactgtgggtttatggaaaggcacagtgttatcaaggtgtataatattggggagggtatggatttcatctagttactacacaatcttacagtgtcagagctgatcctagtcctccttgattgtctttggtgctgaacttactgatccttagccctaagtcagtgtagcagagtggttaaggacaggggtcctggggcaagaccagggtttgaatctttatcttagtcaaaatatctgacttctatgcctcagttttttcattatacttctgagaaatgtatgtccattagttcttcaaaaatatcatcctttgcatttttatttttgtctctttctgagactgttactatctgaatgcctgctcttctagcctccatatcttttagcttttcttttgcattcctatttctttattctttcttactatcttctggaagagtatctcagtcttatctcctaattcactaagatattcaactgtaccccgcttgctgtttatactgagttattttttcaactgttatttttttttcctaatatttcatttagactcttaaatttgtttgaattccatattggtaatatcttcctttatttcatctgtttcagtaactatgttttagataaaatatgatgccagttgttaccccagggatgtctgtgtgtgtgtacatgcacatatgcacacattgtctataagtttctggaattcatattgccttttcccttctatagtttctgcagagttggttttgagggcaggagctagcagctcatgctggtttgccatgggagtagtttcgtccataatatggggatgatgattatatgtgcttcatagagttattatgaaaaattaaatgaagttcttagaacagtgctggtatgcagccatgcattcagtttagctttaaacaaatctacagatggctaagtttccagatcccaactttcgaatatactcttttgaaaagctagattatggttttgatttgcatttctctgatggccagtgatgatgagcattttttcatgtgttttttggctgcataaatgtcttcttttgagaagtgtctgttcatgtcctttgcccactttttgatggggttgtttgtttttttcttgtaaatttgtttgagttcattgtagattctggatattagccctttgtcagatgagtaggtttattcacgatagcaaagacttggaaccaacccaaatgtccaacaatgatggactggattaagaaaatgtggcacatatacaccatggaatactatgcagccataaaaaatgatgagttcatgtcctttgtagggacatgggtgaaattggaaatcatcattctcagtaaactatcgcaagaacaaaaaaccagacaccgcatattctcactcataggtggaaattgaacaatgagatcacatggacacaggaaggggaatatcacactctggggactgttgtggggtggagggaggggggagggatagcattgggagatatacctaatgctagatgacgagttagtgggtgcagcgcaccagcatggcacacgtatacatatgtaactaacctgcacaatgtgcacatgtacgctaaaacttaaagtataataataaaaaaaaagaaaaagaaaagctagattatagagctaatcagaagggggaagggtactgaccctctcttttagagtttgagctgtcccaggattctgccatatattctaatgttttctgtctctcttgttgcaaggaaaatatgaaaaaaattgttaattaattttcaaaaattcccattgtgaacatattcaaaccagaaaaatatattcatatacccatccgctagatttaccaattattgttttgccacatttgcctcatctatttttctgaaatcttttaaattacaagtatatggcatttcacttgtaaatacttcagtatataatacatctttgaaatagtaagacatttcttatataattacaataccataaaatgaataacttcctaattccctaacaccatctcataacacatccatattttgattaccccgcttgtgtccaatatatatatatatatttaatattctaagttctggggtacatgtgcagaaagtacagttttgttacatagttatacacatgccatagtggtttgctatacccatcaacccgtcacctacattagatatttctcctaatgctatccctcccctagatccccacccctcaacaggccccagtgtgtgatattcccctccttgtgtccatgtgttctcattgttcacctcccgcttatgagcgagaacatgtggtgtttgattttctgttcttgtgtcagtttgcagagaatgatggtttccagtttcatccatgtccctgcaaaggacatgaactcgttcttttttatggccgcatagtattccatggtgtatatatgccacgttttctttattcagtctgtcattgatgggcatttgagttggttccaagtcttcgctattgtgaatagtgccgcaataaacatatgtgtgcatgtatctttatagtagaatgatttataatcctttgggtatatacccagtaatgggatcgctgagtcaaaatggtatttctggttctagatccttgaggaatcgccacattgtcttccataatggttgaactaatttacactcccaccaacagtgtaaaagcattcctatttctccacatcctctccagcacctgttgtttcctgactttttaaagatcgccattctaactggcatgagatggtatttcattgtggttttgatttgcatttctctaatgagcagtaatgatgagtattttttcatgtctgttggctgcatatatgtcttcttctgagaagtgtctgttcatatactttgcccactttttgatagggttgtttttttcttgtaaatttgtttaaattctttgtagattccggatattagccctttgtcagatgagtagattgcaaaaattttctcctgttctgtaggttgcctgttcactctgatggtagtttcttttgctgtgcagaagctctttagtttaattacatcccatttatcaattttggcttttgttgccattgcttttggttttttagacatgaagtctttgcccatgtcctgaatggtattgcctaggttttcttctaggatttttatggttttaggtcttatgtttaagtctttaatccatattgacttaatttttgtataaggtgtaaggaaggggtccagtttcagttttctgcatatggccaaccagttttcccaacaccatttattaaatagggagtcctttccccattgcttctttgtgtcaggtttgtcaaagatcagatggttgtagatgtgtggtgttatttctgaggcctctgttttgttccattggtctatatatctgttttggtaccagtaccatgctgttttggttactggagcattgtggtatagtttgaagtcaggtagcatgatgcctccagctttgttctttttgcttagaattgtcttggctttgcaggctcttttctggttccatttgaagtttagagtagttttttccaattctgtgaataaagtcagtggtagcttgatggggacagcattgaatctataaattactttggtcagtatggccattttcacgatattgattcttcctatctttcagcatggaatgtttttccatttgtttgtgtcctctctttatttccttgaacagtggtttgtagttctccttgaagaggtctttcacatcccttgtaagttgtattcctaggtattttattctcttagtagtaattgtgaatgggacttcactcatgatttggctctatgtttgtctgttattggtgtatagaaatgcttgtgatttttgcacattgattttgtattctgggactttgctgaagttgcttatcagcttaaggagattttgggctgaggcgatggggttttctaaatatacaatcatgttgtctgcaaacagacaatttgactttctcttttcctatttgaataccctttatttctttctcttgcctgattgccttggccagatcttccaatactatgttgaataggagtgatgagagagggcatccttgtcttgtgctggttttcaaagggaatgcattcagtttttgcccattcagtatgatattggctgtgggtttgtcataaatagctcttattattttgagatacgttccatcagtacctaatttattgagaatttttatcatgaagggttgttgacttttgtcgaaggtcttttctgcatctattgagataatcatatggtttttgtcattggttctgtttatatgctagattacatttattcatttgagtatgttgaactagccatgtattgcagggatgaagccgacttgattgtggtggataagctttttgatgtgctgctggattcggtttgccagtattttattgaggatttcatggatgttcatcagggatattggcctgaaattttctttattttgttgtgtctctgccaggttttggtattcaggaggatgctggcctcataaaatgagttagggaggattccctctttttctattgattggaatagtttcagaaggaatggtatcagctcctctttgtacctctggtagaattcagctgtgaatccatctggtcctggacttccttttgtttgtgggctattaattactgcctcagtttcagaacttgttattagtctattcacagattcgacttcttcccggtttagacttgggagggtgcatgtgtccaggaattcatccatttcttctagattttctagtttatttgcaccaaggtgtttttagtattctctgatgttagtttgtatttctgtgggatcagtggtgatatcccctttatcattttttattgcgtctatttgattcttctctcctttcttctttatcagtctggctagcggtctatctattttgttgatcttttcaaacaaccagctcctggattcattgattttttttgaaggtttttttatgtctctatctccttcagctcttctctgatcttagttatttcttgtcttctgctagcttttgaatatgttgctcttgcttctctagttcttttaattgtgatgttagagtgttgattttagatctttcctgctgtctcttgtgggcatttagtgctataaatttccctctacaggctgctttaaatgtgtcccagagattttgatacgttgtatctttgttctcattggtttcaaagaacttctttatttctgccttaattttgttatttacccagtagtcattcaggaggaggttgttcagtttccatgtagttgtgcagttttgagtgagtttcttaatctcgagttctgatttgattgcgctgtgttctgagagactgtttgttatgatttccattcttttgcatttgctgaggagtgttttacttccaattatgtggtcaattttagaataagtgcaaggagttgctgagaagaatgcattgttctgttgatttagggtggagagttctgtagatatcttttaggtccatttggtccagagctgagttcaagtcctgaatatccttgttaattttctctcattgatctgtctcatattgacagtggggtgttaaagtctcccactattattgtgtgggagtctgagtctctttgtaggcctctaagaacttgctttatgaatctgggtgctcttgtattgggtgcatatatatttaggatagttagctctttttggtgcattgatccttttaccattatgtaatgcccttctttgtctcttttgatctttgttggttttaaagtctgttttatccgagattagcattgcaactcctgcttttttttgctttccatttgcttggtaaatattcctctatctctttgttttgagcctatgagtgtctttgcaagtgagatgggtctcttgaatacagcacaccaatgggtcttgattctatccaatttgccagtctgtgccttttaagtgggggaatttagcccatttacatttaaggttaatattgttatgtttgaatttgatcctgtcattatgattctagctggttattttgcccattagttgatgcagtttcttcatagcgttgatggtctttacaatttggcatgtttttgcagtgtcttatactggttgttcctttccatgtttagtgcttccttcaggagctcttacaaggcaggcctggtggtgacaaaatctctcagcatttgcttgtctgtaaaggaatttatttctccttcgcttataaagcttagtttagctggatatgaaattctgggttgaatattcttttctttaagaatgttgaatattggcccccattctcttctggcttgtaggatttctgcagagagatctgctgttagtctgtggtggtcgtttctgtttgttatgtctcttttttttttagcgtattcattttctcaccctccattctggatttgtttgattatttcctggcggtgtttgaacttattctacctcttatatgttctacctcttatatatcctgtacactagaaatcagaaattagatgtaaaggcttgattagatttatgacatacatttttggcaagaatgtcttaggaatgacatgtaaaaaggggttaatatttttttaaaaaccagtatgggaaagggagtaatatatatattgagtgcttatactatctacttttaaatacattgtctcatttactccttacaatagctctgagctatagatgatattattcctttgtagtaaaggatcgcccaactattaaggagcaaagtggccaggtgcagtggctcatgcctgtaatcccagcactttaggaggccgaggcaggcggatcacgaggtcaagagatcgagaccattctggccaacatggtgaaaccctgtctctactaaaagtagaaaaattagctgggcttggtggtgctcacctgtagtcccagctactcgggaggctgaggcagtagaattgcttgaacccaggagatggaggttgcagtgagctgcgattgcgccactgcactccagcctggcgacagagtgagactctgtatcaaaaaaaaaaaaaaaaaatggagcaaagttagcattcagaaagagaagaaaataaatccaacaaggccctttacctttacttaaacttaaaaattactaacaaatcacttaatgtctgcgcctcagtctctggtaaagtaagagcagcaaattaacttacttccaaagtttcttatagttccaacattatttgatcctcacaattgctcaggctactgtgtttttcattttaggtaatgagaggtgttctttatgcatcagctaacttttttaatttaaaaatttctttatttttatagatttagggagtacaagtgcattgtttttaaacagatatattgcacagtggtgaagtctgggtttttagcgtaaccatcacctgaatagtgttaattgtacacaatacgtaatttcttatccctcatctccctcctaccctcccaccttttggagtctctagtgtctattattccattctgtttgtccctgtgtgcacattgtttagcccccacttataagtgagaatatgtagtatttgactttgtatttctgagttatttccttaagataatggcctctctagttccatcaatgttgtggcaaaagacatgatttcatttatttttatgtctgagtagtattccatggtgtgtgtgtgtgtgtgtgtgtgtgtgtgtgtgtgtgtttgtgtgtgtatacacacatttccttttttatccttcagcttttaagttcgggggcacatgtgcaagatgtgcagatttacatgggtaaacgtgtgccatggtggtttgctgtacagatcacctcaacacctaagtattaagcccagcatctattagctattcttcctgatgctctccctcccctcaaccctcaccccgacagtccctagcgtgtgttgttcccttcaacgtgttcatgtgttctcatcattcagctcccacttataagtgagaacatgcacataccacattttctttatccagtcatccattggtggacacttaggctgattccgtgactttgctattgtgtatctgctaagtttttaaaaatacatatatatatattcaggacaggtaataactattggtctttccaaagttatgacagccatatgtctaggattttcttggacaactccaatatcagataatttgtcctgtcaaacatctcaattttttattagaaaaacttggttagggtgtaaaacacctctgtatagaaatatgttttttttttaagagatagagtctcactatgttgcccaggctggtcttgaactcctcagcccaagcaatcctcccgcttcagcctcccaagttgctgaatctacaggcgtgcaccaccatgccaggctcttttctttctttttttttctttttaaggtgagggtcagctttcacactattagaaaaggtgttagaaataatagaaagtggtaaataacaccagtagagttctcccagaagccagccaagagaagagagtattttgatgaagagagtgattaaattctgtcacatgttactgatgagtaagataggatcaggtctgataattgaccaattagatttagtgacacaaaggtcattggtaaaccaggcactgtactcagcacttcatgtgtagtatttaatctccacaataatcccatgaagtagatgcttagtagcccattttatataccagaagactgagggttcagcaagttaacttgctcaaggacaaagggctaataagtggtggaactaggattaaaatctgcttgagactcactgttcaatacaagagccactagctccatatggctacttacatttacattaaaattaagttaaaaaatcagtttctccatcacattagtcacacttcagatactcagtagtcacatgtggcttgtagctactgtcttggatagtgcaaacacagaacatttccatcgttgcagagagtactattagagagcagtattccagagcctgtgatcttaatcactacacctaaagcctcccagttgacaaagttaccacctttttttggtgtgtgtgcacgtgcgtgtgtgtgtgtgtaagtatatataatttaaatcattccattaaatttacctctgaaattcaaaagactgaaacagatcttctttttatcaaataagttgattgcagagattatattggtgtttacatttcaggcaacctgctcatgaaattatccattgtagagagaaacctgggaaacaaagctatacgtcctttaatttttttccccattttcatttaaagttcagaagaacawaatatgttggaatgatcaatgattctgaattaatatagatatttgaatgtcacagtatctgtatattaatatcctaaagtggtgttactatattggttaggttgactgattcatacatgtaagtcttttaacactcctggagtaagagtagcaagaaactgaagctrtgatccttttaagggtttaagtaggtgaatacctcacttttgtctcttccattactagtgttttcatgaccaagttttttacatcagatttattattttggacccttaaaggaatataaattgcaagagagattttgatcagtgtaagaattactagatggccttatttatttccttctttattattgtacttcttatcttttattaatgttttctttctctaagatatatttgaaagccaggcatggtgacacacccctgtagttccagctactcaggagactgaggcaggaggattgtttgagctcaggggttcgaggctatgtagtacataatcacacctatgactagccactgcattccagcctgggtaacatagcgagcccctgtctcttaaaaaacaaaagatgtggccaggcatggtggctcacacctgtaatcccagcactttgggaggctgaggtgggcggatcacttgaggtcaggggttcaagaccagcctggacaacatggtaaaaccctgtatctacaaaaatacaaaaaaaaaaaaacacaaaaaaattagccaggcatgtggtggtggcaggcgcctgtaatcccagctacttgggaggctgagccaagataattgcttgtacccaggaggcagaggttgcaatgagctgagattgcgccactgcactccagcctgggtgacagagtgagactctgtctcaaaaaaaaaagacataatttaaactgctaaatagctgctttcattcctatttcatatcttctgtttcctttttacattgtacctataattgagttagagaatgtaacaatgtttgtgaaatgttaactcaagattgtgtagaatgaaaattgagtttcgattcaggctatacttggaaagctgcaacctctagaatgtcactgcagtcatataaaatctagaatgatgactttctacctcacagtggcatgtggcatatgtaatagttgtaatggatatccaatttttaaaggtaaattgctaaatatagtatctagttctttaagtgttaaggagaaaacattcttatcaaaggaggcttttaccttccacctaagtcattttggcaggcctgccttttctttcatttaaagtgataagttctgtagttgtcactatcttattcataccaacaatttgggaatctggatatatttataaatgctctttggcaaaggttatgtgctcgtgaccaaaaaatctgatacaaggtgttatgtgaatttcattcaataagctctctagttacttatcaaattcactgcattttttccagcgtagtttgggaagaaagaaccttcaaatttgaaagtagaggctttttgaccaggaatattaaatttctttactaagaagctagatttatttaagcaakaaaaggaatttttcatagctttttgagtgggtcatgtggcagttaagtattctggtgattttatttccagatattacaaaactcaaattgaaagtaatggcaagcaaaatatttttgaaacrtggcaaaccccctcccttacccccaggcaaagccttgattatttttttagatattttattttcaaggttgaatttcagaattaattagatgggaatttttgtcagcttgccaaatactttaaacttctaagtaaattaacttaaacttataatttatcattaattttgttttattaattgaactagtcgttttaaaagcttaaactaatttagattgtgagctagaatatagaccttgcttttccctgtgtataagctttttcacttatttaaggaaaaaaaagtttagacaaagaaaagtaaaggtacacatttggatgtaatttaaatctcattttgatgactgttggcttagtgattatagattctgctccactattgttttcaataatagtgttactctagcaactaatataaatgcatgcttttacaggataaaacaaaaacctttccaccagttgtgttgtgtattgggatgaaattttctttattaacttttataacttgctctggactttgcaaaactgttttttcccaaagaaataatctgaagatcctgttacaaatacttttttgtccccttaatttcattatttgtttcttatattgatagtatgctgctattaatttaaaaggggaagatttagaaacagtttgtatcagaaatcctatgtcttttttttctcttattcatgtcttacatagcactctggaggaaagaaagacttctgccttcctgcttatgaactacataaatgattttcaatttaaaaaaccagttaacttacttgcacggtcttttctttgttaaaatgaaaattatggaaagcatgcttatctttagtctttgaattttttggcataatcatataaagaagtgattgaaatacattaaactttattcattaacccttgttcgcagatttggtaataaaaactggaagcagtcttaatgttttaataaactcttaagtaagggaatgattaaatagatgataaagtataactatataagcactgtgcagctattagaaatgatgaaggtttggatttgatgtaaaatgatatccacggaaaggtattaagagataagagtatgtttcaaaactacatatacttcaattccattttttttctttcaacttttaagttccagaatacatgtgcagctttgttatgcaggtaaatgtgtgccatggtgggttactgcacagatcatcccatcacccaggtattaagctcagcatccattagctattcttcctgatgcactccctcccccaaccccccacaggtgccaagtgtgtgttgtccccctccatgtgtccatgtgttctcatcgatcaggtcccactttataagtgagaacatgtggggtttggttttctgttccttcattagtttgagaataatggcttccatctccatccatgtccctgcaaaggacatgatcttgttcctttttatggctgcatagtgtgtatatgtaccatctggtatatgtaccacattttctttatccagtctatcattgatgggcatgtaggttgattccatgactttgcttttgtaaatagtgctgcagtgaacatacgcatgcatgtatctttataatagaatgatttctattcctttgggtatatacccagtaatgggattgctgggtcaaatgttatttctgcctctaggtctttgaggaatcgccacactgtcttccacaatggttgaacaccaacagtataaaagtgttatttttctccacaacttttccagcatctgctgttttttgactttttagtaatagccattctgattggcatcagatggtatctcattgtagttttgatttgcatttctctaacgatcagtgatgatgagctttttttcatatgtttataggctacaagtgtgtcttcttttgagaaatgtctgttcatgtcctttgcctactttttaatggggttgtttctttctcatagatttgtttaaatgtcttgtagattctggatattatacctttgtaatatagatagattgcaaacgttttcttccattttgtaggttgtctgttcactctgatgatcgtttcttttgctgtgcagaagctttttagtttaattagatcccatttgtcaattttggcttctgttgcaattgcttttggtgtttttctcatgaaatctttgcccatgcctatatcctgaatggtattgcctagattttcttctggggtttttatagtttggagttttacatttcagtctgtaatccatcttgagttaaattttgtgtatggtgtaaggaaggattctagtttcagttttctgcatatggcttgcctgttctcctagcaccacttattaaatagggaatcctttccccattgctcgttttggtcaggtttgtcaaagagcagatggctgtaggtgtgcagtcttatttctgggttctctattctattccattccattggtcgatgtgtctgtttttgtaccagtaccatgctgttttggttactgtaggcttgtggtatagataaaatcaggtagcatgatgccttcagctttgttctttttgcttaggattcattggctatttgggctcttttttggttccatatgaattttcaaatagttttttttttctaattctgtgaagaattgtcagtggtagtttaatgggaatagcattgaatctgtaagttactttgggaagtatggccgttttcacactattgattcttcctatccatgagcatggaatgtttctctatttgtttgtatcctctctgatttccctgagcagtggtttgttgttctccttgaagaggtccttcacttcccccttgctagctgtattcctaggtattttatactctctgtagcaattgtgaatgagagtttattcatgatttggctctttgcttgcctgttgttggtgtataggaatgctagtaatttttacacattgattttatatcctgagaatttgctgaagtttcttatcagcttaagaagcttttgggctgagacagtggggttttctagctatagggacatgtcatctgcaaacaaagatattttgacttcctctcttcctatttgaatatactttatttctttctcttgcctgattgccctggccaggacttccaatactacgttgaataggagtggtgagagaaggcatctttgtcttgtgccagttttcaaggggaatgcttccagcttttgcccattcagtatgatattggccatgggtttgtcgtatattgctcatattattttgagatatgttccttcaatgcctagtttattgagagttttaaacaatgaaggcatgctcaattttattgaagatgttttttgcatctattgagataatcatgtggtttttgtgtttagttctgtttatgtgatgaatcacatttatttatttccatatgttgaaccaaccttgcattccagggatgacgccatcttgatcatggtggataagctttttgatgtgctgctggtttcattcagtttgccattattttattgaggatttttttgcatcaatgttcatcaaggatattggcctgaagttttctttttttgttgtatctctgccaggttttcatatcaggatgatgctggcctcatagaatgagttacggaggagtccttcctctgtaatttttggaatagtttcagtattcagctcctctttgtacctgtggtagaattcggctatgaatccatctggtcctgggctttttttggctggtaggctatttattactgcctcaatttcagaacatgttactagtctattcagagattcagttttttcctggttcagtcttggagggtgtgtttgtccaggaaattgtctgtttcttctggattttctagtttatatgmgcagaggtatttatattattctctgacggttgtttgcatttctgtggggtcagtggggatgtcccccttatttctgattttattttttatttgatttttattttatttgattcttctttcttttcttcattagcctagctagcggtctaactattttattaatttttttaagaaaccacttcctggattcgttgaatttcttttgttattttttttttcttaggggttttccatgtctctgtttgcttcagctcagctctgatcttagttatttcttgtcttctgctagctttggggtttgattgctcttggttctctagttcttttagttgagatgtttggttgttaacgtgaaatctttctagttttgttttgttttgtttgtttgtttgtttgtttgtttgttttgagacggagtctcactctgttgcccaggttggaatacaatggcacgatctcagctcactccaacctccgcctcctgggttcaagggattctcctgcctcagcctcccaggtagctgggattacaggtacctgccaccacgcctggctaattttttgtattttttagtagagatggggtttcaccatgttggccaggctggtctcgaactactgacctcaagtgatccacccgcctcagcctcccaaagtgcagggattacagacgtgagccactgtgcccagtctttctagctttttgatgtgggcattttagtgctataaatttctctcccagagattctgatgtgttttctctttgttcacattagtttcaaaaaatttcttgatttctaccttaatttcattatttacccaagagtcattaaggagcaggttgttcaatttccatgtagttctgtggttttgagtggatttcttattcttgagttctaatttgattgcgctgtggtctaagagactgttatgatttcagttcttttgcatttgctgaggagtattttcctattatgtgataaattttagagtatgtgttgtgtggcaatgagaagaacgtatattctgttgtttttgggtgaagagttctgtaaatatctatcaggtccacatgatgcagagctgagttcaggtcctgaatatcctcgttaattttctgtctcaatgatctaatattgtcagaggggtgttaaactctcccactattattgtatgggagtctaattctctttgtaggtctctaagaacttgctttatgaatctgctttagcatcatcgtgatgctagctggttattttgcagacttgtttgtgtggttgcttcatagtgtcactggactgtgtacttcagtgttttttttagtggctgataatggttttttctttccatatttagtgcttccttcaggacctcttgcaaggcaggcctgctagtgatgaatgccctcagcatttgcttgtctaaatgggatcttatttctcctttgcttatgaagcttggtttggctgtatatgaaattctgggctggaatttcttttatttaagaatgttgaatattggcccctaatctcttccggcttacaggttttccactaagaggtctgctgttagtctgatgggctttcttttgtgtaagtgacctggcctttctctctggctgccctcaacattttttctttcatttcgaccttggataatctgatgattatgtgtcttggggttgatcttctcgtggaatatcttactggggttctctgcatttcttgaatttgaaatttggcctgtcttgctaggttgtggaagttctcctcgatgatatcctaaagtatgttttccagcttggttccactctccctgtcagttttagggaccccagtcagtcgtaggtttggtctccttacataatcacataattctcagaggttcattccttttcattcttttttctctattcttgtctgcctgtcttatttcagaaagatagtcttccagctctaagattctttcctcaccttggtctcttctgctattgatagtttgcattgtgaagttctcatgttgtgtttttcagctccatcaggttggttatgttcctctctaaactggctattcttgctatcagctcctgtattgttttatcgtgattcttagcttctttgccttgggttaaaacatgcttttttttagcccagcgatatttgttattactcaccttctgaagcgtatttctgttatttcatccttctcagcctcagcccagttctgtgctcttgctggagaggtgttgcagtcatttggagaagaaaaggcactctggctttttgagttttcagcatttatgcattgattgtttctcatctttgtgggcttatctacctttgatccttgaggttgctaacctttgaatgggttttttttcggggcctttttttgttgttgttgacattgctgctgttgttttctgtttgtttttcttttaacaatcacgccaccctactgtagggctcctgtggttagctgggggtttgctccagaccctagtttcctcggcttctccagcacttgcaggaggcggctggcaacctgcactggaagatctcacccagtcaggagggatgggatcagggacccacccaatgaagcagtctggttgcttcttggtagagcaggtgtgttgcactggggtggacccttttcttcctctgtaccacctgtattctccataaccagcaagctgaaatggctgatttaacggaagcacagagatggccgctggccctcccctggggagctccctcccatggagagatcagatctctgtctgcaggagtgggtcgggacctgtcaaagaagcagtctggctacaatctggcaaggcagctgcgctgcgccttgtgcggggaaggagggggtgctccttgtctgggtggtctgcactctccacaacggggaggctggaacaactgagtccccagaaaccacagagatatcagccgccccccacccccccaccacccccagctccctcccagcgagagatcagatctctgaccctgcatgggaagtcctgctcagtttggagtgggtccgtctggttgaagaagcagtctggcccccttatctggcaaggccactgcactgcgctgtgggcggcccctcctcctctgggccgtgtccactcttcacagctggcaggctgtattggctatttcccctgaattgcagagatggcgaccgcccctcccgctggaacttggtcttgtctcaggcggacttcagccctctgctgttggctagctgagattccaagccagtgggtcttagcctgtgaggtgcgatggaaatggggcctgccgagccatgctgcttggctccctgtattcagaccccttcctagggatgtatatggatggattttatgccttggcggggatcccggggcaggagcatgcagaactcccagatctctgtgtgcgcctgagctgctgttttgctgagactccacacagctctgtgtatcagacccaaggtcctggtggaatgggttcacaacaggatctcctgctccgcatgttgcaaagatccatgggagaagcgtggtggcttcctgagcgggttgcacaatcactcactgcctcccctggctgggggtgggggttccttttgctccacgtggctcctggatgggccgtagcccttctccttgctctccatgctttttgcctattcagtcccaatgtgagaacctggatatttcatttgaaggtattggattcattcaccccttttcatgcctctctgtgagtgccacagaccacagctgcttctcatcagccatcttgccctttgtccagttccatttttatgcaaaggtgtgtgtgtgtcaatgtgtggaggaataaaataaaaaatggtactggtagttatttcctggttttgtaattggatgttagtattgtttgcatttctttgttttgttcggttctttgaaaagaggattatagtagccaggatggaggtaatgttttaggcaaaaaatctgaaactttttaagatagaaaacaaacaaattcacatgtacttttcctgtgacttacattggcatttcagttgactgtaagtcaaaaggaaagttattgcatcattagaggctgaaccttcaccataacctgaccttagacagtcatgtctgacttgataggataggttttaaatctggaattagtggggtgaatacgttaaaggggtttagaaatggcgtttctcaaaataagtgtctcctgaagatgaaaatggtaaaatagtgcgtggtattattttcaggcatagtataagcctgaactggcctttcacaagtttgtcttgagacttgtcattgtttcagtttttatgttttcttttattaaattaacatgcttgttttaaaaagttcraaaagtacaaaagtacttttaggttcagtggctcatgcctgaaatcccagcactttgggaagccgaggcaggtggatcacttgaggtcaggagttcgagaccagcctggccagcttggtgaaactccatctctactaaaaatacagaaattagccatgcgtggtagcgagtacctgtagttccagctactcaggaggctgaggcaggagaatcgctggaacctgggaggtggaggttgcagtgagcactgtattccagcctgggcaatagtgagactctgtctctaaataaataaataaaagttaaaaagtgctaaaagtaagaaaatagacataagttccccctcccctggaatctttcattgaattacctttttttttctaagggaatagttctgggaagtagaggaactgtatctcaataaaacagacattctttgtggtgtgatagaatcatcactgcataggagccaggaaatttagtttccagtcccaggtagtccttagctgtataatcggaaaaagttactttgcctctttgggcctcaatttctactaattctatgatgacacagttggacttagaaattttaggatgctaaggactgacttaataaagctttcctggtatctcagacattttttaaaaggctgtatatgagtttgtgtatatgtgtatgtgcacatgcatttctggaaaggcttccccctccaaccattaaatatataattaatgttataaattgtgttgtttataattgagaaataaataccacacttgacaatgtctatttccaaagaattgggtatttttgtgcttttgtttattcctggtattttcatatcatcctgttacacacgtgagcagagaatgtgtgtatcatccatatttaatttacagtcatagctagactaagttattatccaatgttattgaaagaatcagtagcacagatagaaatgaattagttcctagtatacagttttcttggcctttctcttaaccagtttgctttcttagagaaatgaactgatctgactatgattaagatcatttattgctagacagaagtaaaattagagattatccatagaacattttaatcttgtaatttatttggtgtgttgtagaacacctgacttttctcattgtatttggtaaatrtgttaaaaatgttaagtcagtgttatctggttttattttatctcttgagtcatgtttggcatgtatgtgttgggggggtgggcataggagttacacatttaagaaagccctatcttttagtagaataaattaatgcagattggcctgtcttcctgcctgcctggtcagtaacagtggactttggagattgatctagtgatgataaacctattgtatgtggcataagccagagaagtcagcttcgatagcaagtttctacattggcgtgagagagaagcatttagttaacatttcaaagtaactaagcctgttagcatccatgtattctatcagtagactttattgagtcctgtcatttgtatggtcttttattgttttttgttttcaacaaaggaaatagcacacacatacatctcaaaatggattatacctgttgtaatctcagtattttgggagatcaaggtgggaggatcacttgaggccaggaatttgaaaccagcctgggaaacatactgagatcctatgtctacaaaatttttaaaattagccaggtacagtggtatgcacctgtagtcctagctactcgggaggctgaggcaggagaatcacttgagcccaggagttcaaggcagcagtgatctgtgatcaaaccactgcactccaacttgggtgacaacatgggaccctatcttaaaaaaaaaaaaaaaagaattataaagtctctattatggttgtatctattaagaatatcagttctgttaagaaaggaaataattgtttcaaatgtttattggggtagcaagataaaaagttgtttacaagatattaaatatcagaatatttggaattagtgtcagtatttgctattatatagaaaaaaaacctggggcctcatgatttgaatttttcatcttgagttatttaatgcacatttgagttcttaccactttttggaccctatactcaaggtgtgtaaaggcataattattttcaaatgtgggctttgtctatgcaaaaatttatgagtgcattaagcatcactaggtgcagattaaatttgaattcagtgtgctgtatgtatacctccactactttcatttgatcagaaatgcacaatttagaaagtgtgttctaggaaaacttgttaaaagctatggaaaatccttctgtaaagtgaattaatttgccttttatagatccaggttttcatatgtgatttcttaatgaacaacttgtgaatattttaaatttattaaaagtaacatatctgtaattcactttaaacccccaccccatctatctttgtgtctcactctcacagtcataattaaacagagcaggagtttagttgttcttactgagtatataaatgatcccaatttttaagcttttaattttttaatcttaaaagactggcttaagataccatgatttctttaaactatatatactatgataataaattgaaaaatgtatatcaatttaaatttgacccatgggtctttacagtgtaatttaacatttacattcctgcagttggaatataagggctatatgtttcagttaaactctcctataactgtttagattaatttagattagttttttgttaatatagtggttggcagttgaaatgattgtgaaaataaagttgtttatgatgtataaataggagtagccttgatttctagcacaggcatccaatatagtcactaatttaagcagacttatgttagcatttatcaactcagaattaagcacaaaataaaatgcatataaaaaatgttaagttggtggaaagaccttgaaatctgaaaagtggtaattaaaaaacaatggaatgcctaaaccatactgtataaacatgaaagtcttacataagagrctggtgttacatgttttgctgctgttttttaggtaatctgtcatatatatcagaaatatatatagcaatcaggttttagtttctagtacagttgaccatagaactatggagatattatactgtccagaggggaaaaataattgtctcttatttcaacccctctaaacaggataccatacttgcagagctccttcagatacataaagaacacattgtaggataccatgaacatgattctcttttggaccacaaagaagaagaagagttgactgaagaagaaagaaaagcagcttgggctgagtatgaagcagagaagaaggtagttgatgcaaaatgtgtttttgtttttgttatgttagtgatttgaaagagcaatgaagaagaaaagggtcacatttgaaacaggtaataataatatagtgggttttaggaacacattccccaattacaagaatctctttatgggttggtttcagctacctttagtggtagagtaggaggagaagacagaagaaaacagtttacacttaaagagtagtaatcccatttctgcctagtatttgttgaattgagaaatgagtgggaagccatatatttagcatcactaacctcccatcagtaccctctctgtagtaacaaacatacaggagcttagtgtttggaggttgtagtaaatgtagctttgcatgtataccatgaaatctaaattttggctgaatatcagaacacaaaaatatttcattattagacattaatgccatttgctccagcagcaactttatttaagatcattctatgtctgttttaaacatcaacccacttgagcaaaaatgtgcctgagcatgggaaaccttatcctaatacctgaatccttttcaaactcctaacttattgtaccaaacttctttaacattagtgtgatgttcagagtctcatcagaattctttgagttgcccccattctgtgggaattatcagaaaaaaaaagtacacctttaggggttaaagctttccttgtaataagatcttggtttcgggtgaaaagggtgttttgtttgtgtgtggaagagtgttaataatttcctggatctgagaatgtggattcttttctaaaccagtaggtgatgtagaatttcaagttttaaatcacaatgtgaaaagtgcataatttttttgtttttagggactgaccatgcgtttcaacataccaactgggaccaatttaccccctgtcagtttcaactctcaaactccttatattcctttcaatttgggagccctgtcagcaatgagtaatcaacagctggaggtgagttgtgaagtacaaaagtagtttgacatgaattaaaggcaatttcaagtgccttgttgttgagggttccctatgcagaaatatcacattctccaaaagattacccctgaatagacgaataaatttttgttttatttgttgaycgttttgaaccaacatgatgttgtaaaatgtggtttgttcagagcacaaaggaatcagtcggtgaattaatgtagtttgaattattttaattaagaaacaatagggctgctgactcgcttgggaaatagcaccttcttcagttataaaatagttataataaattgctatcttactgtttgaaagtaagataaatatactcattaacttytattctagtgcattatagatgcacaattaaatatataatgcccaatattatgaaataaatgatttaaagctagaatcaattgtaaattaaataggaaagactgggtttttattataccaataatgacttaattgaatctgaaacayattataaaatgtgcttatggattcttctgcattattaaattattggtgtgataaaactcaamcttttttaatcttcctaacaagactctttgagcattgatatggtttactccactttattgatactgaattttgctgttctcttcaattatttaaagagttttaaaaccgactgctctaagttggcaaatggaaggattccctatactttaacactatgctgtctttctgccttatataacttatttcttgcattcttctaggacctcattaatcaaggaagagaaaaagttgtagaagcaacaaacagtgtgacagcagtgaggattcaacctcttgaggatataatttcagctgtagtaagctaattggcaattgtcttattccaacctccaatttgtaccctccaccccctactgccatttttttaaatttttaattgttccttcttataaattgatttgcaatagtaaaatactggtaaaatggatggataatgccaaaccgtaacccagcaattttacatagatgttggcacaagagagaaatgggtaaaatgtaagaattgagaaatcaaacatggaaatgtatgcattgtttatataaacattttaattaccagttgtacaaattaaatctaaattattgtttcattccagagatagccagcccaggtacagcagtgaacaacttagtaccctgttttgcatcatgtttttcttcagaaaagaataaaggaaaaggggggtttgaaaccttgggaaatcccgaatatcttaaaataccttaattatttttcctcaattgtacagtaataaggagtaaatagaaaatttttcttttagtggaaggagaayatgaatctctcagaggcccaagtacaggcgttagcattaagtagacaagccagccaggagcttgatgttaaacgaagagaagcaatctacaatgatgtattgacaaaacaacagatggtaagaattctgacgtctgactatttctaggttatgtttaattttcttgactttataataagtttgtatgacatctacgtcagtaattattcctactatggagggatggatagtcattgataattctggaagaaatgtaaaaaacccaggaatgtcaagtaaaagtaatatattttgttacaaaaatgcaacagctacctaaatgggaatccttgaagtttacatatgatctagtccatataattttatttctcatatattctggacatctacgtaggaatttttgccagagttttaccacatttgccaattgtattttatttaacttttaatttttgtgagtatataataggtatatatatttatggggtacataaggtatattgatacaggtatacagtgcataataatcacatcagggtaaaggatatctatcacctcaagcatttatcctttctttgtgttacaaacaatccagttatactcttctagttatttttaaatgtgcaataaattatttttgactgtagtcaccctgttgtggtatcaaatactagatcttattcattctaactatacttttgtacctattaaccatcccccattaccccactccctgctacccttctcagcctctggtaactaccattctactctcttatcatcatgagttcaattgttttagtttttagcttccagaaataagtgagaacatatgaactttgtctttctatgcctggcttatttcacttaacataatgatctccaattctatgcatgctattgcaaatggcagtatctcgttcttttttatggctgaatagtactccattgtatatatgtaccacatattctttgtttattcatctgttggttgatacttaggttgcttccaaatcttaatgttgtgaacagtgctacaataaacatgagagtgcagctacctcttcaatatactgatttcctttcttttgggtataggcctagcagtgggactggtgaatcatatagtacctctgtttttagttttctgaggaacctccaaaccgttctccatagtgcttgtactaatacacgttactaacaacagtgtacacaagttcccttttctccacatcctcaccaatattagttattgcctgtcttttggataaaggccattttaactggggtaagatgatatttcattatcttttttgtttggttggttggttttgtagagacggggtctcactatatttcccaggctggtctcaaactctcgggcttaaacgatcctctgacctcagcctcccaaagtgttgggattacaggygtgagtgaccatgcccagcctctcattgtagtgttgatttgcattatctaatgactgatgatgttgagtgccttttcctatgcctgtttgccatttgtatgtcttctttcgagaaatatctattcagatattttgcccatttttaaatctgattattagattttttttcctatgcagttgtttgagctccttatatattctggttattaatcccttgtcagttggatagcttgcaaatattttctcgcattctgtgggttgtctcttcgccttgttgattgtttcctttgctgtgcagaagctttttaacttagtggtatcctgtttgtccattttttatttggttgcctgtacttgtgagatattactcaagaaatctttgccagttcaatgtcctggacagtttgcccagtgtttttctgtagtagattcatagtttgaggtctcagatttaagtctttaatccattttgatttgaatgttgtatatggcaagagcttggggtcttctttcattgttctgcgtatggatatccagcttccacagcaccatttattaatgagactgtcctttcttcaatgcatgttcatggcacctgtgcaaaaaatgagtttactggtgtgtggatttgtttctgggttctcacttctgttctcttggtctgtgtgtctgtttttatgccagtaccatgctgttttggttactgtagctctgtagtatcatttgaagtcaggtaatgtgattcctccagttttgttctttttgctcactacagctttgcctattgtgggtcttctgtggttccatgaaaagttcagaattttttttttgtttctgtgaagaatgtcattggtattttgataaggatgcattgtatctatggattgctttgggtagtatgggcattttaacaatattaatttatccaatccatgaacatggaagatcttttcatttttttgtaccctcttccatttctttcatcagcattgtgtagttttcattgtagacatctttcacttctttggttaagtttattcctaggtatttaattttgactgtggctactgtaaatgggattactttctcaatttctttttcagattattcactgctggcatttagaaatgctgctgattttgtatgctgccactttactaagtttgtttatcagttctaaaatatttttggtggagtctttaggtttttccaaataccagatcataacatttgcaaacaggataatttgacttcttcttttccaactgggatgccctttatttctttctcttgtctgattgctctagctatgacttgcagaactatgttgaataacagtggtaaaagctggcatccttgttgtgttccaatttttagaagaaagtctttcagtttttccccattgagtacgatactggctgtgagtctgtcaatatatggcttttattgtgttgaggtatgttccttctataaccgtattttgaggatttatatcatgaaaggatcttgaatattatcagatgttttttcagcatcagttgaaattatcatacagtttttgtccttcattctgttatttgatgtatcacattgattgatttgcatagttaaatcatccttgaagcccttggataaatcccacttggtcatgttcaacaacacctttttaatgtggtgttgaattgtgtttgctattattttgttgagaatttttgcatgaatgttcatctcagatattgccctgtagttttctttttttgatgtgtttgtctggttttggtattaaggtgttactggccttatagaatgtgtttgaagtattccctcctcctctacttgtcacagcagtttgaggaagattggtattagttcttctttaaacgtttggtaaaattcagcagtgaagacattggtttccaggcttttctttgctggaagactttttattacagctttaatctcgttacttgttactgctctgttcagattttggatttcttaatgtttcaatcttggtagattgtatgagtcttggaatttatccatttcttctaggttttccaattttttgcatgtagtttgtcataggagcctctaatgatcctttgaatttctttggtaacagttttaatatctactttttgatctctgattttatttacttgaatcttctcctttttcttaatctggctaatggtttgtcagttttgtttatcttctcaaaaaaccaactttttatttatttctgtgctgatctttattatttattttactaatttggggttttattttcttttgtttttctagttctttaagatgcattggtaggtgtttgttttttttttcttttctgatgcacgcacttagagctgtaaactttcctcttagtaatgcttttgctgtatcccataggtttttgtatgttgtgtttcctttatcattcgttttaagaagtttttcagtttttttcttaatgttttctttgacccactggtcattcaggagcatattgttcaattttcatgtgtttatatagtttcaaaaattcctcttgttattgatttctagttttattccattgtggtcagagaagaaacttgatatgatttcatttgtttgaatgttttaagacttgttttgtggcctaatatatggtctttccttgagaatgatttatgtgccaaggaaaagaatgtatattctgtgaccattggatgaaatgtcctgtaaatatctatttggtctatagtgcagaataagtccgttggttttttttattgattttctgtctggatgatctgtccaatgtgtaaagttgaggtgtcgaagtctccagctattattattttggggtctgtctctctatttagctctaataatatttgctttttatatctggtgctccagtgttgggtgcacatatatttacaattgttgtatcttgttgctgaattgacccctttatcattatataatgaccatcgttgtctctttttatattttttgtcttgaaatctgttttggctgatgtaagtatagctagtcctgctcttttttggtttccattttcatgaaatatcttttttcatccctttattttcactgtatatgtgtctttataggtacaatgtatttcttacaggaaacagatggttgggtcttttttaaaaatccattcagacactatatgtcttgattggagagtttagtccatttatattcactgttattctgtttttaaactttcattttaagttcatggatacatgtgcaggtttgttatataggtaaatctgtgtcackggtttgttgtacagattattttgtcacccaggtattaagcctagcacccataagttatttttcctgatcatctccctcctctcagcctccaacctctggtcagccccagtgtctgttattgccctctatgtgttcatgtgttctcatcatttagttcccactttttagtgaaaacatatggtatttggtttcctgttcctgcattagtttgctaaggataatggcctccagctccatccatgttcctgcaaaggacatgatcttgttcttattattaggtttatagaagatattaataaaattaaataaatagattgacaacagtcttgaaaatgtgtgctgagatctgggctcagctttacaagccgagaatgagaaagtagatttttgatctctgagatttctaatagttgagtcagctactgttggaatgagaaaagctctagttgtctataacatgttgaatttgtcagactctttgtgatgagctgcgttcaataaaccaaatgcagaggcattagtagcaggctatggctctgctagctgaggtttggaaatcacaggatgcaacgcctcaatttttgctgtggaacttgataatggggcattccgtaatgaatgccgtatgaggggacgtgagtatgagtaggcagagggcacatgtatctagagcttcagtcactgtaggtatcaggaagaaaggcacatttagaatacacctttacacacgtggatttttttttttcacccctcctgaactttttctttatttttattttttatttccacattttctttatccagtctaccattgataggcatttagctttattccatgtttttgcttttgtggatagtgctgcaatgaacatatacgtgtgtcattataatagaacaatgtatgttcctttgaatttatacccagtaataggattgcagggttgaatggtagttctgtttttagctctttgaggaactaccacactgctttccacaatggatgaactaatttacactcccaccagcagtgtataagcattcctttttctctacaacctcaccagcatcttttgactttttaataatggccattctgactggtgtaaggtatctcattgtggttttgatttgcctttctctaatgatcagtgatgttcagctttttttcatatgattgttggccacgtgtgtgttttcttttgcaaagtgtctgttcatgtcctttgcccactttttaatggggttgttattttcttctatatttctttaagttccttatagataatggatattagttgctagatggatagtttgcaaaacttttctgcaattctgtaggttgtctctctactctgttgatagtttcctttgctgtgcagaagctctgctgtgcagagtttagttggatctcatttgtccatttttgcttttgttgcaattgcttttggcatcttcatcatgaaatctttgcccattcctatatccagaattatattgcttaggttgtcttccagggtttttatagttttcgggtttacatttaagtattgaatgcatcttgagttgatatttgtatatggtgtgtaaggagggggtccagtttcaatcttctccctgtggctagccaattaccccagcactgtttattgagtagggagtccttttcccattacttgtttttgtcaactttgtcaaagatcagatggttgtaggtgtgtggccttatttctgagctgtctattcagttccattggtctgtgtgtctttttgtaccagtaccacactgttttggttactgtagctctgtagtatagtttgaagttgtatagcataatgcctccagctttgttcattttgcttacgattgccttggctattcaaccttttttttgttgttccatatgaattttaaaatagttttgtctagtttatgaagaatatcattagtagtttgataggaatagcattgaatgtataaattgctttgggcagtatgaccatttcaacaatattgattcttcctatccatgagcatggaatgtttttccatttgttttgacatctctaatttcttttagcagtcttttggagttctcattgtagagaccttttacctccctggttagctgtattcctaggtattttattctttattgtggcagttgtgaatgggattgcatgcctgatttgcctctttgcttgacttttgttggtgtataggaatgctactgatttttgtacattgattttgtaccctgagatattgctgaacttgtttatcagcttaagaagcattttgggccaagactagagttttctagatacagaatcatggcatctgcatactgtgatagtttgactttctctcttcctatttggataacctttatttatttctgtttcctgattgctctgcccaggacttctaatactatgttgaataggagtggtgatagagggcatccttgtcttgtgccagttttcaagatgaatacttccagcttttgcccattcagtataatgttggctgtgggtctcctcctggcggaattccagaggcccgaggcaagagccagttgcttcttgccacttcaactcactcattcccctggagttcttgtgggccaggaatgagtcctggtgtgcggtagccccattcagggttcccagcttcctcctccaaccaagcttctgtttcttccctccgcccactctcattgccttctctctgaagatctgttaggagtgtgccagtcatccttgtctttcggtggcagcttttccaccttgctgcatctagtcatccatcttgcccaaccccattattcttttttttttttttttttttttttttgagatggagtctcgctctgtcgcccaggctggagtgcagtggcgcaatctcagctcactgcaagctccgcctcccgggttcaggccattctcctatcttagcctcctgagtagctgggactacaggtgcccgccaccacgcccagctaattttttgtatttttagtagagacggggtttcaccgtgttaaccaggatggtctcagtctcctgaccttgtgatcctcccgcctcggcctcccaaagtgctggggttacaggcgtgagccactgtgcccagcctccaaccccattattcttgataagttaggacttactcctgccattttgttatttgttttctggttgttttgtgatccctgtcttccttcttttcttcctatcatccttttagttaaagcaattttctgtggttgtatgttttaatttcttttattattatttttttgagacggagtttcactgtgttgcccaggctggagtgcagtggcatgatctcagcttactgcaatctctgccttcccgggtttgagcgattctcctgcctcagcctcctgagtagctggaattataagcacccgccaccatgcgcagctaattttcacatttttactagagacagggtttcaccatgttggccaggctggtctcgaactactgacctcaggtgatccatccaccttggcctcccaaagcgctgggatcacaggcctgagccaccgcgcccggcatgatttcttgcttatagttttttgtttatctgttgtatgtttgtttttttgaagttaccatgaggcttgcaaataatgtaatgcatcattttaagctgatgataacactgattgcataaacaagcaaacaaagtaacaaacaagcaaagagaaaactaatgttctattgccagtgagttttataccttcatgtaacttttcgttgtttgttaacatccttttctttcagattgagaaactccctttaatatttcttgtaggacaggtttgatattgaaattcctcagcttctgtttgtgtgggaaagtctttatttctccttcacatttgaagcatattttcaccagatatgatgttctagggtaaaagttttttgtttgtttgtttgtttgttccttcaccccttttaaatatctcatgtcactctctcctgggctgtaagttttctactgaaaagtctactgccagatgtattggagctcctttgtatgttatttgtttcctttctcttgctgcatttagtatactttctttatccttgacctttgagagtttgattattaaatggtaggaggtagtcttcattaggttaaatctgcttggtgttccataaccttctttttcttgaatattgatagttttctctaggcttggggaattctctgttgttgtccctttgaataaactttatacccctatctgtctctctgcctcctctttaaggccaataactcttagatttgcccatttgaggctattttctagatcttgtagatgtgcttcattgttttttgttcttttttcttttgtctcctctgatggtacattttcaaatagcctgtcttcaagcttactaattctttcttctccttgatcggttctgctattaagagactcttaatacattcttcagtatgtcaattgcattttttgactccagaatttctgcttgattcttttaaattatttcaatatctttgtgaaatttatctgatgtgattatcagtttcttctccatattatcttgaatttcattgaatttcctcaagacagctcttttgaattctctgtcacatatattcacatgtatctgtctctctaggattggtccctgaggccttatttagttcgtttggtgatgtcgtgtttcctggatggtcttgatggttgtggacattgattcgtgtctgggcattgaagagttaggtatttattataatctttgtagtctagccttgtttgtacccatccttcttgggaaggctttctaggtattcaaagggagttggatattgtgatctaatggtcactgcatctgtatctgcattagaaggcatcccaaaccgggtaatgctgtgactcttgtagtcttggagactcatagaggtaccgccttggtggtcttggataagatctggaagaattgtctggattaccaggcagagactcttgttctcttcccttactttctcccaaacagaatctctctctgtctgtgctaagctgtctggaaagctggtggagaggtgacacaagcacccctctggctcccttcacggggaccacactgggttagacctgaagcctgcatagcaatgggtctcacccaagatccacagtaactactggcctccgcctttgtttgctcaaggctctaaggctccacattcatcaggtggcaaagccagctcctcttgtgtccttcccttctgggctgcagatttcccccagccctaggccgatcccaagatgctatctaagatccagggcctggagtcagaatctttaggaatctgcctggagctctattctacttcggctgagctggcacccaagccataagacaaaatctttctacccttccctccgcttttcacaagcaaaggagtctctccctgtgaccactagcaccccaggcccacagcaggtattgcctggctactgctgatgttcactcagggcccaagggctcttcagtcagcttgtgttaaatgctaccaggactacgtctctcccttctgggcagtgggctcccctccagcccagggaaggtccacaaatgccatccaaaagccaaggcctggaattagggtccccgagggtctgcttggtaccctagcccactgtggctgagctggtacctaagctgtatgtcaaagttctctttactctttcgtcttcttttctcaagcaggagtctcttcccatagtgtccacagctgggaatgtgctatgtcacacctgaaggtagcatgtctctgagtctcactgaaggcccactgcaagtactgcctgggtaccactgctggttattcagggcccaagggctcttcagacaacagatgttgaatcctgtcaggattgagtcatttccttcaagagaatgagtttcctctggcccaggttatgtctggaaatgtcatccaggagctagggcctggaacaagggcctcaggactctgcctggtgccctgtcctactgtggctgacgtgatattcaagctgcaagacaaagtcttctttactcttccctctcctctcctcacctcaagcaaaaggaaagagtctctcctggagctgtgagctgtgctgcctggggtttgcgaaggtgtggcacaagcaatctcctggccaccctggctggtgtctcactaggtcatgtgcccccccccccgccccccgtccactggctttcagcccagcacagtacaggacttggactcttggtggcctagattgcctttcaggtttatttaggcccccagaactctttagtccacagtggcaaagcttgtcggaactcgggttctgcctgctgggataggtgatttccctctggctgtggctggtgtaaatgctccctctgtgggtgccagctgagttctgcctggtgtttcttttcactgtgacagggcagccctgagttccaatgcagagtcccataatcactgtactcttttcctgcaagcacatagattctctctccctgccacacggctgctgccaggggatgagtgaggggtggcattggcagttcaagactgtctttcctaccccctttagtgcctctttcagtgatatgaagttaaaatctggtacagtgattgctcacctgatttttggttctcatgaaggtgattttattgcagatagtttttcaatttggtgttccttcggggaggacgatcagtggaggcttctattcagccatcttgctctgcctccagtcacatttgccattgttaaacaacctcgaaatagtagtatacttatcagtgtgtttaatttgagaataaaaggtagagctatggatgatacatatcaaaggttcctactaagttatataattctttaaaagggtactgtattccaggatccttgatcatgtttcccaacacagtcgtttgccagccttctgccttatacttggaaatttctacgcttgacaccagggaatctatttctgtggcatatattttacttagaaagcactgcagggttatgtggttttacaatatattagtacatttgagatattcctggtcagaattattcctactgcaagtgcctttccctttggtgtttgtcactaaaatgtttgtctgtcatcatgtgaaatattcaaaagaatgacaaagaaaggagtcttaacaaaaagtgttgtaactaatacttgagactaatcacagtacagaacacattactatggcaactaagctaaatgctgcttgcaatataatagtcaagacattaagagaatttagccmtaaatgatcttactaactggtttctacagtaatggtcctgtgaatgccatcacattagtaatggtgttaacaataatgtgttttccttttggtatggtacccccttaacaaattgattttaagtcaaaacttgatacctcttttgagacaggtcatgcacttgtaatgactcccattttttctctatagttaatcagctgtgttcagcgaatacttatgaacagaaggctccagcagcagtacaatcagcagcaacagcaacaaatgacttatcaacaagcaacactgggtcacctcatgatgccaaagcccccaaatttgatcatgaatccttctaactaccagcagattgatatgagaggaatgtatcagccagtggctggtggtatgcagccaccaccattacagcgtgcaccacccccaatgagaagcaaaaatccaggaccttcccaagggaaatcaatgtgattttgcactaaaagcttaatggattgttaaaatcatagaaagatcttttatttytttaggaatcaatgacttaacagaactcaactgtataaatagtttggtccccttaaatgccaatcttccatattagttttactttttttttttttaaatagggcataccatttcttcctgacatttgtcagtgatgttgcctagaatcttcttacacaygctgagtacagaagatatttcaaattgttttcagtgaaaacaagtccttccataatagtaacaactccacagatttcctctctaaatttttatgcctgcttttagcaaccataaaattgtcataaaattaataaatttaggaaagaataaagatttatatattcattctttacatataaaaacacacagctgagttcttagagttgattcctcaagttatgaaatacttttgtacttaatccatttcttgattaaagtgattgaaatggttttaatgttcttttgactgaagtctgaaactgggctcctgctttattgtctctgtgactgaaagttagaaactgagggttatctttgacacagaattgtgtgcaatattcttaaatactactgctctaaaagttggagaagtcttgcagttatcttagcattgtataaacagccttaagtatagcctaagaagagaattcctttttcttctttagtccttctgccattttttattttcagttatatgtgctgaaataattactggtaaaatttcagggttgtggattatcttccacacatgaattttctctctcctggcacgaatataaagcacatctcttaactgcatggtgccagtgctaatgcttcatcctgttgctggcagtgggatgtggacttagaaaatcaagttctagcattttagtaggttaacactgaagttgtggttgttaggttcacaccctgttttataaacaacatcaaaatggcagaaccattgctgactttaggttcacatgaggaatgtacttttaacaattcccagtactatcagtattgtgaaataattcctctgaaagataagaatcactggcttctatgcgcttcttttctctcatcatcatgttcttttaccccagtttccttacatttttttaaattgtttcagagtttgttttttttttagtttagattgtgaggcaattattaaatcaaaattaattcatccaatacccctttactagaagttttactagaaaatgtattacattttattttttcttaatccagttctgcaaaaatgacctataaatttattcatgtacaattttggttacttgaattgttaaagaaaacattgtttttgactatgggagtcaactcaacatggcagaaccatttttgagatgatgatacaacaggtagtgaaacagcttaagaattccaaaaaaaaaaaaaaaaaaaaaaaaaagaaaactgggtttgggctttgctttaggtatcactggattagaatgagtttaacattagctaaaactgctttgagttgtttggatgattaagagattgccatttttatcttggaagaactagtggtaaaacatccaagagcactaggattgtgatacagaatttgtgaggtttggtggatccacgcccctctcccccactttcccatgatgaaatatcactaataaatcctgtatatttagatattatgctagccatgtaatcagatttatttaattgggtggggcaggtgtgtatttactttagaaaaaatgaaaaagacaagatttatgagaaatatttgaaggcagtacactctggccaactgttaccagttggtatttctacaagttcagaatattttaaacctgatttactagacctgggaattttcaacatggtctaattatttactcaaagacatagatgtgaaaattttaggcaaccttctaaatctttttcaccatggatgaaactataacttaaagaataatacttagaagggttaattggaaatcagagtttgaaataaaacttggaccactttgtatacactcttctcacttgacattttagctatataatatgtactttgagtataacatcaagctttaacaaatatttaaagacaaaaaaatcacgtcagtaaaatactaaaaggctcatttttatatttgttttagatgttttaaatagttgcaatggattaaaaatgatgatttaaaatgttgcttgtaatacagttttgcctgctaaattctccacattttgtaacctgttttatttctttgggtgtaaagcgtttttgcttagtattgtgatattgtatatgttttgtcccagttgtatagtaatgtttcagtccatcatccagctttggctgctgaaatcatacagctgtgaagacttgcctttgtttctgttagactgcttttcagttctgtattgagtatcttaagtactgtagaaaagatgtcacttcttcctttaaggctgttttgtaatatatataaggactggaattgtgtttttaaagaaaagcattcaagtatgacaatatactatctgtgttttcaccattcaaagtgctgtttagtagttgaaacttaaactatttaatgtcatttaataaagtgaccaaaatgtgttgtgctctttattgtattttcacagctttgaaaatctgtgcacatactgtttcatagaaaatgtatagcttttgttgtcctatataatggtggttcttttgcacatttagttatttaatattgagaggtcacgaagtttggttattgaatctgttatatactaaattctgtaaagggagatctctcatctcaaaaagaatttacataccaggaagtccatgtgtgtttgtgttagttttggatgtctttgtgtaatccagccccatttcctgtttcccaacagctgtaacactcattttaagtcaagcagggctaccaacccacacttgatagaaaagctgcttaccattcagaagcttccttattacctggcctccaaatgagctgaatattttgtagccttcccttagctatgttcattttccctccattatcataaaatcagatcgatatttatgtgccccaaacaaaactttaagagcagttacattctgtcccagtagcccttgtttcctttgagagtagcatgttgtgaggctatagagacttattctaccagtaaaacaggtcaatccttttacatgtttattatactaaaaattatgttcagggtatttactactttatttcaccagactcagtctcaagtgacttggctatctccaaatcagatctacccttagagaataaacatttttctaccgttattttttttcaagtctataatctgagccagtcccaaaggagtgatcaagtttcagaaatgctttcatcttcacaacattttatatatactattatatggggtgaataaagttttaaatccgaaatatatactgtgtcaaagctcaatatgtgccaggtaactaaactgttaacatcactagcgttggatgtaataacaggatagtggctcacccccaagagctgccataaaattccattatgataggtactaccaccgtctctttggaacaaccttcctgacaccattgtgccactaaactaagggaatcatccttcctcgctttctagggatctttttgatagcgactgttgcacacaccttcaccaagaaagagagcatataaattgaggccattagtaaagataaggatacaactataattgaaagaatgaaggagtgaggcaaatcctaaaatactgcaggcaggccgtctttaatacagcatatcacaagcaatctctacccagcaacactcccccacattaagttcctgaacattctacccttctctgatagaaacatgtaagggatgagggagcttggctgtaatcttcagctttgcaaatacaatgactattaagagactttcctattaagtatacccaggtccatccctatgctccttgtgtcgtatatgtgttgtttttcaagaaaggtgaagaaagatggcttatatgcaaggatgggatttgttttagttatatggggagaaagtatagtactgaaagagagcaaagaaggatcgggaaagagactaaattggagtggattgatgaagagccttgaaatcctgaatgagtaattcagtacagaggataacaagggtttgtgaggcagatgataatgtttagcaagtaaagatggctatttgggtgagggtaatttggtttagaatgcaaggtggaagattggagacaggaagataattggtccaagtatgaaggacaaaagaaaaaaaaatcattagaggctgtataggatagtgaacttttacaatgatacttataataaaaacctgttattttactttccccctaaggaggctttgtttcagaattttgatttttacacacaaaattcacttactctgattactctcaaacataatggtatgttcgtcagcgacattcctattctttctcaattttttttgtactcctttacatttgcagaaagtgagattggtccattgagtgtaattctacttctttcctcaagccaattcttaaaaaagtgaaatccaaatatttctgttacatttctttgagacccattcattcaaagtgctagtagctttgtgggtaatgttatatttataagctttccttagtattttcaacgtgctttgtagttatcgtgttaaccctatacacaacgtatctgtgagagaagtgaaaataatgccattttccttatgacaagttataagtgaaaccaaaatcaaatctgttgcacttaaggaggcagaagacatagtctagttagttaaattttccaggtctttcatatctaatttgagaaaaatgggacaataataataccttgcctgctagaaggcaggggactagaccaggtgatttcctaagtcctgttaagctccccgagttaaactttgagcaaagcacagtctaaagccaaaaggcaatgtgtttgtctaagattacagggtaaatttgtaaacagtactagaaatcccttccctttggctaaccctctcccctactaagctataccttttctttccctctgtgtagaaaaatgagaggtctgacagacattttaatgacaaagcaggtaagttaagttgtaattggctctaattacaacttccactagctgtaacctttatcttttgcccagaggctctcccagagcttcctactgcctttgaaactcattgcagaaaatgaaaaaaacatgtttaaggatctgattcttgtatcttgattggctgatcgggttacaaacatgacaaaacatcaaggaaaatatagatcagctttgtgaagcccacttttaagcaaataattggtgatttaccactcttgtttataactgtaaagccaaattagaccaatgtttaaattgtctggtctggaaaaagtttatagtgagtaataggcaatatttgtttatgttgactcctgtgtaactacatggaacaccttttgagatgtaggttttatagtcaaattatgtgacaaaaactaagaaaactaatagatgagttttatttttttctgtagctgcttgtccccacatgccaataacaaagcaggtagacacactagcctattgaatacattcaatgaaaacaaaaccaaacttaaggtgagagggggacgtggtttacaactatttgaggtcttattagtttattcccaactcttagtaagttttcaacaatacagcatggagaggttgggcttcaaaggctttagcaatgtggctggcttggatctaattatccttcttaacaaagtaaaccttttattctattagcaacttttctgccctctcttcccacgtcttgcacacactatccctgaatatgctgagttcaaacgaagtgcctgcctgcgattttttccccctttacttctccaaaggatctttccccaactgtagccccctgtcacctccccaccccaccacacacaccccttatattctgatgcctaagtgtgtgaggtcgggaggacttgtagaaccttagaatgccagggatggtaggggtcttagagaccatgtagcccaggcccctacctttacaatcaggaagacaaagtcccagagaggggaaaaggtgccctagggcactcatgtcttctagcttttattccagttctcattccactccattcagatgcctcttactgcatttaaattctaattcattttcttcaatccgccagaccgcattaagcaaattttcagaataatgggtactgaatgaactaagctttaaaatgagaaatgttagtgagaagtagaatatgtaaaccaaaatgaaagggaaacattcttgtgataactgtaaaacaggaagccccctgacacatcccctaaacctttaatttggcatccagtatatgggcttcaggattttgtttcagagggatatttaatttctttaaatggttctttcaccacgctcagcatggtttaggccaataggatctagaagctctgttctattttctggatctcagtatccagtgacaaggatagaatcattcagccttccttagaccaggcaagtttatgcaccgagtactttaaaatcctctatttcaaatgagaaatgatgatatattcacaagaaaacaaaatagaaagctctgtgttagtatagtgatctctgtcagaataagggtgactgttattgagttacagagatgtaccacatggaccatgaacagttttcatatttctgaagaaatgaaagacagcaaaatgattttttttttttttgagacaaggtctcgctgtgtcacccaggctggaatgcaatggagtgatcttgactcactgcagccttgacctgggctcaagcaatcctcccacctcagcctcctaagtagtgcgactgactacaggagtgcatcaccatgcctggctaattttgtttattttttgtagagatgatgtctcactatgttggccaggctgatcttgaactcctgggctcaagtgatcctctagcctcagcttcccaaagtgctgggattacagaagttagccagtattcccggtcctaaaatgattttaatatgctagcacttaggagcgtggatccatctctaaacttggacaaattacttcacctctctgaatcttctctcacacagtgatcaagatttattgaacacctattgtgtttcaggaactatggccagtcacttttcattattcctgtgttacagatgagaaaataggtttgaaatacttattcactcagtgtctcacaaccaactggaagaggcaaatgtttttcttcccattgaacaagcctgcaattcttccttcaactatgatttaaccccagccttttgtgaaccatttagagtaccttattttgttattttgcatatcagctctcatgtctgtttttactttaagcaagacttaaataaaacagaatactccctgatatgatttggatctgtgtccccaccaaatctcatgttgaattgtaatccccagcgctggaggtggggcctggtgagaggtgattggatcatgtgggcggatttcttttctttttttttttttaatttatttatctttaagttctgagataagtgtgcagaacgtgcaggtttgttacataggtatacatgtgccatggtggtttgccgcacctactgacctgtcctctaagatccctcccctcaccccccaacccctacaggccctggtgtgtgttgttccccttcttgtgtccatgtgttctcattgttcaattcccacttatgagtgacaacatgcagtgtttggttgcctgttcctgtgttagtttgctgaggatgatggctttcagcttcatctatgtccctgcaaaggacatcctctcattcctttttatggctgcatagtattccatggtgtatatgtaccacattttctttatccattctatcattgatgagcatttgggttggttccatgactttgctattgtaaatagtgctgcaataaacatacacgtgcatgtgtctttatagtagaatgatttaattcctttgggtatgtacccagtaatggggttgctgagtcaaatggtatttctggttctagatccttgaggaatcaccatactgtcttccacaatggttgaactaatttacattcccaccaacagtgtaaaagtgttcctatttctccacagccttgccagcatctattgtttcttgactttttaataactgccattctaactggtaggagatggtatctcattgtggttttgatttgcatttgtctaatgatcagtgttgttgaacttcttttcatatgttttttggcctcgtaaatgtctttttctgagaagtgtctgttcgaatcctttgcccactttttgatatggttgttttcttcttgtaaattcatttaagttccttggaaattctgatattagacctttgtcagatggatagattgcaaaaattttctcccactctgtaagttgcctgttcactctgatgctagtttcttttgctgtgcagaagctctttagtttaattagatcccacttgtcaattttggcttttattgcaactgcttttggagtttttgttatgaagtctttactcatgtctatgtcctgaatggtattgcctaggttttcttctagggtttttatggttttgggttttacatttaagtctttaatccatcttgagttaatttttgtaaaaggtgtaaggaagtggtccagtttcagttttctgcctatggctagctagttttaccagcaccatttattgaataggagatcctttcctcattgcttgtttttgtcaggtttgtcaaagatcagtcggttgtagatatgcggtgttatttctgaggtctctgttatgttccattggtctatatgtctgttttggtaccagtaccatgctgttttggttactgtagtcttgtagcatagtttgaagtcaggtagtgtgatatctccagctttgttctttttgcttaggattgtcttttctatcctgggtcttctttcactccatatgaaatttaaagtagtttttttctaattctgtgaagaggcaattgtagtttgatgggaatagcattgaatctataagttaatttgggctgtatagccgttttcacaatattgattcttccattccatgagcatggaatgtttttccatctgtttgtgtcctctctcatttccttgagcacaggtttgtagttctccttgaagaggtccttcacatcccttgttagctgtattcccaggtactttgttctctttttagcaattgtgaatgggaagtcattcatgatttggctctctgcttgtcaattatttgtgtaaaggactgcttgtgatttttgcacattgattt

SEQ ID NO: 94521 - DNA, 12781 bp, Homo sapiens
aagcttccatcttatcctatagcaagcattttctttgtgtgggatagaagtacataatgttttagaatcattaaagcaatggaaatgtaaaaatgtccttttggagtttcaggaaagtattcttactgatatgaacagtaaaattaccttattcattataattcattgactaaatatagatctcttacataaaattcttctgggtatattaaactgaaaaccactttgataatatcacgtgtccatttacatcaagaaaaactgtacttacatatttttattttattttcctttatatcaatctacctctttagtaattttctctcttataaattgtctcaaactggggttgaatattttgccatcatctttttgcaattctctaatacatttataaaactgagattatcaacaccacaagtatgattttgaaataatttccaaactgtttctatggacttaataataaccaactgaaagagcatttttttcctaggataacagataactcacatttttctttttacctatattcctaaagctgtcatttattttagttatgtaggctgttggagaatatcttttcttgaattctgcctataccattctttaaagtactaagcttagctttcagtatatttttgttaaaggtaataaaaatagtaaaacattcaaatgaatctagaaaagataaaatattaacaggaaatttcataagtgaagcttactatgtttttttatttgtttgttttgagacggaatttctctcttgttgcccaggctacagtgtaatggtgcgatctcggctcactgcaacctctgcctcccgggttcaagcaattctcctgcttcagcctcccaagaagctgggattacaggtacccaccgtcacgcctggctaatttttgtatttttagtagagacggggtttcaccatgttggccaggctggtctcgaactcctgacctcaggtgatccaccccccgcttggcctcccaaatgctgggattacaggtgtgtgccaccacagagagccaaggcttactatttatatctttttgttaatatttttctatagtcttcatcttatctagtattataaatgaaaatgtttgaatggttaagattgcttcataattaaaatattaccataaaatttccacacttttatttaatcctaattatttaacaacttattttacaaagtgtattttaacctaaattcaagaaaacttccaaaaatttagcttattttttaattaataattttctgacagtattatacagcattctatatattactggtgttaaattaaacaaacaaaaaataaacctttaaccttcaagagttccaagtaatgtctgtcacaaatatatcttttaaaactaataatatttacagataaagggaaaaacaaattcagacaatcagaaaaagcaaaaagtcaaaagaactaataagtggcaacagctttctctaagcaaaataaaacagagagggaaaacaaaagcatgtttactttaattacaccactataggtaataacatacataattattaaacatctagtgtatcagacacagctctgaatacctagattatttctttaaatgccaatattagacattatattaggtgctaagcataatactaaacaaaacagacgtgatttccaacttggtactaatgacaaaataattggcaatacacataaacatgggcacacaatctattcaaataacctacaatataaaatattcaaggtgctctctgagcatgtaagtgggtttccagtctgtgtacgaggggtctgacaagtctgaaaggtaagtatcaggcaaagtgatgatatgcaggtatcagtgatggagacaaggaaagataaagttccgaatggaagaaaacacagacgatgtgggaagtcctatgaaggctctgagattttaccctatttactagctaacgagttaatagacaggtttcgtgactgctaacaaaaggcacgcagttactggttcagagaaaaaaggacattattatagcacagcaggaagcatgaatttcgtgttcatgttctttcagcttacctcctgaagtccacagaggaggggaggcagcttgcaataggtcccacgaatgtagcacatgcagtgcatttgcatgacagctggggaacaccaagcataagaaacttgtcttttataaaggactacaaagaatctgcccaacctttgccttcgagagagacattaactttattatattgaagagcaaacagaactgccctttgctttggaggtagacactgtcaccttccaaggctgttcattataccaatagtcttgaaaagttagtctaacaggaaatgtaatgagtgcttctgtttgcaagatgtgcggaaacagggaaaccaagctttcttgcaatttatatgatatcagatatgtctttccccaggaaggttgaaataattcatccatgagtgtatctgaatatatccctctgggctacagcctggagaattgtactttcatgattgccccaaattctttcactctaaggatctgctgagattttggatccctcctgagatagatttttataatttacattttccctgggaaattgtctctttcaatgagatattaaaattcactcgcataagattttgtaaagtgtttttatgttacttttaatttcctctttcagggagtattattcccctttcatttctaattttgagggtgtgtacctacttttatttcttaggttgtgaataatttttttatagagaacttctgcagttttagagcaattctcatttttcttatttatttttcaagtagtattttctaattttatttttatgatttcatgattttgcttgctttgtgatttaaatgtttaacttatttaaccattaaaaatcctttctgtttcttttatctgtaaatgatcacactgtggtgtttcattttgttttgtttcctaattggagtttacattttctcagatgttttctatctgagataaaacctcttcaattactatttacctctcctgtggccatcccagttcttttcggtctttcacaatcaccctttatgaaagagtggcccacacttaggctccaattctcctaacctgtctcttagtcttcacatgttttgccttctgacattacttctgtctatattagacatttatactcagtgaaaatctctcctctttatactctctatcactattcttgtccagaccatttctctccttcttcagcttctgaatgttggattcaattaaggctcaactctcaagtctttccttttctcaacaagttcctatttctagacaatgtaattcacttctgggatttaaatttgttgagcactccaagattcctatctctagccagggccactggattccgaatatgtataatcaaccatcgtatatgtttgttgattgaatgtgcatgataatgcacatccacttgatgtgttaagaaacatcagactcaacttatccaaaatgtattaagatttttattattcttagaacctcaaatgtactccctcttctatgttctctatcttatagtaacaaccaaccatctagctagttcccaacttagaaacttagaagttactgttatttttacttgtttcaactagcgttccctatctctcactatagtctgtcaattgaatttcttgattcctgattcaatttaatttccttatcaatttttgtcagttttcaccaagatgtagatgtactatatgtatctaaaccataatcttctaactggaattactgtaactctttccttacctttctactttcatcaaaatatggggccatctctatttctcattttagccatgtggttacttaaaaaggtgcagctgatcaattatatttcctcaatgtgtataagcattttatgaggaaagaaatcataagtcttttcatccaggattaagcaaagaaactttatattgcaaatttttctttttctttctttctttttttttttttttgagacagagtcttgctctgtcacccaggctggagtgcagtggcgcgatctcggctcactgcaagctccgcctcccaggttcatgccattgtcctgcctcagcctcccgagtagctgggattacaggcacctgccaccacgcctagctaatttttgtatttttagtagagacgaggtttcaccatgttggccaggctggtctcaaactcctgacttcagatgatccgcctgcctcccaaagtgctgggattataggcatgagccaccacgccaggccgcaaaattcttaaacagaattttcataaagtggatcaccaatatgtttcataatacatcatcatctagatgcatgcatttcaggaattcatattgttaatcagttaactcacatgatcatctcaagagattcacaaagcataactgacaaatttaaaacctgttaattataagtttgtttcagcaatttggaaatataaagaaaatattctgataacttatggcaaacattagatctcaatttaaaatgataaaattttatatctgagacaagacaaagatgctctctatcatgatttatgctcatcactgcaccgaaaattctacctggtttaataaaatttaaaaagctttcatttatgaataaaaaagaatataattattatgcatgatattgaatacttagaaaatagaaataatttctattgattttaataaatgttttgctgtttatcaatgatgccaggtaaaaagcttatatgaaaaaaagccatgtttgtgaatgtgtgtgtgcgtatatacagagagagagaaattgtgatttatttatatatatatatatacaagtatgcatatattacataataaatagtatgtgtattctatataatacatttatatagttattttaattgattatgaaaaattataagccatgtagatcctctgatttctttattaattataagggctccatcctaccatggtctcactctgaaattatattcagtaatttttgtatgaactgctaaaaaaaattctatttctcctagacttaattcagcagggacttccttagccctcaaaatatcaaaatatgtaagttgtcaccatcttggtaatagcataacagcatcaaaataatagtttgctgctaacgtgaagaaaattaatgttaagagggactatgcctaaagctaggccatgcggaaaaggtagatgtttatcatatagacaggggattaaaagttgagttagttaataataatttaagtagagtagcaagtcacatctgtaaaagtactattacctatacattcctatatgattacatctcatatgaataggcattgtgcatgttattaggccctgtattttacaaaaggggaaattataatcctggtatccaaatatccaggtaacctaaacttcaagtagcaagcttggccaagaccaccactttctttaacctgttaactctgacagttagtccaaaaatcacaaaacagtgagtaaaggcgcggctggattctgggatttcaaacaaaacaaaaattgataggcacgatgtgacctgtgaattaatttattaagaaaggtatagggagagtcagattatgtaggaaaataggcacaggcaagtccaggaatatagacagattttggatcagaagtttaagttgaacatgaaagatccaaaatttctttgaatatttataaagcgaatcatcaaagatagatttttacactttgatattttgccaaaggcaaaagaataatgatatacagaatattttaatatcagtttaaataaatataatattatatttaaaagcactttgaatttatttttttaaaaagtagaaacatttctcaaatattaacatacaataatgtaagcgcacttgttaaaaaaaatcatgtctagaataatactgtctggtctcatcccgctccatttattaatttttttaaggaagaagtattttattattttgctgcaaagctgttgcttcactgtataaaaatagcaccagcaaatgcagtgtattgcaaaattaagatggtggtgttcctcatctgacactgtacaagcaacaaaaacctcttaacttccagttatttccagtggaaagatcattaagtatttcatcccaaatccagtatggatayatgcaagttacaatattacataaggcttaagaataacaacgttatctttgaattatgtaatttttataaactagtttttaccatggataatttcatgaattctgaacactatagcctagtctaaaaatcataggatwttgtgaaaaagatgcgttattatatttatctataatcattagaaagttaaagggcattttctttcattagcaatgttaacagtagtttccccccgccgccccccatcggtaatgctaaaagttgctattctaagtcttctgtccaccattaatttaagacaactctgctgggttgcgttatttcatactagtttatttaggagttccattttcactcctcaatagattttatgtatttctcataggcttcttcactcataagttcatctagttctgaagggttactttggaaagtgtgaaagctgctagtgaactctattctcytttatcagaagtaaccgaaattaatgaagctcttgcagaaaatccaagacttgtaaacaaatcttgttatgaagatggttggctgatcaagatgacactgagtaatccatttattaattttatgacctatgccttaggttcccatttgaaaaatggagataagaatagtcctgttttctagaatagtggttgcaaactaagaattcaataaataaaagctctaaaaacaatacttggaacatagaacaaacatttcccaagtattagctggatcttctcaatatagaaagaaattgtgatgattttttttcttttttctctggtgttggaaagcttaaaactgttttgtaatctaagtaaaattaaagatatattatttaatcaagttgaattccaacgaatgcaagcaatacaataattaatgtataaaaataatctatattgccttaataatagagtcagggcgaccagaacaagtcagtgctcgaccagttcaacgcccgccagttcatctcttggctccaggacctggatgacaagtatgactgcaggaagaccttcctcctcatgcggcagcagcacgaggctgcggccctgaacgctgtgcagaggatggagtggcagctgaaggtgcaggagctggaccccgccgggcacaagtccctgtgcgtgccctcctgctaagtgctcatggtcgacgtcaactacgactttgtgttgttgacagcgtgacacctcgggacggccgcaggacgcaggcgagggcggcatggctgcccagagcggctgctaaaccccagggacagaggagggagcgccgtgtccacccgggcggggagagaccccgagagagactgcacttggccacagcgtctccatctcttccagactggtccagaccatcagggaggtgaaacacgtctcttctctaccagctgcccggcgggggcaaagcccccagagcctcaccggccccggcgggacaaggagaccttgccgggcgcaggtatggcagcttctatctgaaaacggtgaccttcgggcccttttctccagcaactgcagaggtatttcaggagttggagaacggagtgcattttttaaaatgtttgttccattctgatgaactaaagaaaataaaattaaggtgtccacctctcacaaacagtgacctccaggtcggaggggcaggagcgccgtcccagccatggtcctgttgccacagagctgcggcggcctcagactgggcttaggacctggcgcggagcaggtcgttggccgtgccacctgcccaggcagagggacacagagccaggatccccgtagtgtttttaatggagtcaaatccacgtggtttgtcaattttttcatttaatcttgggcatttttttctctttctgagaccataacttgactacagagccaataatcatataaaaagtgcatccgtaagcactgtacagttttatatacattcgcaatgtacttttgctgccttctagaaaatttactttgcaacacattactgcagttgtaaataacttatgcactgtaacatcatgtgtaaagaaataaattaatttttaaaaattacattttcttaaatgttttaattctgaatgttgcaatacacaatgtggttaccttttattcaatgttagacgtgtgtgtgtgtgtgtgttgcactgaaaatgtcaacactaatgtgaaaatattcttgtcatataatgcttttaatttggctttattagttgaagctttgattttgtaccatcataataaaacaatggttagttccaaataaaatttatcataatatatcaccttaatagtaataaaaacatctaagcattacttataaggatatatatatacacatatatatatgaaaactgaaatatatccatagattcttaacatattcaattattataacagtaatatatggtcagtaataataataaccttgagaacaaaaagaagccctaaagaaataaaaggctgtaatactactgtgtaaaccttaccactactaaaattttattcattctttctttttaaaaatgtgtaaaaatatgtgcaacatttgtctatcaaacttacccaaaccaaaatattaatagtgctgatgttaggaaactatgtttgtatatgtgtttgtgtgtgtgtgtgtgtgtgtggacatatatttgcctaaactaaaatggttcagacctctaggaggccttcttaaaaggtaaagggagtcctctccactccacccgctccttcatatatcctactgcctgaaatgaggctctaatcattggttctgtcaatcacattggacaatgagaatgaaggccacatctcgcctcctggtcctgggacggtttgaactatacatacaacatttataaagttttatatgtgtatattttatataatctacatatatgtattacacagatgataattctctccttcttttcatctctctatatatcctctaatcctaaataaacagttctgatatgttattagaaacagaagagtctacctaaccataacggaatgtttattttcctaatgaaataattttatatgatcctaaatatgaattcatgagatcatcatttttaggctacattttttccaaaatgttgttaactcgccatttaagatatttgtgtaataattttaatctcattcaacttccagtcttaatcattttgacttcagccatataaattggtatagctgtcatccattagcaaattatgaaaatataattatccctgcacagtaatcaccattttaatgttatttttgcagctgtgctaatatgcatttacggatttttgagtttgtttgttttttctcctatggagaaaggcgcacaagcttgataagttataacaggaaagatgtcagttctctaaatatacacacatatgcaagattcaaaagagtattccgtttcctggaggacttgcacccaaaaaagaatgcacttcctcagtcaaatatgattaaatccacaacccattgtacagcattacttgatgtatcttccccaaaatgtaatgaaaacctcccttcatataaaaactctaaatgatactttatttcatggttaaagagacttctaagaattttaatacctctgaaaataacaaatccgttaaagaacttgaaagcacttacatgttaataactataattcaaaaaaccagacttgattaagtgataatagacgtaattgatcattcaattcattgtggattctgagatttattaaattgtttatactgttaacagttattaacattgtaaataacaaaaacccaagtgactattttatcatttaaatccccacaataaacaaaatcattcctactcaaatgccaggttattttaatggagataaagtaatctctcaaaaatcttagtgggcacatttgttttctaatgagaattatcattatgtatttttaattgtgatatatttatcactatctcaatgatgtcattatcctataattttgattatagataaaaccttttgattatcatacaagactccatcaactccaacttcccgttcaattattgaaaacaatcttaaaaccatgtagaagctaattataagacagcatgaatagccagaattaatataaataatatcaatggttcatgttctcacagcaggattctgttaaacacttactataaataaccacatagttttttttaagtgttaatgggaaaatgtgcttatagaatgatttcctgtattataaaattacaagcaaatcattccacctttctgtaccattctgctgcaactgaattaaagctcactttctccatctattgttgcaacactgaagtttatggatgtcatgtgcattgtgctgtaactccagagagtatcaggttaactagaaagaagatagcaattacataggtacttactatggattcaagttcataaaaattgtattttaggaggaagaaactgtaacaactaagatgattttatgataataacaaaattaaaattctaaattatacttgaagtagcaggatcctggggaataaagatcactggcagccaagaaatgtaaatacatatatgaaccagctgtgtgataaagggcaggccattttaatacttgaatcttcagttatcatttttctgtactattggagatttgagctaaattatgtcaatagagaaaacagtgcaaatgaaagtaatttccatataaattaaccaaacaaataaaacaaatagagaaaaatagcaagataaagttacaaatcacaatgacttcaaaggttgagattccccaaagagattttttttgctagataatttagtgcccttgaagcctcaatgaaattctaacaatgaacttaaggaaaagaacacctgaaaaaaatatttcttttgaaaacaaggtttgaaacttatagttagtatgaaagatatatagtaatttaacatttatgtaatatataggtgcttaaaatgcattcatagattagtatttgtttaggcaaataaacatttactttaagtgttttacttcttatcattttaaaaagataatttcatctctcagtcacatttctgtcttgctaatatctgactactctagagtttacagctactataaaagattatgtttgaatatgtaatataataaaacaattttttaaaaactagattattttaatataagaattgatgtaaaaatagtttcaacactaaaaaatattttatcttagtaagaaaagcaagaaagagatatttcatttactaaacatatccagacttaaattaatatttgtttgttaaatatttttaaatagcctactgagaaatcataatatgcatatcaaacaacacgatacaaaataaataataatttgcaaagataaacagatagatcagaagcctaaatgaagaaagtagtaattatatatataagtcattacatatgagtaagttacagcatatgtgaaagattaatatgcagtttaaatgaatagagagccaggcatggtggcacattcctgcagtcctagcttctaggagactaaggcaggaggatcacttgagcccaggtgttcaagtccagactgggcaatatagcaagatcccacatctaaaaaaaaaaaagacagaaagaaattctagattcattcctacccccaaaagttgttttaatgtttaaggagatatatgaaaaacaatattgacacacgaagtttcaaaagaagttagaaaaattatgggagctaaattatcaaaagaatgtaccaaaataagaaagtagaattcaatatgaaaatatgtatatgaaaaaatgagtttttttaaaaattcaaagcattagaactaagtatatacacacagatatacatgtgctatatatatatatacatacacatatatatacttagtagagtatacataatattctgtaaaagcaatatttaaatttagcttataaataattttacatcttggtatatttatttaatgcattcctgttttttaaaaaaattatgtataatattacacaaggccattttggagtctgtttccaatcttgatccatgtgtgctttaagtataatcaagtctatcatttgtttggtaatctcttgtttctttcctaatatttttttctagaaatagttctagtaatacgtaagactttatggtttgactttcaattttgactttgtctatatttaaaaaaatattttctctatgacagggtcagcaaactttcgaccgcgggctaaatccagccttttgcctgcttttgtaaaattttattggagcaggacttctaatttgtttaagtgtttcattaaaagggttaagtagcgacaggcgatttcatatagcctgaaaaggctaaaatattactatttggtcctccagagaagaaaaaaaaattgtgttaccaactgttttaggaggttatgccaattttgttttcctccttcaatttctcatgttatatttttaatttccagggcatgctttgtttcctgctgtttctttcaaaagcaagatttttcttgcttcatggaagcaagtacttct

SEQ ID NO: 94522 - DNA, 81134 bp, Homo sapiens
gggcttgggaaacagccgagactggaaaaagcttgtttctagctgtttttttttttcttcctgtccaatttaaggggcaggttcttatcgttttaaagagcctccaaaggtacttacatatataatgaaaagctagggagcctgaggcaggagaatcacttgaacctaggagacggagattgcagtgaaccaagattgagccactgcactccagcctgggcaacaagagcgaaactttgtctcaaaaaaaaaaaaaagaaactgcaatgttgcccattcactagcaatgaatatttctacatggtacaatgggttacttcatgatagttattagaccattatcagatcttctaactgtcttacatagctttcccttttcatcttttagtcacaccgggataggcaaatttacaaatatttcataatatattctgctccagaaaagataaaaagtgggcatgtgaattccacgctgaaaaaaaaacaaaaaacctttcctgaggtacaaggtggccctatttgctcaaagagcaaagaaattaagactaccaaaaaattctgcaacatctcataacttcaacacactcatgtaactctggtggatttcatcagacctctcctctgtgacaactgtttaattaccacacattggtgatctcatataatcctcaacaaccccatgaagtaggcattatttacaaattacttattttacaaagaaggaaactgaggttgagagaggctaaatcatatgcccaaagtaaaagagataataaatgctactttgggaatatgaaaatagtccagctaatattttgtggttattttcaaagttgcttaagagtttaggacacaatctaataatatcctccaatgattctattaagtgaaaatcaaaagatggctaaacaaactaaatagtaattacgggtcaccttcattgtgtaacaactgcccacgttactcaaggtcaccttcggtgcaaatcaagtatgaaaattaatttgttctcctcaatctattgcattttctctacataatgctggtctcaaaactccctgtacctgcccaacctttggataagaaaaaaatgaccacgattgccttcaggacagctaacattgttttgtttttgttttcgagacggagtcccgctcttgttgcccaggctggagtgcagtagcagtcttggctcactgcaacctccgcctcccgggtacaagcgattctcttgcctcagcctcccaagtagctgggattacaggcgcccaccaccacgcccggctaatttttgtatttttagtagggacggcgtttcactatgttggccaggctggtctcgaactcctgacctcaggggatccgcccgccttggcctcccaaagtgctgggattacaagtgtgagccaccgcgcctggccagctaacattgttaatccacaaataacttcaaagctgcatcgataccatttgggttgtttccctgcaattaaaccaggtgaagagctagatttacagtttccgtctattacagtaataggaattggagaagatatttttctatacagggttaggagtaaacatatccccaaagctaaaatgtaggacatcacttaaggaacgaggtgtctaccaagaatgtccttccctgaaatcaaaggttactgaagaattaaaaagcagggctagactatcactccgataacagaaagagagctggaaaccgaaacagaaatactgggtgataaagccaatgctaaggacatcatcccaatgacttgggacgagatgggagacagacagcattcaagattagaaggccgagatgttcgtaaaaggaaagcacacgagaggccgcgaggacacattgatataaggttgttgtaaatgatttgtcataatttttgctcaccttggagacgatttagtgcgcttttgaccaagggaaacatcgtgaaggtgaagctagaactgcggcaatacagctgctgctttggtgccaattcgcttcaggtacccttgaagtgagctgaaaaacaaaatggctttcagccgggatccgtaatgagatttgacgaaatctcgcgatacctgtaaaacctatagtaattgcaatcccttttcccgcgaggaaaaataaaggccttttgggaaatgtagtttccggctttataaaatgacgtatggtgggtggtatctaatgaagaatgaaagaactccttgaagccaggtttagagctctatagagggcagccgagagacagatcttcgaccgaatcgtctaaggaactagcttcaaaatggcgttcaagttccacaagcttcggtttagtatctccacactagctctttcttctttctgttcccccaaaacttcctttacttctctcattttttttgtctgctattactactatactaattggcttagcttttagttttcaaataacgtcaagtttagagaaaagttgcaagaacagtaaaaacttctgtaatatgtagataaatacgtgataaaataactttggaaagctattggccgggcgcggtggctcacgcctgtaatcccagcactttgagaggccaaggtgggcggatcacgaggtcggagttcgagaccagcctggccaagatggtgaaaccccgtctctactaaaaatacaaaaattagccggcgtggtggcrcgcgcctgtcatcccagctactcaggaggctgaggcagaataatcacttgaacccgggaggcggaggttgcagtgagccgagaacgtgccactggactccagcctgggcgacagagcgagactacgtctcaaaaagaaagaaagaaaagaaagctgttaggcctggcgcggtggctcacgcctgtaatcccagcactttgggaggccgaggtgggcggatcacgaggtcaggagatcgagaccatcctggccaacatggtgaaaccccatctctactaaaaataccaacaattagctgggcgtggtggcatgtgcctgtaatcccagctactctgtagactgaggcggcagaatcgcttgaaccagggagtcggaggttgcagtgagccaagataccaccactgcactccagcctggtgacagagcaagactccgtctcaaaaaaaaaaaagaaaagaaaagaaaagaaaaaaaagaaagaaaagaaatggcaacacggcaaaaccccgtctctactaatatacaaaaaattagctgggcatggtggcacatgcttctaatcccagctactcgggaggctgaggcatgagacttgcttgaaccggggaggcggaggttacagtgagccaagatcgcaccactgcactctagcctgagacctgtcccaaaacaaaaaaaataaaatacatacagttcagtggcattaatggcattcacattgttgtgcaactatcaccattattcatctctaagactttttcatcgtgtaaaactaaatgctttgattatacattttgactattgaaaatattaacattattccaaaagtcaaaactaaacagactagtgtacttagagaagtgtcattccctcccctaactgttgcattccatttccaccaattcctataggtaaccgatttcattactttctggtttatcttgtgtgtttccttttgcaaaaataggcaaatacctgtatgttttcttatttctctattttatacaaatgtagcataaaaatccattatcattttacataagtcttcctcattccttttttacagctgcaaaatctgtggtgtatatgtgctatagtatattcagtcaatctcctatgttggaatatttaggtagtttcaagaatatttcaatttcaataatgctgaaatgaataactttgtgcacacatattttcatattgctggatgtctctctccaaggtaggttactagaagtgggattgctggattaaaggataaatatatgtgtagtttttttagatattgccaaattatagatgttgtaacgttttgccttcccaccagcaacgtattaatataaagggtgcctgactccccacagccttgctaatagcatgtagtgtcaagcttttggatttttgccaatatgataggtaagatatcccttttaaactttaaaatttttatttttaaaacatacacatagtaaaattcactttttggtgtacagttctatgcgttttgacaaatgcatacaattgtgtcaccaccaccacaattaaggacagaatagctctagcatcataaaaacacccttgtttgacctctttgtgatcaacccttttccctacccctagcccctggcagccactaatctgttctctgtaccaatgagtttgccttttccagaatgtcatatatagattgaatcatacagtatgtctcagtgtacttttattttgcattttttcttttttctttcctttttttttttttttgagattgagtttcgctcttgttgcccaggctggagtgtgataacacgatttcagctcactgcaaactccgcctccagggttgaagcgattcttctgcctcagactcccatgtagctgggattacaggcctgcgccaccacaccgggctaatttttaaatttttagtagagacgggggttttgccatgttggtcaggctggtcttgaactcctgacctcaggtgatccacccacttcgacttcccaaagtgctgagattacaggcatgagccatcgcacccggcctgcattttcttaatataagtttccataaatgatttaactttttttcacatctgtatttcacatctcttcacttcggaaccagctatttttctttccatcccatctccttgtctctccaacatactgaaattaatttcctggtttttttatccagtagcgcctaaaataatagtcatataatattttccacaccatcaaaataaatccaaattgtaggcagattgattttatcttgttggtgttttccttctttacaaccttacttttgtacccatcccccaaacaaaataatgaataaaaagaaggaatttgctgtctataacctgcaattaaagtccttgttggtgctttaaatattaagtcaaggagtttaactgaaaaaacaaacaaaaaaagccggccgggcttggtggctcacgcctgtaatcccagaactttgggaggccgaggcgggcggatcacctgaggtcaggagttcgagaccagcctgcccaacatggcgaaaccccgtctctactaaaatacaaaaaattagccaggcgtgatggcgggcgcctgtaatcccagctactcgggaggctgaggcaggagaatcgcttgaacccgggaggcgtaggttgcagtgagccgagatggcgccactgcacgccagcctgggctacaagagcgaaattccatctcaaaaaaagccataaataaacaaaaactttaaaaaataatctttgatgtcctcttttttcagcgctcctggcagtttctaggacacaataggtattcaacaagctcttgttcatatttacctttaaaaatttccctcagtggtattaggtatatttttgctttcctacttttattttttcactttgaagtactttggaggcaggataacggactaaatagctcttatccctcacgcggctaggtcccatttttctagaatattacatgaaggcggcgaatttcaaggacttctaaatgagtctttgaaagattctgttctagcaacttcaagccattttggactccgaaaactccgcaatatttcacaactgcgcatgcgtgcttggaaagcgtcagcgcgctagatgtttacgtatcgagaaaggggcgggtcattatctttagcggaccaatgaaaacgctccagattatcttttttctattggccgaccggggccaattagaaatcaaccttcttttagcgggcgtgtagcgccagcgcgctgtgacgtaatgtgaggggtctcccggcagggctgagctggaccaatgaggaaaggcaaggggccgatttgcctgttctcacgccccaccctcagacctagccggagcaaagtttcacttatagaagggagaggagcgaacatggcagcgcgttggcggttttggtgtgtctctgtgaccatggtggtggcgctgctcatcgtttgcgacgttccctcagcctctgcccaaagaaagaaggaggtgagaacgcggtttccagcagcatgggcttttcccaatgactggggcttaagagggtctgttcgcctcttcccagccccctttccctgccgcttctatgcctttggtggcttcaattacgcggttttcggagttgtggaattcgtgagagaaggaactgtaactctttgtcttctggggatgtagaatctgagagtggagtagcgtaggtgacagcccgacttctacagtcttgtgaatgtgcatagctatgagttttgacacttttgagtgtgggccccgtcaggtgttgggggtggggagttcgactttagatcccaggagtaggatatctgagactctatactgctggccgatgtaactccctgaatgatgtgtaagagttctctattttctagcattttcatttcaggagtgtgagagttagaccaaagagtgaaattatgccagatttattactttgtccaaataattgtttcaaggcaatttaccagattgaaagctcctaaccattttcaatcattccacaaatgtaagcatgctaggcaatgttctaggcacttgatatacataaatgaacaaaactaagatcttgtggaactcataggctttaggaagtggaggagatacagtattctcaccattaagcaatccaggtagaggaattttaacaatgcgttttcaaacgtttgtgatttggagtcctatactcttaggactttaagactactagcaattacttataccctctaattttatagatgagaaaaagagtcttaaatttagaaaatgaacgaggactcaaaccctacgtcagtcattctaactctatttcctgtacattctgtgcttcctctaatagagaaaaactgtgcacatactctaaaaataccagttaagcacttcagatacttgtctacttgagctgaattaagaaagaaagctatcttctctatgtttctaagtatttgaactattccataagaagaaaaactaagctaggaagttaaacttaatgagttgcttattagattggcaaagagtacaataaaaatatacaattgtcaaaagtatcgtgaagtgagcaggctcagacactgaaactagaaattgatgtccttctttgggaggatcctaagctatggttatgtggaaaagaagatgcagagcaatgcataattttatgtcttagaaattttttatgttaaaaacaacagcatcccctatatataagtatatgtgtatgtatagagaaatctctgtaaggatacatgacaataccttaacagtggctatctctaggcagttgggattatcgatgaggggaacgttttcacgttttactttacatgctggtattgctggtattacctgaatttccacgatgaccacttttttttttttttgagaccgggtctcgctctgttgcccaggctggagttcagtggtgggatcatggctcactgcagcctcgacttcctgggctctagtgatcctctcacctccacctccacctcccgaatatctaggactaccggcatgtgccacaatatccctggctacttttttatctttttgtagaaacggagtctctctgtgttgacaggctagtctcaaactcctgggctcaagtgttgcttccgccttggcctcccaaagtgttgggattacaggtgtgagccactgtgcctagtccacttattctttttaattaaaaagtgaaggctttttaaaacttagcatttctaccagtgaaattatatttattcattgactctctcactgaactggaagcacaacagcctagctgaaaataggttttgttttttttttaaaggaatcagcactgaattgtatactttaaaatggtcaatatggtgaattttatgttaaggcaataaattacatgccttccttgatctttctgtactctcttggaagtacattcacccttttcatgcatgtacaagacttatgcgagaatatcttccttttctcttaccccaccctttcattcacctgaagattcctactcttcaagtcttagctcaaacagtatcttctttcttcctcggctaaagttttcttggtgcctccaggtgaactgagatgaattcagcacagcatatagtcattgtaggtatgtatgtatttatttggagacagggcctcttacacaggctgcatgctgtgcaatggcactatcatgactcactgcagcctctacttcctggggtcaagtgatcctcccaccttggcctcccaaagtgctgagattacaggagcgagcctccatgcctgacctgtattgtccttgtttatatgccagtctttgccctaacactgtaagcatcttgaatgcaaaaacttcttaatttttctttacctcacatccagcattttctgtcaaaatgtcctcaacaaacatcagattaactgtgtacttatataaaatcaggaatctgttctttctttttataaatgtatatatatatttaaaaaaattttttttcagacagggtctcactctgttgccaaggctggagtgtagtggcatgatcatagctcagtacagccttatgacctcactgggctcaggtgatcctcccacctaagacttcccagctgggactacaggcatgtgccaccatgcctagttaatttttatattttttgtagaaatggggttttgctgtgttgtccaggctggccttgaactcctggactcaagtgatctacccaccttggcctcccaaagtgctgggattacaggcatgagccactgtgttcagccgggaatctgttctttcagttgtaggttttcttagatttcacaacataaaattggattttctcatcagtaagcatggaatttatataggctgctaaagatgatttagtttttcctccttccctctctgagaatggtttaggctgtctttaaaaagactactatgatactccttagacacagtttcaaaatatgggtgttctgttgcagaacatttttttgtcaatttttgaaaacattatttaaaaaaattccaggtctatctactataataaatttgactttaaataatagggtaatgtctgatcttaaaatctattttttgctgggtgcagtggctcacgcctgtaatcccagcactttgggaggccgaggcgggtggatcacttgaggtcaggagttcaagaccaggctggccaacttggggaaaccccgtctctactaaaaatacaaaaaaaattagccagccagggtggcacatgcctgtagtcccagctactcaggagtctgaggcatgagaatcgcttgaacaagagagcgagactctgtctcaaaaaaaaaaaaagtgtgcatatatgtatattctttttaaaagatacctcccctaaataaatatgattaaaaatcactcaagttcctcatagttgtctattgctaaatggaatgctaccctgcttattatttatacctttaacaatgttttcattggaacgtggacttatttttctttttaaatttttaaaaatgttttgtggagaccgggtctcactatgttgaccaggctggtttcaaactcctggcctccagcaatcctcctgctttgacctcctaaagtgacagaattacaggcgtgagccactgagcccagccatttattctctgatatttatcgaatgcattctacatgccaggcactatagtttacactcattwtctataatacacacattaacattgcagagtaagtattaaccccttcgaaagataaggggactttaaagatgaggggactggccaggcatggtggctcatgcctataatcccagaactttgggaggctgaggtgggaggatcccttgaggtgatgggaggatcccttgaggccaagagtttgagcccagcctgaacaacatagccagactcatctctacccaccccagatagatagatagatagatagatagatagatagatagatagatagatagatgagggaactgacagtaagcaagagggtggttgggggcttgctcatagaagcacagctctaagaaactgagctgggatcccacactggtctgtctagttccaaagcctatgttttgtgctaggcaacaaaggcttgtttttgcagcgactggttttattttatggtgaatcctttccccctgttgtggaagggaagttgttcatcctcgcatctggtgttatcttagagaggcagcatgataaaaatgaagaagcatggtctttgataaaattattcatatttctttacttctgggaatctataataataataataatatgaaatgtggaaagtgatgaacacgcaatgcatactgaagcataataaaaatggtcatcataatgctaggatggcagatagatctccctccccagttttccaaaaaagtctgtagttttaaagaggatatgctttaatccacccccaatgatgtttaacaagttactctgagtctcattttcctcatcagtagaatggaaaaaatgctgatttctttggctattgtgaaaattaaatgagatgagggatgtgaagtacctaatgcagtacctggcatatagaagatgttaagtaaatgttagaaaataaagtgagattatattcctctgggtggtaaatgttttgcagttgatctttttgggatgtttaacaaggcaggctatcattggaaaaactttgctttgagaaatgactcatgaaagtatcacatgtgcaaaaaaccctgcagttctctagaaaatatctgattagagaaacaggcttagtagcagttgcagaacaattaaatggagacaccaccaaaaaattaaaaactaaggaaaggggacaaggatagattttagctctatccaggaagtacgtgaactgataatggagcagatggcatttaaggattaaaaatgctcacttctctgttcactgtcttcttcagtaattatctgcccgttatatttccagatctgttccagatctcttaatttaaggagggagttggaaatgtataccttaactaagaatttgttttgttctacttcatactaacatctgaagactggtagatgattaggaaaggtgaaaatatgaagaatttttatgaataaaccctgatggttagaacaaagacacgaataagttttgggagtactattcagccataaaaaagaatgagatcctatcatttgcaacaacatggatggaactggaagtcgttatgttaagtgaaataagccgagcacagaaagacaaacattgcatatcctcacttacgtgtgggagctaaaaatcaaaacacttgaactcatggagatagtagaatgatagctaccagaagctgggggtggtggtgggaggtggggattctttatgagtacaaacaaaaaacaaaaaacataatgaataagacctactgtttgatagcacaacggagtgactatagtcaataataatttaattgtagatttaaaaaattaagagtataataggattgtttgtaacacaaaggataaatgcttgaggagatggatatctcgttttacatgatgtgatgagtgcacattgcatgcctgtatcaaaacatctcatgtacttcataaatatatacacctaaggccgggcacagtggctcacacctataatcctggcactttgggaggccgaggcaggcggatcacgagttcaggagatcgagaccatcctggctaacacggtgaaaccccgtctctactaaaaatacaaaaaattagccgggcgtggtggcgggcgcctgtagtcccagctactcaggaggctaaggcaggagaatggcgtgaacccgggaggcagagcttgcagtgagccgagatcgccccactgcactccagccagcctgggcgacagagtcattccatgtcaaaaaaaaawatatatatatatatatgtacatatatatgtacacatacatacacacacacctactatgtacccacaaaaatttaaatttaaatttaaaaaagaatgaggccaggcgtggtggctcacacctgtaagcccagcactttgggaggccaaagtgggcagattgcttgagcctaggagtttgagatcagcctgggcaacatggcaaaaccgtgttcctagcaaaaaaaaaaaaaaaaaaaatagcagagcatggtggtgtgtgcctgtagtcccagctactagggaggctgagatgggaggatcacctgagcctgggaggtacaggctgcagtgagccaagatgtaccattgcactccagcctgggtgacagagccagaccctgtcccaaaataataataataataataatataatgtagttgtgtattttaaaataattaaaagtataattggatggtttgtaacacaaaggataaattcttgagggcatggacacctcattcaccatgatgtgattattatgcaatgcatgcctatatcaaagtatctcatgtaccccataaatatatatacctactgtgtacccacagaattttttttaagaaacatgcttttggggaaagttgcattttagaggaattcagactggtaatacttagctttcttgcttctgaaattcaaaagaaatttgaatggcaggatcagattttagctttaaatcgtaattaatagatcctatattccatttttgatgagtgatagtgacaataggacaatttctggttattaaagcttaagctactttggtagagctaatcaagttaaatattatgcaagcaggtaagatgaaattaaactgatgtctcactgccctttcttggtcctcttaatctcttatagttatagatttctataacacttgattattacaaataggattagagacattgccttctagtagtgaggtgattttttttggacatactagttaaaatgtttcaagagaagagaaagactttaaacttactttactttgttggtaagtatttcaattgggagtattattgctatttttgttttatttgaatggtagaaaatagactaatgtacgccaaggagaaggagggaaataaattgattgtgaatatcttgtaaattcaatgtgttttttcatagtaagcctgtaatttgttttataaaaaatatatccaatacaaattgaaagctttagatcagtatattttcttgaatgtttaacaactattagtggaggccgggcacagtcgatcatgcctgtaatcacagcactttgggaggccgagttggatggatcacctgaggtcaagagtttgagaccagcctggccaacatggtgaaaccctgtctctactaaaagtacaaaattagctgggcgtggtggtgcacgcctgtagtagtcccagctacccaggaggctgaggcacgagaatcacttgaacccgggaagcagaagttgcagtgagccaagatcgtgccactgcactccagcctgggtggcagagcaagactctgtctcaaaaaaactattagcgggaaaagtatttgcattaggagttgtttgcgaattaattgcttttttggagttgctgagcagttcacttgataaacctcttatctttacatgttatagtctttggaagatatgtttcttcctaataattttcaagtattattagaatgatctgaagtgcacaggtgaaatttttaacttttccatttgaaggttgtgactttggaagataaagaagaatctggaaaatgaatagtgggatttagtgtagtggcaatagaggaacaaaatttttatttctcaaccatgcctttccatacccaaataatgggctcttgacaaagaaccagaggcacccttaggaaaaagcttctttaggaatagagatttaccctgatcaagaaagctttcaattcaaatttgaagaaattcctggccacacatagtggctcccacttgtaatcccaacactttgggaaggccaaagtggaaggattgcttgagcctaggagtttaagaccagcctgcgcaacatagcaagaccccatctctgcaaacaaataaaagaaaataaccaagcatggtagcatgcacctgtggtcctagctactcaggaggctgaggcaggaggatcatttgagcccaggagttcgaggctgcagtgagctaacaatcatgccactgaactctaacctgggtaacagaatgagaccctgtctctaaattgaaacaaaagagagagagagaaaacaagaaattcccttataaatctattaactaaagaagacaaaaaagaggaccagtgaaggaagtgtctaggaagtattaaggcattatatttgagttaagtagaatatcacattcttcaaccgttccaggaggatcacgggttggtttattattagaaatggcatgctttttcctgttattcatcatttggttcacttaatgtttatttaatttccctttgctgtccatagaaatttatataacatgtagtcctaacccataagaatcagaatgtagagctgtgattctcaaacttcagtgtatataaagaatcacatgtgtaacatgttaaaattcaatattcttggaatctgccctggacttactgaatcaaatgtactgggggatgaaatctagaaatatggattttgatttttgttttttttttagagatggaatctaactatgttgctcaggctgaagtgtagtggctatcaccaggtgcaatcatagtgcactacagcctcaaatttctgggctcaaatgatccttctacctcagcctcctgagtagccgcaactacaggcccataccactatgcctggccagaagtctgcattttttttttaattttataaaatacagacagagtctcactatgttgcccaggccggtcttgaactcctgggctcaagcggcctcccaaagtgctggggttacaggcatgagccactgtgcccggccaaagtctgcatttttaacaagctcctttataccaaccacactttgagaaacacaggtttaaaaagtttattatccattatgataaaggcttgctctaggaagttttgggttactttatcactaaatctttcttttatgttgtattttgatcagtaatgatttttaaagatttttgaatacataaaaataagattgtaaaattgtacattcttttcagttcaaaacagttgttcttgagctaggcatagtggtttgagcctgtaatcccagccactcaggaggatgagggaggagtgtctattggggccaggagtttgagaccagcctgagcaacatagcaaaaccctatctctaaaagagatttttttattttattttagagacggagtctcgctctgtcacccaagtttcagtgcaggggctcaatctcggctcactgcaacctctgcctcccgggttcaagcgattctcctgcctcagcctcccaagaagctgggattacaggcacgtgctaccacacctagctaatttttgtaatgttagtagagacagggtttcaccatgttggtcaggctggtcttgaactcctgacctcatgatccgcccacctcggcatcccaaagtgctgggattacaggcatgagctactgcgcccaacaagagtttttaaaaattagctaggcatggtggcgcatacttgtagtcccagttatttgggaggctgagatgggaggatcacttaagcccaggattttgaggctgcagtgagctatgatcacgtcactgcactccaatctgggtgacaaagtgacaccctgtctctcttttttttttttgagacagagtctcgctctgtcgcccaggctggagtgcagtggcgtgatctcagctcactgcaagctctgactcccgggttcacgccattatcctgcctcagcctcccaagaagctgggattacaggcgcgcgccaccacgcctagctaatttttgtgttgttagtagagacagggtttcaccatgttggtcaggctggtcttgaactcctgacctcatgatccgcccacctcggcatcccaaagtgctgggattacaggcatgagccactgtgcccaacaacttttaaaaattagctaggcatggtggcgcatacttgtagtcccagttatttgggaggctgagatgggaggatcacttaagcccaggattttgaggctgcagtgagctatgatcacaccactgcactccagtctgggtgacaaagtgacaccctgtctctctctttttttttttttttttgagatggagtctcgctgtgtcacccaggctgaagtgcagtggcatgatctcggctctctgcaagctccgactcccgggttcacgccattctcctgcctcagcctcccgagtagctgggactacaggcacccgccaccgcgcccggctaattttagtagagacggggtttcaccatggtctcgatctcctcacctcgtgatccacccgcctcggcctcctagagtgctgggattacaggcctgagccactgcgcccggccttttttttttttttaagaacaatattgtgggattgggggtgattttgctccccaggagatatttggcagtgtgtggagatatttttggttgttgcagctgggagaggagggtgctactggcatgtagtgagtagaagccagggttgctattcaacatcctacagtgcactgacaggatcactcctcacaacaatgatctggcctaagacgtcggtagtgttgcttttgagaaaccctggtttagaatgatcatggcctgtttgagtttctacctcagtatcttactaactgtggcattttgggcaagttgtttaacctctccaatcctgttttctcaacagataagcaaatgtaaaaagagtacttaccttatagtgtcgttttgaggattgaacttaattatatattctataaagcaagaagtaactgcctgacacccgctagacattccaaatagtagctattattttctccataaatccaagagaggcttgctttagaatatcttaaaatattacgtcattgtgaataaggattatagcatctaattataatgttccaggctatgttcatgtaattttattgtaaaagtttttgtttgtttgttttttagacagagtctcactcagtcacccaggctggagtgcagtggtgcagtctcagctcactgcaacctccacctcccaggttcaagtgattctcgtgcctcagcctcctgagtagctgggactacaggcgtgtgccaccacacccaactaatttttgtatttttagtagagacggggtttcacgatgttggccaggctgttctcaaactcctgacatcaagtgatccatccgacttgacctcccaaagcactgagatgacaggtatgagccaccactcccagcctgtaaaagtttaaaactagttcatttgttgtgatctgttttcaattcattttaaagaaaatgaacccagtcggggcaaggtggttcatgcctgtaatcccagcactttgggagggcaaggatcatttgagctcaggagtttgagaccagcctgggcaacatggcaaaaccccgtctctacaaaaattagtggggcacggtggtgcacatctgtagtcccagctattcaggaagccgaggtgggagaatcactagagcctgggaggttgaggctgcagttagccaagttcacaccactgcactccagcctaggcaacagagtgagaccctgtcaccaaaaaaaaaaaaaaaaaaaaaagaaaatgaattcaggaagtaatctaattgcctctgcattaagcagccttttgaagtgattttgttttataagagcctgaaaaaagataattcctttgaactagtttcttctacttgataaattatttcgagaaagaatagccagaagtctggtctttctagtctgttaataaacaggaagaggaataacatatattataatatatattacaataattattatacatggtctcgatctcctgacctcgtgatctgccggcagatgggatgacccagccatcccattactggatatacacccaaaggaatataaatcatgctgctataaagacacatgcacacgtatgtttactgcggcactactcacaatagcaaagacttggaaccaacccaaatgtctaacaatgatagcctggattaataataatatatattataatataattatgttattatattaatataatacatattataattatattatattattatattaatataatataaattatatataaataacaaatatataatttatatatataaatatatataaattatatatataaatatatatttattagagacagggtattgctctgttgtccccgctagagttcagtgatgtgtgatcgtagctcactgcagcctctaactcctgggctcaagtgatcctcctgcctcagcctcctgagtatctgggactacaggcacatgccaccacatccgaccaattttataatattttgtagtaactgggtcccactatgttgaccaggctggtctcgaactccagggctcaagcagtcctcactcctcagcctcccaaagtgcagggattacaggcttgaaccaccatgcctggccataaattttttatgtagacctgcttgaaaacgtttattcaagaatttttgtgtaggaaaactccacatattgataactaattcaaagcacttatatttcttttgttggcatgattatatatctatatggttgaatagagataggaggatgtaaaactgtgtaaatacctgttactgcttcacacttgtttttctcagccccatacagaatatgtagtcaccctgaataaaatagtcaaatcatatttgtatttgctggtaactgtcaaatttaacttgaaaatatggcaaaattagatatacaatcatgtcatctgcaaacagggacaatttgacttcctcttttcctaattgaataccctttctttctttctcctgcctgattgccctggccagaacttccaacactatgttgaataggagtggtgagtgagggcatccctgtcttgtgccagttttcaaagggaatgcttccagtttttgtacattcaatatgatattggctgtgggtttgtcataaatagctcttattatttttagatacgtcccatctatacctaatttattgagagtttttagcatgaagtgctgttgaattttgtcaaaggccttttctgcatctattgagataatcatgtggtttttgtctttggttctgtttatatgctggattacatttattgatttgcgtatgttgaagcagccttgaatcccagggaagaagcccacttgatcatggtggataagctttttgatgtgctgctggatttggtttgccagtattttattgaggatttttgcattgatgttcatcagagatattggtctaaaattgtggaagacagtgtggcaattcctcagggatctagaactagaaataccatttgacccagccatcccattactgggtatatacccaaaggaatataaatcatgctgctataaagacacatgcacacgtatgtttattttggcactactcacaatagcaaagacttggaaccaacccaaatgtctaacaatgatagcctggattaagaaaatgtggcacatatacaccatggaatactatgcagccataaaaaatgatgagttcatgtcctttgtagggacatggatgaagctggaaaccatcattctcagcaaactatcgcaaggacaaaaaacctaacaccgcatgttctcactcataggtgggaattgaacagtgagaacacctggacccaggaaggggaacatcacacaccggggcctgttgtggggtggggggagggggagggatagcattaggtgatatacctaatgtaaaagactagttaatgggtgcagcacaccacatggcacatgtatacatatgtaacaaacctgcacattgtgcacaagtaccctagaacttaaagtataataaatatctatatataaaaaaaacaaaatatggcaaaaattaatgattgcttcaaaatatagattgcatattttaaaatgtgaacccatattttctgtgctctgagaatcattaaaacggtatcaaataatagcaattcattttgttggaaaaacaataaatttgatctgtgcagtctcaatttaaatcaaatattctctatcttcctcctggttcattctctcccacagcctttaccaactacttgtttcattgttccgcagtcttgttaattatttgttataaccaatctttccttcttttttttttttttttttttttttgagacagattctcactttgttgcccaggctggagtacagtggtgccatcttggctcactgcaacctcggcctcctgggttcaagcgattctagtgcctcagcctccccggtagctgggactacagacatgtgccaccacgcccagctaacttttatatttttagtagagatgaggttttgccatgttagccaggctggtctcgaagtcctgacctcaagtgatccacccacttcagcctcccaaagtgttgggattacaggcgtgagccactgcacctggcctgttaacaaccaatctttcaagagtgtatatctttttctgtgggtttagagtgtgttcggtttttcgtgtgtggcatattctttttgtggcccttaccagaattttttcgtatttgctacaaaactaatgttttttttgttttgttttgagactgagtgtcgctctgtcacccaggctggagtgcagtggtgcggtctcggctcactgcaactccacctcccgggttcaagcaattctcctgcctcagcctcccgagtagctgggattacaggcacccgccatcacgcccagcttattttttgtatttttagtagagacggggtttcaccctgttggccaggctggtcttgaactcctgacctcgtgatctgcccgccttggcctcccaaagtgctgagattacaggcgtgagccaccgcgcctggcctacaaaactaatttttatgcagcttttttccatcattcatagagatgtacttgtgacataaaattgtggtcagtattagatgaattcaggtatgcttaaaggcagaccaggctgggcatggtggctcatgcctgtaatcccagcactttgggaggctgaggcgggtggatcatttgaggccaggagttcaagaccagcctggccaacatggtcaaaccccgtccctactaaaaacacaaaaattagccgggggtggtagtgcgttcctgtaatcccagctactttggaggctgaggcacgagaatcacttgaacctgggagtcagaggttgcagtgagcccagatcatgccatcgcacttcagcctgggcatgacagagtgagactctgtctaaaaaaaaaaaaaaaaaaaaggcaaatcatgcatttttagaatccatgttactttctaaagtgaaaaaaaaagttttgtttctatgtaagtgtttacgtgtgcagttaatcatttctttcttacatgttaatgtaagcaagtcagtcaattcccagttaaatttcactgattataaatttagtacacatttactgagtgcctactgtatggtaaagaattgtgggtctctgttctcttgtagctaatagtctagaaaaggaatcaaacgtcaaagtgtcttaaaatggtaagtgctagaatataggtaacgggaaatataactggtcaaatggttctgaatgatgaaccactgcatgatttcccagctttttctatacatatctctataaagatgagcaaaatcataaattagcattaactctacattgagatttttgttttctttgttatcccttcctgccttcttactactcatggcaaggattaaacattgagggtggggctggacacagtgattcacgcctgtaatcccagcactttgggaggccgaggcgagcagatcatgaggtcaagagttccagaccagcctggccaacatggtgaaaccccgtctctactaagaattcaaaaattagccaggcgtggtggcgtgtgcctgtaatcccagctacttgggaggctgaggcaggagaattgcatgaacccagcagggggaggttgcagtgaggtgagatcgcaccactgcactctagtctgggtgacagagcaagactccatctcgagagaaaaaagaaaaagaaaacattgagagtgaagatgaggggaatgataaatatgatggcatttaatttcaaacttaaatcctgtcgactaaccatgcttctcttccactgcctcatgatgattagccaaaaaggaacaaactctagctcttttttgtgtgtagacataaattttcatttctataggacaaatgccaaataatgtggttgatgggttgtatggtaaatgtatctttagttgccagatttttttttctttttttttttcttttttttttttttgagatagagtttcactcttgttgcccaggctggagtgcagtggcacgatctcggctcactgcagccaccgccttcccagattcaagagattctcctgcctcagcctcctgagtagctgggattacaggcacccgccaacacacccagctaatttttttgtatttttagtagagacgggattttatcatgttggccaggctgatctcaaactcctgacctcaggtgatctacccatctcggcctcctaaagtgctgggattacagcatgagccactgcgcctggcttttttttttttctttttttcttttttttttttggagacagagtcttactctgtcacccaggctggaatgcagtggcgtgatctcagctcactgcaacctctacctcctgagttcaagtatttctcctgcctcagcctcccaagtacctgggattacaggcgtgcaccaccatgcccggctaaatttttttttctttttttttttttttttttttttgcatcagagttttgctcttgtcgcccagactggagtgcaatgatgtgatcttggctcactgcaacctccgtctcccgggttcaagcgattgtcatgcctcagcctcctgagtacctgggattacaggcatgtgccaccatgcccagctaatttttgtattttttttttttagtagagatgtggtttcaacatgctagccaggctggtcttgaactcctgacctcaagcgatccacccgcctcggcctcccaaattgctgggattacaggtgtgagccactgcacccacccagttgcttgatcttttaagactgccaaactgttttccaaagtggctgcaccatactacattcccaccagtgatgtatgagagatctagtttctccacatcctcaccagcatttgatattgtcagtatattttattttattttattttattttattttattttattttattttattttattttattttgagacagagtctcactctgtcgcccacgttggagcgcagtggcgtgatctcggctcaccgcaacctccgcctcccaggttcaagcgattctcctgcctcagcctcccgagtagctgggattacaggcacccaccaccatgcctggctaatttttgtatttttattagagacagggtttcaccatgttggccaggctgttctcgaactccttacctcaagtgatccacccaccttggcctcccaaagtgctgggattacaggtgtgagccaccgcacccggcccagagagtaaaattttttattttattttatttttttttttgagacagtgtctcgctgtgtcacccaagctggagtgcagtggtatgatcttggctcactgcaatgtctgcctcccagtctcaagcaattctcatgcctcagccttctgagcagctgggattttaggcatgtgccaccatactcagctaattttgtatttttagtagagactgggtttcgccattttggccaggctggtctcaaactcctagcctcaagtgatctgcccaccttggcctcccaaagtgctgggagtagaggcatgagccaccacatccggctgaattttgatgaggtccagtatatcaattttttttttttatggatcctgcttttgttgtcaggcctaagaaacctttgcctacccttagcttctgaatattttctcctatttattttcataaaagttttatagttttacagttaagtatatgatctattttgtattagtttcttttttttttttttttttttttttgagatggagttccactcctgttgcccaggctggagtgcaatggcacgatctcggctcactgcaacttctgcctcccaggttcaagcgattctcctgcctcagtctcccaagtagctgggattacaggcatgtgccaccacccctggctaattttgtatttttggtacagacggggtttctccatcttggttaggctggtttcgaactcccaacctcaggttatccacccgcctcagcctccaaagtgctgggattacaggcgtgagtcaccatgcccggctgagttagtttttatataaggtgtgaagttcatatttttggctatggatgaccaattgcttctgcaccatttgttgaaaaggctattcttcctccactgagttgtttttgcacctttgtgcaaaatcatttgactacacttgtatgggtctacttctgggttgtttttttgttctgttgttctgtgatactatcccttcatctgtaccacactgtcttaattattgtggctacatagtaaaccttaaaattgaatagagtgattcctcccactttactctttattttcaagattttcactgtatgttttttgagagaagtaaaattgtatataaaactggccattggtttaactcaacattctttggaatttttggcaaatgaaaggttttgttatttttatcttattagtaaataataaataattctgtctgggtgcaatggctcatgactgtaatgccaacacttgggaggctgagttgggaggatcatgtgagcccaggagttcaagactagcctgggcaacatagtaaaacccccgtctctacaaaaaaaaaaaaaaaaaaaaaatatatatatatatatatatatatatatatataaaggccaggtgtggtggctcatgcctgtaatcccagcactgtcggtagctgaggcgggcagattgcttaagcccaggagttcaagacctgcctgggcaacatggagaagccccatctctacaaaaaatacaaaaatcagctgagcatggtggaacacgtgtgtattccaagcacttgggaggctgaggtgggaggatcccttgaggccaggaggtcaaggctacagtgagccctcattgtgccactgcactgcagtctggatgacagagcgagacagtgtcattcattcgtttattcattcattcattcattcataattaattacatcaaaagtgtaatgtctgacaaaatattatgaaataatgtattttaagaataattatcatccagcccaactaccaaattttggctttaggtctcacattttctgtatacctctgcttgttagtattggttttaagtaagctgcctcattaaaagaactttaaatgccaagttgagtatattaatagcatgctcactttgtcttttttagatggtgttatctgaaaaggttagtcagctgatggaatggactaacaaaagacctgtaataagaatgaatggagacaagttccgtcgccttgtgaaagccccaccgagaaattactccgttatcgtcatgttcactgctctccaactgcatagacagtgtgtcgtttgcaagtatgaactccaactacgctttaaaattaaataactcatataacgttaaccatttctcaatcccagaagggccaagttagtgcagtaggtacttaaataatgtgtataccttactcaggatgtctatggtagcaatactactgctcttttatagtcaattcttgattatccgtatcagtgggggaagcatggataaataattgtggtagccatcataaaagtaacttaaagatcaaacagtcatcttataaattagtatcaacttggcggggcatgggggctcatgcctgtaatcccagcactttgggaggtcgaggcaggtggatcatctgaggtcaggagttcaagaccagcccagccaacatggtgaaaccccatctctactaaaaaaaaaaaaatacaaaaattagctaggcattgtggtgcatgcctgcagtcccagatatttgggaggctgaggcagaataatcatttgaacccgggaggcagaggttgcagtgagccaagcttgcgccactgcactccagcctgggcgacagagcgagactgtctcaaaaaaaaaaaaaaatcagtatcaacttatgtaactgtatgccagtagcattgatgtagtatttttttattatttgtaagtgctttcagcttcatactcttgtattgtcaaaatcccaaaaggtaggtaaagcaaatatcctactatttttggaagaaacaggctccacaattttaactggtctacccaatgcttaagatgtttactaatgcaataatggtggcttcatccaagtttggaattcaagaaaactggtaattttcttttttttttttttttgaaacaaagtctcgctctgtcacccaggctggagtgcagtggcgtgatcttgactcactgcagcctccacctcctgggttcaagtgattcttctgcctcagcctcccgagtagctgatactacaagtgcacaccaccacgcccagctaatttttgtatttttagtagagacggagtttcaccatgttggccaggatggactcgatcttttgacatcgtgatcaacccacttaagcctcccaaagtgctgggattacaggcgtgagccaccacacccagctggtaatgtttttttttttttaaaaaaaagatgcagctgggtgtggtagctcatgtctgtgatctcagcactttgggaggctgagatgggaggatcacttgggcccaggcattggagaccagcctgggcaacatagtgaaactttgtatctataaaaataaacaaaattagctgggtgtggtgatgtgcctgtagtcccagctactccagaggctgaggtgggaggatcacttgatcctgggaggtcgaaactgcagaaggctataatcatcccactgcactccagcctgagcaacagaccaagaccctgtctcaaaaacaaacaaaaaaaaaagatgcatgggatctcatgtgaaatctaaaaaagttgaactcctagaagcagagtagaatggtggttttcagagtcttaggagaggatgtggtgaaagtgtacaaagttttagttagatgaggggggtaagttctggtgatctattgcacagcatggtgaccatagttaatgtattgtagattttgaaattgctaaaaacattttaaatattctcaccaccaaaaaataataaataggtaaggtgatgggtatattaattattatttttttaatcccaaagatccatgatttagcgatgtttctaatttcccagttgttttatagtgattgtaaaccttggagatggagactaatcttgcttaagttttcatcaaacaatggtttcttgattttattttattgtttcttaatgatcttaggagcaaagattgctattctgttaaataaaaacaccatgaacaattcaaaatggtggatactaaaaaataaaatagcttttgctttttagtgtctttttatttatatttttagatcagtgtatctgatctggtaattaactttaaataaaatgacaaagctactgtatgaagaattagtttagtaaaaacttggaggttctccagattctgacagcctgatagccatgcaaaggaatagacagcttgtttcagaatggtgtgttctgccaccccaagccttgataacttttctttaacgattttctccctggagctagggtatagtcaaggtatttggttccatagtgcttattttgtggagtatgtgctgaatataaattaaaaataaataaaagaagaaaaaggaatcgtaagtaataactatgaataaacttgaaatctagaattacttctaattccgtcagttcactcagtagcaatcaagagtatacaaaaatagcagggaacaaacacaaactccttcataattctctattaaatgcaaattaatggaattcttactaacctaagtttttactggcatcttattttctatgagaccaaatttaatattaactcaaatttttctacactcattcaacaaataaaaattaaacaacagcaacatgaattatactgtagttgtggtgctgttgggatgagaattgtaaaatagataacctacccttatcatctggttaaggaaatgagttacacatatgaaaatttagatggcaatataaggcaatttgtgattaagtaccagatcaactgtacatataataaatactgtaaaatttcaggaaagaaggttaataggagtgatttggattggcctgatggaggaaataagacttgtgctagggctagacaaatggataagatgttgatacaggcaggatattctggttagaagcatgatgtacacaagggtacagggataggagtaaataaaatattgggactaaaggttactgtttgagattgattagtagtaagactagataaaaactagatgtattatttgaagctatgtgataaagaaccttcaataactagtgaaagagattagagaatgtattctgaaggtaataagaaagcaacagtgatttctgagaagtgtttcaggaaagtagtaatttaggaagatggatgtatattgcagtgtaaggattggaggagggccgggcacggtggctcacacctgtaatcccagcactttgggaggctgaggcaggcggatcacctgaggacaggatttcaagaccagcctggccaacatggtgaaaccctgtctctactaaaaatacaaaaattagctgggcatgatggtgggcacctgtaatcccagctacttaggaggctgaggcaggagaattgcttgagactgggaggcagaggttgcagtgagccaagatggagccactgcactccagcctgggccacagagcgagactgtctcaaaaaaaaagaaggattgaaggaggagaaaccagagtcagtatttttaaatatcctactattagataacaaaaatctgaccttagatgatagcaataaaaataggaggatatggagtgaaacttttatcgcaaatgagaattgacagatcatgagaactgaaagcatatgggagatatggaaaaattcaaagatgacttgaggtttcaataatttttttttgagatggagtcttgctgtgtcgcccaggctggagtgcagtggtgtgatctcggctcactgcaatctccgcctcccggattcaagccattctcttgcctcagcctcccgagtagctgagactacaggtgcctgccaccatgcccggttaatttttgtatttttggtagagatagggtttcaccatattggccaggctggtctcgaactcctgaccttgtgatccgcctgcctcagcctcccaacgtgctgggattacaggcatgagccactgcacctggcctaatttttgtatttttaatagagacagggttttgccatgttggccaggcttgtcttgagctcctgacctcaggtgatccacccacctcagcctcccaaagtgctgggattacaggtatgagctggcctcaattaatttcaattcctagactcttcttatctttcatcctaataatttatctgattgtgttatttaccaagtagcttttgcactttagatttttaaaaatgaattaatattgtatttctgctttctttagggaatacacttctgtcttgtctttgaactcttagaagtaatttagggtatggaaagttattgtagaggcgattagctatatatttccaatgattgttgaaagagttttgggataagaaacaggcacaaagtatgaagcggagtcaggtaattactacttctcatgaaatccctaacttgggataaggcttctcttatgccaaaacaagatttgtcttaaccctgtcagcagagtctgacctacttgtcagtgttttttattatttctcccattggaaaacctgctattgcttgcttggacctgttttactgatgataaacgagattgctttcaaaaattgttttatatgttatctttacgaatctcattgcatccaggcaagctgatgaagaattccagatcctggcaaactcctggcgatactccagtgcattcaccaacaggatattttttgccatggtggattttgatgaaggctctgatgtatttcagatggtaagatctttggtttattctgctatataaaaataggtaaaatatagtgaaagtggaatatatttttttcagtggctataagacattaaatgggattgctcttatgtaagatctagagtagcraactaaaagttaaacttgagctaaccataaaatgtagttatcaatgctaacctactagaatatggaaattgagtagtatttaaataacatacatttttattgtagtaaaatatataaaacaaactttatcattttaaccattttaagtatataatttattaaggaattttttaaatcacagcacgagtcccaccattatgtaatattgaagtctttagtatagctatctatactatagatatctttatccccttacctcttttttaaaatttttatttttatttcaatagttttggggcaacaggtggtttttggttacatggataagttctttagtggtgatttctggattttggtacacccatcccctgagcagcgtacactgtacccaaatacgtagtctttaatccttcatccccctctgaccctttttcccccaaagttcccaacgtccattatatcaatcttatgcctttgcatcctcatagtttaactcctactcataagtgagaacataacgatatttggttttccgttcctaagttacttcacttagaataatgacctcccgctccatccaaattgctgcaaaatacattatttcattccttcttatgactgagtagtattccatgatttatatgtaccacattttctttatccactcattggctgatggacacttaggttggttccatatctttgcaattgtgaattgtgctgctataaatatgcatgtgtatgtgtctttttcatataatgacttcttttcctttgggtagatacccagtagtgggattgctgggtcaaatagtagttctactttgagttctttaaggaatttccatactgttttccatagtggttgtactagtttacattcccaccagcagtgttaaaagtgttcccttttcactacatccacaccacatctttgtttttttttgttttgttttttgtgtttttttttttgctttaattatgaccattcttgcgggtgtaaagtagtatttcattgtggttttgatttccctgataattagtgatgttggccatttgtatatcttcttttgagaaatgtctattcttgtcctttacccattttttgatgggattgtttgttttcctcttgctgatttgtttgagtactttgtagattctggatattagtcctttgtcagatgcacagtttgcaaatattttctcccactctgtgggttgttggtttactctgcagattattccttttgctgtgcagaagctttttagttaaattaggtcccatttatttatttttgttcttgttgcatttgcttttggggtcttagccatgaattctttgcctaagccaatgtctggaagagtttttcagctgggcatggtggatcatgcctgtaatcccagcactttgggaggccaaggtggtcagatcactcgaggtcaagagtttaataccagcctggccaacatggtgaaactccatctctactaaaatacaaaaattatccgggtgtggtggcgggcgcccgtaatcccaactactcgggatgctgaggcatgagaatcacttgaacccaggaagcggaggttccagtgagccgagattgccagcctgggtgatagagtgagactcagtctcaaaaaaagagtttttacaatgttatcttctagaatttttatggtttcaggtcttagatttaagtttctggtccatcttgagttgatttcttttgtccccttacctctagtcttagtagaaaagtagatcttttgttgtttgaaactgaacctttttcctgggccctggatcacatacccacctgctctgtcaatcatgacctctcacaactattttttgtttttgagacaagagtcccgctctgttgcccaggctggagtgcaatggcacaatcttggctcactggcagcctctgccttttgggttcaagcaattttcctgcctcagcctcccaagtagctgggattacaggcacttgccaccacgcctggttaattttttaatttttctttttagtttcaggttttttgagatggagtctcgctctgttgcccagactagagtgcagtggcttgatctcggctcactgcaacctctgcctcctggattcaagtgattcttctgcctcagcctcctgaatagctggaattacaggtgcccaccaccacgcctggctactttttgtattttgagtacagatggggtttcaccgtattggccaggctggtctcaaactcctgacctcagatgatccacccacctcagcctcccaaagtgctgggattacaggcgtgagccaccacacctggtccatttttagcttcagcatctctactagttctttccccttgcatataaatacttaaggacatagattcaattttgtctttgtttataaatgtgtctaattcatatatttgaacatattttactcaattgtatcaaacataaaaggaaaaagctggatataatgccttgctatacatcttcatatgaatgacttcccaatctaaaaatttattatatcccaaattaaactgttttctcttccactttcacccaagcctcatcttatgttctgtatcattaatgacacttctttgtcatcttcatcttcttgtacaacgtgtgtcatagccataccccctttacattccaaggctcacattcatctctcattcaagctaatgcagtaaccttttaactggtccacttaccttccatttagcgctctgtccatattgcctgctataacatttcccagagttttttctacatggtattaataagtattcttggaaaaaaataaacttgggaaaccctggtttaaacaaaattaagttttctttttacttcagggttcaaaagctgggaaggatctaagttcttaccctacttgcaagctaacaagttaacctgccacagtttcatggatgctggcagaaaatatgacactcctgagtcagagtccagcaaaggactttttgctgtttgtttttgagattgggtcttgctatgttgccctggctagtcttgaactcctgggctcaagtaatccttgcaccttaaccttctgagtagctgggattacaggcttgtgccaccatgcctggctcaagttaaaggactttactactcacaacaagtagccaaaatgtcataggttccccaaaccccatttcccatagggcaatccaaagagggccagtggtcagctactcggaaggctggatcaggaggattgcttgagatcagtttgaggctgcagtgagctgtgatcgtgcctctgcactctagcctgagcagcagagccagaccccaactcttaagaaaacaacaataacaaagagggccaatgggctgcattatgggagaggaacaccaagctctgggaacccacattttctgtaatggatagtaagtgtgcctcccctttgctgtggagggagactgtgtaaccgcccaaggggttcactttgctgctgcctaaacagatccaattcatcaagacagaggaattgcaatagagaaagtatttcatgcacagccagctttgtgggagactggagttttattattactcaagtcagtctccccgagcattcggggtgcagagtttttaaggatagcttcgtgggtggggggaagccagtgagccaggagtgctgattgctcagagattaaatcatagggagttaaaggtgtcttcatgtgctgagtcagttcctgggagggggccacaagatcagatgagccagtttattgatctgggtggtgtcagctgatccatcaagtgcagagtctgcaaaatatctcaagcgatgatattaggagcagtttagggagggtcagaatcttgtagcctctagctacatgactcctaaaccataatttttcatcttgtggctaatattagtcctacaaaggcaatctagttctcaggcaagaaggaggtctgctttgggaaagggctgttacagtctttgtttaaactataaactaagtttctcctaaagttagttcagcctatggccaggaatgaacaaggacagcttggaggttagaaccaagtcggagtcagttaagttagatctctttcactgtctcagtcataattttgcgaaggccatttcaactatcttccaaagatatacaaatatccttgagaagattgtccagaacaaaggcagttagggcccttgtccacaagatgtgcagaaacatgagaaactcatgaagaattgtctcccaacacagcttttgagagatcagagatgttaacatgctgatgctgatatgtgttatactttccaatgggggctctaatacacagaatttctcatattattggaccacttaatggagcatttggctagattccatagaacacacttttgaaaggagtagtgtatagactgaagccagaattccttagtcctaatttcatgtgctctttactccagtcacacctttcccataatcatattctttgatgcactctttttttttttttaattgaggtggagtcttgctgtcacccaggctggagtgcggtggcgtgatctcggctcactgccaacctctgctcaagcgattctcgtgcctcagcctccagagtatctgggattacaggcacgcgccaccacacctggctaattttttttaatttttagtagagacaggggtttcgccatgttggccaggctggtctcaaacccctgacctcgggtgatctgcccgccttggcctcccaaagtgctgggattacaggcgtgagacaccacgcctggcctgatgcactctcgtatgtcagcactgttgattgttgggttacaacaattttcttccctgtctgctttctctccactctcaaaattctgcttacattttaagccttgtttcagatactccctgtaagctttctcaacttttccagataaaaagtgagtcactccttttcttgtattgttatatcacttgccttaaatttctgttatacatttatccacattttgtcttacagtagagttagctctgtagttgtttgacagtctcccttagaatatagttacagccaggtgcggttggctcacgcctgtaatcccagcactttgggaggccgaggcaggcagatcacgaggtcaggatatcgagaccatcctggctaacacggtgaaaccctgtctctacaaaaaaaaaacaacaaaaattagacgggcatggtggtgtgcgcctgtagtcccagctactcgggaggctgaggcaggagaatggcttgaacccgggaggcggagcttgtagtgatctgagatcgcgccactgcactccagcctgggcgacagagcgagactccatctcaaaaataaataaataaataaataaaagaatatagttactacttagttaatggcagagccatatcctgtagctatcagtgctaagcacataacgggtattcggtaaatgttgaaaaaaatggcttaatgtttccattttacagtatatcattcattgtgctattcatattccagtctcacttagccatctccacaaatcaaaatcagtgcatttataaaaatgttgtaacctaaaaggttagtgcatttaggatttattagactaaaggaaacaatttctggagtttaagaaattgaggccaggcatggtggctcacacctgtaatcccagcactttgggaggccaaggcgtggggatcacttcaggtcaggagttcgacaccagcctggccaacatggtgaaatcccatctctactaaaaatacaaaaattagccaggtgtggtgtcgggcacctgtaatcccagctacttgggaggctgagacaggagaatcgcttgaacccaggaggtggaggttgtagtgagccaggaggttgtagtgagccgctgcactccagcctgggtgacagagctagactttgtctcaaaaaaaaaaattgctttttaattctctactatttaggctgcagttatttttggaaattacaatttttaattccatttattttaacaaggtaacacataacttctgttagtgatttgtaaaaatagaaaacccatttttttctaccttagtttttttactgataacataatatttgtacatatttatggggtacatgtgatattttgttagattcatagaatgatcaagtcaggatagttggagtatccatcaccttgagtatttatcatttctatatgttgggaacatttcaagtcctctcttctagctgttttgaaatatgtaatacatttttgttaattatagtcacgctactctgctatggaacattagatcttactccttctaactgtatgagtgtacccattaactgacctctcttcattgcccgctcccgcacccctcccccccaccccgcccaccacaacacacacacatacactcttcccagcctctggtatctgccattctactctgtacctccctgagttcaatttttttagctcccacatatgagaacatgccatatttgtctttctgtgcctggcttatttcacataataacttccagttccatccatattgctgcaagtaacatgatttcattctttttwatggtggagtagtattccattgtgtatacacaccacattttttttttctttgagatggagtctttctctgtcgcccaggctagagtgcagtggcacaatcttggcttactgcaacctcccaggttcaagccattctcctgcctcagcgtctcgagtagctgggattacaggtgtgcgccaccacgcctggctaatttttttgtatttttagtagagatggggtttcaccatgttggccaggctggtctccctccaactcctgagctcaactgatccacctgccgcagcctcccaaagtggtaggattacaggcgcaagccactgcgcctggcctaataccacattttcttgatctgttcgtctgttgatggatgcttaggttgattccataactttgctattgtgctgcagtaaacatgggggtgcaggtatccctttgatatactgatttcctttcctatggatacatacccagtagtggcattgctggatcaaatgctagttctatttttagtttcttgggaaatctttatactgtttttctttttttttttttttgagacggagtctccctctggagtgctggagtgcagtggtgtgatctcggctcactacaagctccgcctcccgggttcacgccattctcctgcctcagcctcccgagtagctgggactacaggtgcacaccaccacgcccggctaatttttgttgtattttttagtagagatggggcttcaccgtgttagccatgatggtctcgatctcctgacctcgtgatccgcccacctcggcctcccaaagtactgggattacaggcgtgagccaccacacctggccttatactgtttttcatagtggctatactaatttaatttcccaccaacagtgtatgagttccctttttttttgagatggagtctcactctgttgcccaggctggagtgcagatttcggctcactgcaacctccgcttcctgggttcaagcgattctcctgcctcagtatcctgagcagctgggattacaggcgcacatcaccacacccagctaatttttgtatttttagtagagacagggtttcaccatgttggccaggctgatctcgaactcctgacctcaggtgatccacccgcctcggcctcccaaagtgttgggattataggaatgagccaccgtgcctggccgtgagttcccttttctccatatccttgcatctgtttttgtttgtttgttcgtttaaggtaaagaaaggcagatttattagagaaagtaggaaaatgtattgcaaggaggcaacagacagatgagcagaaaaggagcttttctaataataataataatggccattctaactgggagaagatgatatctcactgtagatttgatttgcgtttccctgatgatgagtgatgttgagtattttttcatacacctgttggccatgtgtgtcttcttttgagaaatgtctattcatgtcctttgtccactttttaatgggattatttgcttttttactgttgagtgatttgaattttttttgtttttgtttttgttttattttctttttagagttgtttgaattttttgtatattctggacattagttccttgttgaatgaatagtttgtaaatattttctcccattcaacagattgtctcttcactttgttgtttcctttgctttgcagaagctttttagcttaatatagtcccatttgtctatttttgtttttgttacgtacactttcgtaccttgaatagtttttaatattaatttccattactctattttagagctagattttagagccaaaggtataaggatggtagtgtgtccatctgtggaagagattcaaatctttctctaagtaacagtgtcatatgccacagtatgcaaaagctaagcgtatgtgaaaactgatacctaccaaaaaatagtgtatcttattttggttcattaacctccaaggaatttcagagtctacaaggggttttggtggggttgttttgtaaatatatataatataaaatttattatgtttaccattttttaaatgtacaggtcagtagtgctagatacattcacattgttgtacaaccaatctccagaattctttcatcttccaaaactgaaactttatagccattaaacaacttcagttccccactcccccagttcctgacaaccaccattctactttctgtctctatgaatttgactactctaggtacctaatataagtggaattatatagtatttgtgttcttgtgactggcttatttcacttagcatcatgtcctcaatgttcatccatgttatagcatgtgtcagaacttccttccttttcaaagctgaataatattgcattgtatgtatacaccttattttgtttacccatacatctgtcagtggatacttaggttgcttccagcttttggctattgtgaataatactgctatgaacacgagtgttcaaataatctcttcaagaccctgctttcagttcttttggttatatacttagaagtagaattgctagatcatatggtaattctatttttaatcttttgggggaacctccatgctgttttccatagcagattcaccattttacttcccaccaatggtgcacagggtttccagtttctccacatgctcgcaaccacttcttgttttctggggttttttgtttgtttgtttgtttgttttggataatagccatctttatgagtgtgaggtggtatctcattgtggttttgttttttatttccataatgatagtaatattgaacattttttcatgtgttttgttggccatttgtatatcttctttggagaaatgtcaagttctttgcccattgtgtgtgtgtgttgccttttttttttttgagatagagtttcactcttgttgcccagactggagtacaatggcacgatctcggctcaccacaacctccgtttcccgggttcaagcgattctcctgcctcagcctcccgagtagctgggattacaggcatgcgtcaccaggcccagctaatttttttcatatttttagtaggggcggggtttctccatgttggtcaggctggttgcggactcccgacctcaggtgatccacctgccttggcctcccaacgtgctaggattacaggcatgagccactgcacccacctgtgttgcccattttttaaatcaagttttttgttgttgttgagttgtaggaggtctttatatattccaaatttttgttgttgtttttattttgtttttgtttgtttgtttcttgagacagagtctcactctgtcgcccaggctggagcgcagtggcgcagtcctggatcactgcaacctctgcctcccaggttcaagcaattctcgtgtctcagccacccaaatagctgggattataggcatgcgccaccacacctggctaatttttgtatttttagtagagacagggtttcgccatgttggccagagtggtctcaaactcctggcctcaagtgatacacctgtcttggcctcccaaagtgctgggattacaggcataagccaccatgcccagactattctgaatattaactccttattagataaatgatttacagataattcctcccatttcacaggttttctttctactctgttgattgtatcgttgggctacaagatgttttcaggccgggcatggtgactcacgcctgtaatgccagcactttgggaggctgaggcaggcggatcacttgaggtcatgagttcgagaccaccttggccaacatggcgaaaccttgtctctactgaaaatacaaaaacaaagtagctggatgtcatggcgcatccctgttatcccagctacttgagagggtaagacaggaggatcgcttgaacccaggaagcggagattgtgtgggccaagattgcgccaacgcactccagcctggacaacagagtgagactccttctcaagaaaaaaaaacaaagatgttttcagataactaatttgttttaaagatgttttattagtaaacagggaaacacaaattaatagtatgataatgataaagtacagtcttcacccatcacatcaacttttggcaaggatgtagggaaatggatacattactgcattgttaagtagaagtatattttggcacagccactttggaagacaatttggctatatccatttttttttttttaaagacagagtctcactgtgtcacccaggctgaaatgcagtggtgcaatctcagctcactgcaacctccgcctcccaggttcaagtaattcttgtgcctcagcctcctgagtaactgggattacaggcacccaccaccacacccagctaatttttgtatttttagtagagatggggttttaccatgttggccaagctggtctcgagctcctgacctcaagtgatccacctgcctcggctttccaaagtgctgggattacaggcgtgagccaccgtgcctgggcactatatccattttaattaaaaaatatttctatcccatgacctaacaatcccatttctagagaatcactttcacatgggtacagggagatatgtgcaaggatgttcactgcaacattatttttagttgctaaaaaggaagacaaccaggaaaataccattaatatgataccatttatgttaaaacagcaatattatatgttttctggtggtataaacatatatatgaataaattcaaaaatatctgtaaatggtaactgtggctgccagaatgtactagaattggtccttataaccatgtaatgtttttaaaaatattttttacaagagaagtgtatttatatgttacttattttttattttttatttatttatttagagacggagtctagctctgtcacccaggctggagtacagtggcacaatctcggctcactgcaacctccgcctcccgggttcaagcgattctcctgcctcagcctcctgagtagctgggattacaggtgcccaccgtcacgcccagctaatttttgtatttttagtagagacagggtttcactgtgttggccaggctggtcttgaactcctgacctcattatctgcccacctcggcctcccaaagtgctgggattacaagtgtgagccaccgcacccggccagtttttattttttatacacattttcaaaaatgtagaggtggtgtaactaaacaaatattgaataaagagtttggcctaaaatttgggcagcatttggtagactgaacattgtataagatttggttcctagctttgcaatcacagaaattgaattttaacaggatagccagaatttatctacctctagggattttgtgcctactgaccaaggcatataaatctatggacattggtaaccaaaggagtaatctattaattcattaatttaccacattatacagccaaagagaccaaaataatgataagcaacagtcagtacatgctctcaccttatgggaaagcttgaaaacttactgttagaaggattttaactaaagaatcaaagcatgggagttggattattttattggctgaggttttaaaattataattgtaaggccaggcacggtggctcacgcctgtaaacccagcactttgggaggctgaggcggggggatcatttgcagtcaggagttcaagaccagcctggccaacatggtgaacccctgtctctactaaaaatacaaaaattagctgggtgtggtggcacatacctgtaatcccagctccttgggaggctgaggcaggagaatcacttgaacctgggaggcggaggttgcagtgaaccgagatcctgccactgtgcttcagcctaggcaacagagtgagactccatctcaaaaataaacaaataaataaataaaaattgatttgtgcaagccaatctctataagattgtcaccagtctgggtgacagagcgagactccatctcaaaaaaataaaaaaagatataatgcagatgagatggttatggtttctttaccttagtatttccggtgttgtcttctcaaatatatcatgatgtcatgatggagaatagagaaatgtggtgctcatcagtaaacatttatggaccttcttagaatagactatttctgcatatagccaccattttgtattgcttttcactgctgytttagagcattattttattatcttggttcctccaaattgagaatatactctatttggagcttactcagctacataagattattttagtgctcataaatgtattcattttgcataatctctgaacagattaaaatatctgtggtatggcaaagtttccattctagtggagtaaaatacaggtttcttagcgaggaatgtgtatttggtgagtagtatgtaatacttaaggtcacaggcagctttgcttttaaagcctgctccaccacttaccactttccttgggcaaaccaaatcacttaacctacctaaacccaggcctcctcatctttgtaaaatgcctaaatttcaagatgttaactgcaattaagattattttcctgataatgtatattttcatggctcgtttttattcagctaaacatgaattcagctccaactttcatcaactttcctgcaaaagggaaacccaaacggggtgatacatatgagttacaggtgcggggtttttcagctgagcagattgcccggtggatcgccgacagaactgatgtcaatgtaagtttcccaactatgtagactgtttcttggccattatcccctttgaatcttactgggaggccctaattagtcttgtccccatatcactgaggtggtactagtttggcagtcacttcataagtagcattaaacagaatcatcttgatgaatgagtgaaattacagaacactctctattaccctattgaattcagcatggaaaccactctttcgaccttaagtccatggattatctagttgtacttggcaaatccttcttaatctaaaagatgttatgttgtggttaaatagaatattgtacctattctatcctattttaggttatattatagactagtttgattgggataacataaaaaggatcatttttccgaaagtaaccacaataattttgattgctttcatttcagattttattttgacccatataattagtaaaaaaattttatactttaacatgtttttctctcctttccattagattagagtgattagacccccaaattatgctggtccccttatgttgggattgcttttggctgttattggtggacttgtgtatcttcgaagaagtaatatggaatttctctttaataaaacwggatgggcttttgcagctttggtgagtgaatttcagaagacaaaaaattatttgaataaaattcctaatagtgtatttttaggtaagcttttatttatgtgagaagtagcattttatttcttacctgaggaaaatagttttatatattttaattttctgtcttaaaatcagtttgtttcattcattatctcataaggatggccagaacttcaaggaactgattgtacctgccttttattcaacctaaatgacagactgtcatctctatgaaaatctctagttgttctgaaaatattattcttttttttttttctttgaggcggagtcttggtctgtcacccagactggagtgcagtggcaccatcttggctcactgcaacctctgcttcctgggctcaaatgattctcctgcctcagcctctcgagtagctgggattacaggcgtgtgccaccacgcccagctaatttttttgtatttttaggagagacggggtttcaccatgttggccaggctggtcttgaactcctgacctcaggtgacccgcccacctcagcctcccaaagtgctggggttacaggtatgagccaccatgcccagcctgaaaattttattctaaaaagccttttcagtattcaattttgaaacttgtgtctgcatagttataatttttaaatagtgttttcctggccaggcgcagtggctcacacctataatcccatatctttgggaggccgaggtgggcagatgacgaggtcaagagaccaagatcaacctggccaatatggtgaaaccctgtctctactaaaaatacaaaattagctgggcgtggttccatgcttctatagtcccagctactcaggaagctgaggcaggagaattgcttaaacctgggaggcggaggttgcagtgagccgagatcgcgccactacactctagtctgggcaaaagagcgagactccatgtcaaaaaaaaaaaatagtgttttccttttgaagtattatcgaattgtgatccttgggatgaaatataagccttaataaatcatttatctgcaaaaaattctatgtcttaactaaacagatgcacattttcatattcctgttatctaatcaagacaagaacagtttgaccatgaatattttattayttttttgtttcctagtgttttgtgcttgctatgacatctggtcaaatgtggaaccatataagaggaccaccatatgcccataagaatccccacacgggacatgtggtaagggaagtctgggatttctttcctttgtagaccaaagttaactcaatgattattaccctgtgagaacagtgccagcatatgaaggagctggatttagtcttcacttttcaatctctcttgtgttaacaagcttccatcactgataagaccatgcagtgctctttttttttttcttctttttttcgaaacggagatttgctcttgttgcccaggctggagtgcaatggcgtgatctcggctcactgcaacctccacctccctggttcaagtgattctcctgcctcagcctcctgagtagctgggattacaggcatgcgccaccacgcccagctaattttgtatttttagtagagacagggtttctccatgttggtcaggctggtctcaaactccctacctcaggtgatgcgcctgcctcagcctcccaaagtgctgggaatacaggcctgcaggcatgagccaccgcacccggccgcagtgctcttaaaagtgggaagttccttttcccatttggtgaatccttctaaccaagctagctaagaatgaaagacagccttcaactaaatagaaaaattgatcaagtacctgagcatccactgtttctaagcactgtgctaattattattaaatatagtgataagaaaaacatgatccctgtcttcatggagcctacattattgtacctcatggtcttgtacacttaaatactagttttctcacccaggtgcagtgttttgcatttgtagtcccagctacttgggaggctgaggcaggaggatgacttgaatccaggagttctagcccagcctggacaacatagcaagatccatctccttaaaaaaaaaatggggccaggtgtggtgactaatacctgtaatcctggcactttgggaggctgaggcaggaggaccacttgaggccaggagttcaagaccaacttgggcagcatagtgagacgtcatctctatgaaaaacaaaaaagaaaagaaaaaacaacaacaacaactagttttctgacatattctgttgttgaaaatataagtacagtattcaagcatttgggaggctgaggtgggaggattgcttgagcccaggagtttgagaccagcctggccaacatagcaatatgtcatttctaatgaaaatttaaaaattagctgagcaggcatggtggtgcatacttgtagtcccatctacttgggatgctgaggcaggaagatcaccggagccaggactttgggattgcaatgagctatgatcatgccgctgcactccagcctgggcaacagagcaagaccctgtctcaaaaataaacatagtattagtacaatgaaaagacaaatcgagaatagataatacaaaaatagccttatagtaaccagacttactgatgaatgccacagacccggagtatgtcacatggtttatcaggtgaattaataatttcatagtttaaaataccccgttttagggttagcataccaacatttaatgtatacttaaagattccattttgtcttttttccctcctagaattatatccatggaagcagtcaagcccagtttgtagctgaaacacacattgttcttctgtttagtatccttttacaataagtctttcttgctgtattttgtctgttttctcacagtctagtattctctctacagcatttggctggggctgttctcttaatgcaagtcacaatatcctttgaaaatcattactgtatcatcctctccagcccaataaaccaaagactactagggacaaatctgtagtctgatagggccaggtttattggctcattaatatgaggaatactgtacattagaagaaccatggaacatcttaacaaagaaaagatagagttgtaataggatttgggagaatagtggagtttatgtgaaatttaaacaaagcattgttttgataggctaaaagcagtgtaaggctgtgtaaaggggtcaacatcaggtctgaactgtcaatcagacccagggttctgtttgcttggaaactacaaagttaacataaatgtgggatttttgtcttcaaaaacttcttctttgaagctctataccttggttgtaaattgaggctacttagaaattatacgtgtaaattgagtgacttagatctgccaagcaagaatatttcatttttactcatataattgcaagaagtctatttaaagaccaatattcctcagtaagaaaacagtaattactcaaagatggggatattttgacattttacagctgaagtgtgtgctagggaaaaatacttcctgtggactttgcagctgctttatgtttgtgttgttccattctcttgaatgacaaggaatatttttactttcttggcccaagctaatttttattttcttatatctaaaagtggatgcctctgtaagctgcaaagacaggtaaaagcgatgtcagataagtaagaatctaaatttcataatatgactaaacatagtttacccacctgagtacataagcactgactctggaacaaatcaacaaggtgaacaaatgtaatgttcctggaattgtgcttctcagccagggtgtcctgacattgatatacaagaatcagctgggcatggtggctcacacctgtaatcctagcacttttggaggctgtgatgggtagattgcttgagcccaggagtttgagaccagcctgggcaacatggcaaaaccccatctctacaaaaaaatacacacaaaaaattagccaagtatggtgatgcatgcctgtggtcccagctaccagggaggctgaggtgggaggatcaattgagcccaggaggtcaaggcaacagtgagctgatatcacaccactgcactccagcctggacgacacagtgagaccctgtctctaataaaaaagggaaaaaaaacgaaacttaaatatatttttttctgattgcaaaaggaatataaattaaagaaaatttagaatacaaataagtataaagaaaaaaattcaaaaccactgaaaattctatctttagtaaatgtttgtgtatgtctttcccagttttattatactatgttgatgattagagagattttaaggaaagcattctaaaaaaatattaagcttttgattttaactgattttaattgaaggatatttgggaaaatgttcttatgcactatggaaaatatacttactgcttcacatccagcccaaacctgggagaattaatctattcaaccatgaaatggtgggctgaaagattaacaatatacacctagtccatatgagaagaaagaagactgaggccaggcgtggtggctcatgcctgtaatcccagcactttgggaggccaaggcgggtagatcacctgagatcaggagttcgagaccagcctggccaacatggtgaaaccccatctctactaaaaatacaaaaaaaaattagctgagcgtggtggcgggtgcctgtaatccctgctactcaggaggctgaggcaggagaatctcttgaacccaggaggcaggggttgcagtgagcagagatcgtgtgattactctccagcgtgggcaattagagcaaaactccatctcagggggcgggcggcggggcgggggaagactgaaagaaaaatattactcaaactttattttttttaatcctaaaattttagttgaaaatgttcgtttatgggctgggtgtggtggctcacacctgtaatcccagcactctgggaggcagaggcaggtggatcatttgaggtcaggagttcgcggccagcctggccaacatggggaaagtctgtctctaccaaaaatacaaaacttagccagacggccaggcgtgctgcctcacacctgtaatcccagcactttgggaggctgaggcaggcggatcacctgagatcaggagttcgagaccagcccggccaatatggtgaaaccctgtctctactaaaaatacaaaaattagccaggcatggtggtgcacgcctgtaatcccagctactggggaggctgaggccggagaattgcttgaacctgggaggcagaggttgcagtgagccgagatggtaccactggactccatcctgggcaacagagtgagactctgtctcaaaaaaaaaacagccaggcatggtgacgggcgcctgtaatcccagctactctggaggctgaggcaggagaatcgcttgaacccaggaggtagaggttgcagtgagccaagatggtgccactgcactccagcctggatgacagggtgagactcttgtctcaaaagaaaaaaaaagaaagacaatgttcatttatggtttgatggattcagcctggccaacatagcgaaacctcatctcaacaagaaatacaaaaattagccagaaacggtagtgtgcacctataattccaactactcaggaggctgaggcatgagaattgcttgaacccaggaggtggaggttgcagtaagccgagactgccactgcactccagcctgggcaacagagcgagactctgtctcaaagaaaaaaaaaaaaaaagaacagaaaagaaaagtatggtttgatggattaacaaattattataccttagaaaattttcagtatcttgaatcagttcttctcactagtactttgaaattgaataatggagcaaaagagcaattaaaattgtaaagtattaattagttgatttggggtttgttggtcttttagctttgtcttaaacttttaaatatataagaagtttaagaaattagaaaattgtcattttacctctgctttaagactgagcatcagcctaaggtttagtatacatttggaacggattacaatcctgttgggatatagaatgtcttgtgtttggttattaggatgcaaaaagtgaacttttttcagagtcagacatgtatacagattataagacagtgacttaagtgctgtgtaccagaaatagtgagaaaatgaataattttgtcagaggtaaggaatattagaaaaggcctaaccactccccacccccccccccttttttttttgagtggagtctcgctctgtcacccagactggagtgcagtggcaccatcttggttcactgcaacctccacctcctgggttcaagcgatcctcctgcctcagcctcctgagtagctggaattacaagtgtgcaccacctcacctggctaatttctttatttttagtagagacagggtttcaccaggttggccaggctggtcttgaactcctgacctcaggtgatccacccatctcagcctcccaaagtgctaggatttcaggcgtgagccacctcacccggcccccactttcttttaaagtaaatatgaaacctcaagaccggtaacattgtttacagcttccaggttgataataattaatagactgaggccacctctaagtagtagttatgattttggaaaatattcacatatttattattagtttaatgtacagtttattgcatgattaataaagcagactatataatcagttgcctgatctaagcaacctttaaaattacattttaagtgttgcagttatgcagaaaagtttacaaaagtttacagtttgatgaatttccttttttttttttttttttggttttttgttttttgtttttgagatggagtcttgctctgttgcccaggctagagttcaatggtgtgatcccagctcattacaacctccacctcccaggttcaggcgattctcttgcttcagcctctggagtagctggaattacaggcacctgccaccatgcctggctaagtttttttgatatttttagtagagatggggtttcatcatgttggcgaggctggtttcgaactcctgagctcaactgatccgcctgcctcggcctcccaaagtgtaaggattacaggcgtgatccacggtgcccagtccagtttgatgaattttcacagaattaacacacttatgtaaccagaactcacatcaataaataaaattttacccacatctcagagcattttccatcatcattcctcctgattgccaccttcccacccagaaataactgctatcctgactgctaacactatgggtttattttacctatttttttttaacttacataaatggaatcctacagggctgggtgcggtggctcatgcctataataccagcactttgggaggctgaggcaggcagatcacctgaggccaggagttcgagaccagcctggccaacatgacaaaaccctttctctactaaaaaaagtacataaattaactgggtgtggtgctgcgtgcctgtggtcccagctacttgggaggctgaggcaggagggtggcttgagcccaggaggtagaggttgcagtgagctgagatcacaccactgtgctccagcctggctgatagagccagactttgtctcaaaataaaaaaaaaaaaaaagaaaacacaataaatggaatcccagaataaatatatatggattttttttatgtttatttttttagagatgaaatcttgtgttgcccaggcttgagtacagtggggtcaccatagctcactgtaacctcgacctcccagaatcaagcagtcctcccacgtcagcctcctgagtagctgggactataggtgagcactaccacacccagctaatttttgtatttttttctagagatggagtctcgccctgtcgtccaggctggtctcaatctcctgggctcaaacaatcctcgtaccttggcctcctgaatttttaaaataaagtagcagtctggaaaatgttcacctataacctgaaaccctaatagtataaactacatttacttttgcatattatcttgcattcatttctatatgaatgtttcatggtaagggtgttcattttttatacttgtagacatgttgtgtatggagtttgctatcttaatatattataagcattttctatgttgtatggcctttatatttataaaaatacataaaaattacaaagaaatctgaaaatacgaagaaaaagaaaagtagtcaatatttttaatgtttatataatggatatatcatatccatgttgcccaggctggtctcgaactcctgaccttaggtgatccacccgtcttggccacaagcgtgagccaccacgcctggccttctactagcttttaatagcctagttgttgtatgttatggaataatgtctcctctatttctgctcagttctcctggagtaacatttaatcaggactgtgtaatttatgtatttcattgtttgtattcctcactagagtgtaatcttcttcatggtaggatctttattttgttcaactttttatttccaacagtttatagtgcctgccatatagtaggcagtgttagtaaaaatttaaagatcagtaaatgaaataaaacagtatacatagaactgcatcatagctcttgacagctaagaagagtacacaaaagaccttgaggtatttagcaagaaggaaagctcattcaaagcaaaagcacataaaccatgataaaaagacaagctttccccagagcaagtctcaatcattaatcagagagtacccagaaatcaaagcctgtagaaatgatcaatctttggccgggcatggtggctcatgcctgtaaccccagcactttgagaggctgaggtgagtgaatcacctgagatcaggagttcgagaccagcctagccaacatgggtaaaccccgtctctactcaaaatacaaaaattagccaggcgtggtggcatgtgcctgtaatcccagcttactcaggagacggaggcaggagaatttcttgaacccgggaggcagaggttgcagtgagtcaagatggctccactgcactccagcctgagtggcagagcaaaactccatctcaaaaaaaaaaaaaaaaaaagaaagaaatgatcacattaacaaaagacctttgtgcagccaagatggcctaataggaacagctccagtctacagctcccagcgtgagcaacacagaagacgggtgatttctgcatttccaactgaggtactgggttcatctcactggggattgtcagacagtgggtgcaggacagtggatgcagcgcactgagcgtgaaccgaagcagggcgaggcatcgccccacccgggaagcgcaaggggtcagggaattccctttcctagccaaggaaaggggtgacagatggcacctggaaaatcgggtcactcccaccctaatactgtgcttttctgatggtcttagcaaacagcacaccaggagattatatcccacacctggcttggagggtcctacgcccacggagcctcgctcattgctagcacagcagtctgagatcaaactgcagggcggcagcgaggctgggggaggggcacccaccattgccgaggcttgagtaggtaagcaaagtggccgggaagctcgaactgggtggagcccaccgcagctcaaggaggcctgcttgcctctgtagactccaggtctgggagcagggcatagccaaacaaaaggcagcagaaacctctgcagacttaaatgtccctgtctgacagctttgaagagagtagtggttctcccagcatgcagcttgagatctgagaacggacagactgcctccttaagtgggtccctgacccccaagtagcctaactgggaggcatcccccagtagggacagactgacacctcacacagccgggtactcctctgaaacaaaacttccagaggaacaatcaggcagcaacatttgctgttcaccaatatctgctgttctgcaacctccactgttgatacccaggccaacagggtctggagggaacctccagcaaactccaacagacctgcagctgagggtgctgactgttagaaggaaaactaacaaacagaaaggacatccataccaaaacctcatctgtatgtcaccatcatcaaagaccaaaggtagataaaaccacaaagatggggaaaaaacagaagagaaaaactgaaaattctaaaaatcagagtgcctctcctcctccaaaggaatgcagctcctcaccagcaaagaaacaaacctggacagagaatgactttgatgaattgagagaagaaggcttcagatgatcaaacttctccgagctaaaggaggaagttcgaacccatggcaaagaagttaaaaaccttgaaaaaaggttagacgaatggctaactagaataaccaatgcaaagaagtccttaaaggacctgatggagctgaaaaccacggcacgagagctacgtgatgaatgcagaagcctcagtagccgattcgatcagctggaagaaagggtatcagtgatggaagatcaaatgaatgaaatgaagcaagaagagaagtttagagaaaaaagaataaaaagaaacgaacaaagcctccaagaaatatgggactatgtgaaaagaccaaatctacgtctgattggtgtacctgaaagtgacaaagagaatggaaccaagttggaaaacactgcaggatattatccaggagaacttccccaatctagcaaggcaggcgaacattcaaattcaggagatacagagaacgccacaaagatattcctcgagaagagcaactccaagacataattgtcagattcaccaaagttgaaatgaaggaaaaaatgttaagggcagccagagagaaaggccgggttacccacaaagggaagcccatcagactaacagctgatctctcagcagaaactctacaagccagaagagagtgggggccaaattcaacattcttaaagaaaagaattttcaacccagaatttcatatccagccaaactaagcttcataagttaaggagaaataaaatcctttacagacaagcaaatgctgagagattttgtcaccaccaggcctgcccgacaagagctcctgaaggaagcgctaaacatggaaaggaacaaccggcaccagccactgcaaaaacatgccaaattgtaaagaccattgatgctaggaagaaactgcatcaactaacgagcaaaataaccagctaacataatgacaggatcaaattcacacataacaatattaaccttaaatgtaagtgggctaaatgctccaattaaaagacacagactggcaaattggataaagaatcaagacccatcagtgtgctgtattcaggagacccatctcacgtgcagagacacacataggctcaaaataaagggatggaggaagatctaccaagcaaatggaaaacaaaggcaggggttgcaatcctagtctctgataaaacagactttaaaccaaaaaagatcaaaagagacaaagaaggccattatataatggtaaagggatcaattcaacaagaagagctaactatcctaaatatatatgcacccaatacaggagcacccagattcataaagcgagtccttagagacatacaaagagacttagactcccacacaataataatgggagactttaacaccccactgtcaacattagacagatccacgagacagaaggttaacaaggatatccaggaattgaactcagctctgcaccaagcggacctaatagacatctacagaactctccaccccaaatcaacagaatatacattctttgcagcaccacacaacacctattccaaaattgaccacatagttggaagtaaagcactcctcagcaaaagtaaaagaacagaaattataacaaactgtctctcagaccacggtgcaatcaaactagaactcaggattaagaaactcactcagaaccactcaactacatggaaactgaacagcctgctcctgaatgactactgggtacataacaaaatgaaggcagaaataaagatgttctttgaaaccgagaacaaagacacaacataccagaatctctgggacacatttaaaccagtgtgtagagggaaatttatagcactaaatgcccacaagagaaagcaggaaagatctaaaattgacaccctaacatcacaattaaaagaaatagagaagcaagagcaaacacattcaaaagctagcagaaggcaagaaataactaagatcagatcagaactgaaggaaatagacacaaaaaacccttcaaaaaaatcagtgaatcctggagctggtttttgaaaagatcaacaaaattgatagaccgctagcaagactaataaagaagaaaagagagaagaatcaaatagatgcaataaaaaatgataaaggggatatcatcaccgatcccacagaaatacaaactaccatcagagaacactataaacacctctacacaaataaactagaaaatctagaagaaattgataaattcctggacacatacaccctctcatgtctaaaccaggaagaagttgaatctctgaatagaccaataacaggctctgaaattgaggcaataattaatagcttaccaaccaaaaaaaagtccaggaccagatggattcacagccaaattctaccagaggtacaaggaggagctggtaccattccttctgaaactattccaatcaatagaaaaagagggaatcctccttgactcattttatgaggccagcatcatcctgataccaaagcctggcagacacacaacaaaaaaagagaattttagaccaaatattcctgatgaacattgatgcaaaaatcctcaataaaatactggcaaaaaaatactgggggagggatagcattaggagatatacctaatgttaaatgacgagttaatgggtgcagcacagcaacatgggacatgtatacatgtgtaacaaacctgcatgatgtgcacatgtaccctaaaacttaaagtataataaataaaaattttaaaaaacgaaatgatcaatctttgcacaaacctgcagataaagaactcagaaaaaattgctggagaagagacttggctgaacaactgaaaacatgatgaatgggcatcatccctaacaagaggctattgaagaaagaatgcaagatggggcacaggcacattggttcacgcctgtaattccagcactttgggaggcccaggctggagaattgcttgagtccaggagtttgagaccagcctgggcaacatagtgagaccccgtttctacaaaaaaatcaacaaaacgaacgtggcgtggtatgcacctgtagtcctagatactcaggaggctgaggcaggaggatctcttgagcctgggaggtggaggttgcagtgagttgtgattatgccattgcactccaccctgggtgacagagtgagaccctgtctcaaataaataaattaaattaaaaaatttaaaaaagaatgcaagatggtaatgaagggatgacaagtcaaattttagagccaattataaattcaggcctcatctaaagggcacatatttttccctttccgcttaatgatacccacatgcggtagcatacaacatgtatgtacatatgtataattgatttgggagtgttttactgctgttagtattcactaaactgcagggtgaatctgtctctcttttctactagaacacattctatttgctttaaaatttgaacttgcttattttaatattcaaccatgccatctgttacctatttgtatgggttgttgtattttgtatttatgcagctcctattaagctgaataaaagtgtggtcatggcacatgtgggatttttctttttctttttcttttttttttgagatggagtcttgttctgtcacccaggctggagtgcagtagtgccatctcggctcactgcaacctctgcctcccgggttcaagtgattatcctgcctcagcctcccaagtagctgcgattacaggcgcctgccaccacgcccggctaatttttgtatttttagtagaaacgggtttttgccatgttggccaggctggtcttgaactcctgacttaaggtgatccgcctacctctgcctctcaaagtgctgggagtacaggcgtgagccaccacgcacggccaggatttttcttttttattagaataggataaaattagataggttagtagtaatttgtgctttaaaggctaattattgatgtacttttggcatcttggcatgggaaaaatttaaaaaataaagtattattgaaaatatggagaattttttttttgacacagtctagttctatcatgcaggctagagtgcagtggtatgatcacggctaactgcagcctcaaccttccaggctcaagtgatcctcctacttcagcctcccaagtagctaggactacaggtatgtgccaccagcctggccaattttttgtattttttggtagaaacagggtctcaccatgttgcccaggctggttttgaactcccagacttaagcaatcggcccgcctcggcctcccaaactgttaggattacaggtgtgaaccgctaaactaggccaggagagatttttcagaaattaattttcaaataaaaagtagttactgttctccctaaatgatatatatttcaaatgtgttctttagggaggtggggtgaaatattcaaaatggctatttagggctgggcgtggtcattcacacctataatcccagcactttgggaggccgaggcaggtggattgcttgaggtcaagagttcaagaccagcgtgtgcaacgtggcaaaaccccatctctacaaaaaaaaaaaaaaaaaaattacagaatttaactgggcgtggtggtgagcacctgtagttgcagctactcaggaggctgaggtgggagggtggcttgagcctgggaggtggaggttgtagtgagctgagattgcgtcactgcactccagcctgggtgacagagccagaccctgtctcaaaaaaaaaaaaaagccatttaatatttttaaatgtgtttgaggtcagggcaataactgaatgtccagacaggttatttcaaagtacaatttcgggaaaactcatatttcatctgtaagttatggtgggacatttgtttaaaatatcaatttttctttgcacaaatgaagtaatcttccaattttaattttttgtatcttcatagtaaataattgtcatgccgtatagatacaagattccttattttggttttttataatgaagagttgaaggtttatatattcattttaattttcttcatgagaaactggaaatagtaaaatggtatgtcttttttgtctgtgcgaatttctccttaaacaatttttcttagatggtggagttaccttaggaatggtgcttttatgtgaagctgctacctctgacatggatattggaaagcgaaagagtaagtcaccttactcaaaatgtaacagtgctgyctgtactatggaaaaagagtgatctcttaatcacttttcctcttacttataggataagtaggttattttacccctttactatttttttctttaaatgtcatatctgttattaaackcctttactattttaaaattaatatatgctcattatagaaaatgtaaaaaaacaggagcatgaaacattccaccactgaaaaactaaytatttttaaattgtaatatatttctttccacttataaaaaccttaaaaactgtatatataaaattttgacacttcacaccccctttttaaactggagttaaataactaataactttttctatatacataattttaaacttatactctgttattgtttgttttctttaagatagggtctcactctgtcactcaggctggagtgcagtagcataatcatagctcactgcaacctccgcccctaggctcaagctgtcctcacacctcaacttccctagtagctgggactacaggcatstgccaccatgcccagcttatattttgtactttttgtagagatggggttttgtcactttgcccaggctggcctcaaacccctggactcaagtgatcttcccacctcagcctcccaaagtgttgggattacaggcgtgagctgccgtgcctggctgacttatactctatattataatttaactattccgatttttttcaatgtttagttttttcctaattttaactataattattcttcagtaactatcatgatacattaagcatcattttttttttttgagacagagttttgctcttactacccaggctggagtgcagtggtgcaatctcggctcactgcatcctctgcctcccaggttcaagtgattctcctgcctcagcctcctgagtagctgggattacaggcgcccaccaccacgcccggctagtttttttgttttttggggttttttttttcttttttttttttgtatttttagtagagacggggtttcaccatgttggccaggctggtcttgaactcctgacctcaggtgatccacttgcctcagcctcctgaagtgctaggattacaggcatgagccaccacgcccagccatcattcttatttaatattgtttccttaaggtagattcctagaagaagaataactgtgtggtcctctgtctgagtattttcaattctcttgatgttttaatcattacagattattttggcaagttaaaataatttagatttctactactggtatttaagaatgtttgttttggccgggcgcagtggcttatgccagtaatcctggcactttgggagaccgaggcgggtggatcacttgaggtcaggagttcgaggccatcaagcctgatgaacatgatgaaaccctgtctctactaaaagtacaaaaatttggccagacgcggtggctcacgcctgtaatcccagcactttgggaggccaaggcaggtggatcacaaggtcaggagtttgagaccagcctggccaacgtggtgaaacccccgtctctactaaaaatacaaaaattagctgggcatggtggcgtgcgtgtgtaatctcagctacttaggcagctgaggcaggagaattgcttgaacccaggaggtagaggttgcagcgagccgagatcacgccactgcactccagcctgggtgacaaagcgagactccatctcaaaaaaaaaaaaaaattagccaggcgttgtggcgcatgcctgttatcccagctagttgagaggctgaggcaggagaatcgcttgaacctgggaggcagaggttgcagtgagccgagatcgtgccattgcattccagcctgggcaacaagagtgaaacttcatcttaaagaaaaaaaaaaaaagaatgtttgtttcattggttttgttgttgttgttgttgttaagacagagtcttgctctgtcgcccaggctggagtgcggtggcgcgatctcagctcactgcaagctctgcctcccaggttcaccccattctcctgcctcagtctcccgagtagctaggactacaggcacccgccaccatgcctggctaatttttttgtatttttagtagagatgaggtttcactgtgttagccaggatggtcttgatctcctgacgtcgtgatccgcccgcctcggcctcccaaagtgctggggttacagacatgaaccactgtgcccagccatttcattgtaattttatcagcattaatctcattaatatgtatctgttttatagatacatatatatttgccaatcagataaggtggaaatgtattattttgtactccttttatttttataaggtcaaatattttcctaaatgtttactagtcatttgtgtttatgtttttccttctataaattgtccttttgtcttttgccatttatctgttagagtcttagcccttttatttggtttgcaaggaatttttttttttttttttcgagacggagtcttgctctgtctcccagactggagtgcagtggtgtgatcttggcttactgcaacctccgcctcctgggtttaagcaattctcctgcctcagcctcccatgtagctgggattacaggtgcacgtcaccacgcccagctaatttttgtatttttagtagagacgggatttcaccatgttggccaggctggtctcgaactcctgacctcatgatgtgcctgcctcagcctcctaaagttctgggattataggcgtgagccaccgtgctcagctggacattttttttttttttttaaggccaggccttactctgttgcccaggctggagtgcagtgccacaataatgactcactgtagcctcgaactcctgggctccagcagtcctactgcctcagcttcccaggtagctatgaccacaggctcatgccaccactcccagttaatttaattttattttttgtagagatggggtctcactttattgccgaggttggtctgtatctcctgtgctcaagcaacctttcccactgtggcctcccaaagtgctaagattacaggcgtgagccaccatgcccagcctgcatgaactttttatatattagaatattcacacattgttatctgttgcagagagaatctaacaatgtaatttggttttactttcatgaaataagtcaagattttccttttatgattaaaaagttaaatgtcaaccaggcgtggtgactcacacctgtaaatcccaacacttgggaagccaaggcaggtggatcacctgaggtcaggagttcgagactagcctggccaacatggcgaaaccccgtctctaaaaaagcaaaaattagccaggcatggtgtcacgtgcctgtaatcccagctacttgggagtttgaggcatgagaatcacttgaacccaggaggcggaagttgcagtgagccgagatcgcgctactgcactccagcctgggcgacggagtgagacttcatctcaaaataaataaataaataaaaaagttaaatgtcataaaaattaccctacctaaataaagtctaatatttactttaacttctagaaaaaagatgaagatactgaacttaaaatttgagaaatacttgttttgctcaattaaaatagattttttttagctggatgtggtacaacgcacttgtagtcccagctacttgtgaggctgggacaggaggatggcttgaggccaggagttagaggctgcagtgagctatgatcacaccactgcacttcagtctgggcagcagagcgagactcaatctctaaaaaaatgaatttttacgtgttagaaaaataattaatgtatcagtttttaaaatttttttaaaaaaatatggaacacttcacgaatttgcatgtcatccttgcacaggggccatgctaatcttctctgtatgattccagttttagtatatatgctgccaaagtaagcattttatagtttttaatccagtcagtatatgtcctttcactgcctgactttttacgagatcaggcgcgttcagggtgctatggctgtagactttgcctgactgtttaaaaattgcctatttcagtgtttattcttgggaaaaggccatcaaagtacattactgacatgaacttaaattgttaaacattttggcaacatatactgaaatagtcacaatttgatctcctaagtttcttacctaacaaaatgatcacaaattaatagacgtttctttagcatgttctgggaactgctctaagcacttttagatgtatgaaaagaggaggatacaaatatatacagagtgatgctgtatatacgtatgtgcacattttctttttcttttttttaaatctgagacagggtctcactctgtcgcccaggctggagtgctgtggagagatcataactcactgcagccttgacctccctggctcaggtgatcctcccacctcagccttcctagtaggtgggactacaggcatgcactgccacacctgggtaattttttgtagagatggggcctcgctacattgtccaggctggtcttgaactcctgggctcaagcaatccttctgccttggcctccccaaatgctgtgatttacaggcgtgagccatcacacgcagtctatgagtacattttcttagagaataaaaggctaacttgtctacactcagcatgtgttaatactcaggaaaagtattttatttttaatttttgtgggtacatagtaggtgtatatatttatgggatacatgagatgttttgatatataggcatgcaatgtgtaatagtcacatcacggagactgcagtatccatccttcaagtatttaccctttgtgtcataaacaatccaattatacttttttagttattttaaaatgtacaattaaattattattgactatagttatcctgttgtgctatcaaatagtaggtcttatttattctattttttttggtacccattagccatccgtacttcccccggcattccccaactaccgttcccagcctctggtaaccatccttctactctctgtgtccatgagttcaattgttttcattttttgatcccacaaataagtgagaacatatgatttttttttctgtacctgaattgtttcacttaatgacttccaaggctgggcatggtggctcactcctgtaatcccagcactttgggagaccaagtggggcagattatttgaggtcagaaagttctagactaccctggccaacgtggtaaaaccccgtatctactaaaatacaaaaattagctgggcgtagtggtgcacacctgtaatcccagctactcaggaggctgaggcaggagaattgtttgaacctggaaggcagaggttgaagtgagccaagctggcgccactgcactccagcctgggtgacagagcgagactccatctcaacaataataataatgatttccagttccatgttgttgcaagtgacaggatcttatttttttaatgactgaatagtactccattgtatatatgtaccacgttttctttatccattcatctgttgatggacatttaggttgcttccaaatgttggctattgggaacagtgctacaacaaacatgggagtacagatatctcttcggtatactgatttatttttctgtgggtgtatacccaagcagtgggattgctggatcatatggtggttcaatttttagttttttgaggaacctccaaactgttcttcttagtggttatactaacttacattccccccaacagtgtacaacagtgtacaagggttcccttttttccacatcctcgccagcatttattattgcttgtcttttggatataagccattttagctggggtgagatgatagatatctcattgcaatttttatttgcatttctctgatgatcattgatgttgagtagtttttttatgcctacttgccatttgtatgtcttcttttgagaaacgtctattgaaatattttctttttttgcggtggctcacgcctgtaatcccagcactttgggaggccgaggcaggtggatcatgaggtcaggagatcgagaccatcctggctaacacagtgaaaccccatctctactgaaaaaaaatacaaaaaaattagctgggcatggtggcaggcacctgtagtcccagctacttgggaggctgaggcaggagaatggcgtgaacccgggaggtggagcttgcagtgagctgagatcacaccactgcactccagcctgggcgacagagcaagactccgtctcaaaaaaaaaaaaaaaagattttatgttttttcgatcagatcattagtttttttcctgtagagttgtttgagctccttttatattctggttattaaccccttgtcacatgggtactgtgcaaatattttctcccattctgtggattgactcctcactttgttgattgtatcctttgctctgcagaagcttttaaacttgatgtgatctcatttgtctatttttgctttggttgcctgtgcttctggggtattactcaagaaatttttgcccagactaatgtcctggagagtttccccattgttttcttatagttgtttcatattaatagtttgcagtcttaggccaggcacagtgactcacacctgtaatcccaatgctttgggaggccaagaagggcagatcacttgaggccaggagttcgagaccagcctggccaacatggtgaaaccctgtctctactaaaaatacaaaaattagccaggtgtggtggtgtgtgcctgtagtcccagctacttgggaggctgaggcaggaggattgcttggcccaggaagtggaggttgcagtgagccaagatcatgccactgcactccagcctgagcaacagagcaagactcttgtcttttatttatgtgtgtgtgtgtatatatatatgcatatatatacacacatgtatatatatatatgcatatatatacatatatgcatatatacacacatgtatatatatgcatatatatacatatatgcatatatatacacacatgtatatatatgcatatatatacatatatgcatatatatatatatggtgtacagtcttagatttaagtctttaatccactttgacttgattttcctatatggcaagagataggggtctagttttgttctgcctatggatatccagttctcctggcaccttttattgaagagactgtgttttctccagtggatgttcttggcacctttgttgaaaatgagttcactgtaggtgtatgggtttgtttctgagttctgtcttctgtcccactggtctgtatgtctgtttttacaccagtactatgctgttttggttactataactctatagtataatttgaagtcaagtaatatgattcctccagttttgttctttttgcttaggatagctttgactatcattggtcttttgtgatttcatataaattttgttttttctatttctgtgaagttgtcattggtattttaataaggattgcattgaatctatagattgctttagatagtatggacattttaacaacatccattcttccaatccatgaacgtggaacatctttccatttttcgatgtcctcttcagtttctttcagcagtgttttatagttttcatcatagagttctttcacttctttggttaagttaacccttttcccatttgccctgagaatactcactggcagtgcttgtggctgcagtgtttacgctgagataactctgccacaaaatatcgtgctttaattattgttttcacatccactctagtatatcaactttggaaacaaaattgatatgttagatatcactgggttcaagtgatccattaccactactgaaaacagagtgctgtaaatagaataatatactaatatactagacatcagtccatttttatttccattatagtggtatttccatttacaaaatatagtaattcttgatcactgaaaatgtcaaatcctagaaaatgtagcattccacgtgtaatgtttacaccattctcgaacagttgttggccaaagattcatttgatgaattcaatttttctgaaatagactattgtgatgattcagacgattctgatgttagttctgtttagtaataactccaacaacagtttttgttttattttcacattgaaaatcagtcagatttacttcagcctcaaacagcgtgattatataaaattaaatgagcattggcagcaagctgcacttcttttttgtaaattagaaaagaattaaagagaaatattgtttaacatttacacattaagccctagtcatattgtgtaacaattagaaaaggcaaaagaattgttccataagtaaaacaaaactgaaagttgattttcttttcttttctttttttttttttttttttttttttttgagacagaggcttgctttttcgcctaggctggagtgcagtggcgcgatcttggttcactgcaagctttgccaagcgattatcctgcctcagcctcccgagtagctgggattacaggtgcctgccgccacgcctggctaattttttttgtagtttttagtagagatggggcttcatcatcttggccaggctggtcttgaactcctgacctcgtgatccacccgccttggcctcccagagtgctggggttacaggcatgagccacagcgcccggccgaaaattgattttcttatcagtcactaagtatgttaccctagaacaaacttgtccagtctgtgggccacatgcggcccaacacaaacttgtcaacttccttaaaacatcatgagggtttttttctgcaatttttttttttttcagcttatcagctatcattagtgttagtgtattttatttgtggcccaggacagctcttcttccagtacggccctgggaagccaaaagattggacacccctgccctagagcttcctttgctgttggacacatgcttccctacatccctatctctatagttcttagccatttttagtccggggattgaaagagcttcacatcatgacaatccatacttgcgcatttggggattagtatttgtagttcactttaataactgctgtgctaatgtaggacatgacatgtgggattagtggagagagctatgaatctagggctagggatcagattttttttctcattcaaataagaaatccatgtttattgagttacatatataaggctgtgtagttatctgtgcatgaataaagtactttcaagtgaggctatcacaatgaagtcatcagatgtctaagttaatgtttatcaatactacaaggccacttttaggggttttaaagttcaataaataagtaagccgggcaccgtggctcatgcctgtaatcccagctctttgggaggctgaagcggaagatcacttgagcccaggagatcaacaccagcctgggcaatgtagtgagacaccgtcttctcaaaaaaattaaaaaattagccaggcatggtggcacacatctgtagtcccagctactcaagaggctgtagtgggaggattgcttgagcccaggaggttgagactgcagtgagctgtgattgtgccactgcacttcagcctgggcaacagagcaagaccctgactcaaaaaaaaaaaaaaaagaaaaccaaaaaaccaaatgggtgattttcttgtcgattgtaacagtgtttctaacagtaaacctttcagtgtgatgactttaaaggaattcattatttcatacatttgaattgcataattatgtaaaggagttactctattacattgtaatggagcaaattaaaggggaaggcagattcctgaagattaagaaatagggatgaaaattgttgaaaagttgagatttatcaataatgtataccccttccttttcactctctgaaagtatagactgccaggccgggcatggtggctcaagcctgtaatcccagcactttgggaggctgaggcaggcggatcatgaggtcaggagatcgagaccatcctggccaacaaggtgaaaccccgtctctactaaaaatacaaaaaattagctgggcgcagtggcgggcgcctgtagtcccagctaccctggaggctgaggtaggagaatggcatgaacccaggaggcggagcttgcagtgagccgagatcgcgccgctgcactccggcctgggcgaaagagcgagactccgtctcaaaaataaaataaaataaaataaaataaaataaaataaaataaaaaaagaaagtatagactgccatggttatttattatactcaacctgctcattttactctccttttatttttctgcagtaatgtgtgtggctggtattggacttgttgtattattcttcagttggatgctctctatttttagatctaaatatcatggctacccatacaggtatgattcttattttttgtttatacagtgattaccaatacctggaatgattagagttgatattgctttataatatccttctttttgctttgcttccaaactattttagcttataaaggaaagatataggctttatttttatttattcatctatttatttattatttatttatttatttatttatttwtgagatggagttttgctcttgttgcccagactggagtgcaatggcgcaatctcggctcactgcaacctctgcctcccgggttcaagcgattctcctgcctcagcctcccaagtagttgcgattacaggcgtgtgccagcatgcccggctaattttgtatttttagtagaaacggggtttcaccatgttgatcaggtcttggactcctgacctcaagtgatccacccgcctcatcctcccaaagtgctgggattataggcatgagccactgagcccggcctattcatttattttcagagacagggtctcactctgtcactcaggctgaagtgtaatggcgtgttcatagctcattgtaaccttgaactcctgagctcaagccatcatttcacctcagcttcccaagaggctaggactacagctgcacatgaccacacccagctaatatttttattttttgtaaagacagggtcttgctatgttacccaggctggtcttgaacttctggcatcaagcgagtctcctgctcagcctcccagagggctgggattataggcattagccagccaccatgcccaaacagctgtaattcagatatgttcccatataaaaattaattatagtataatggacaatattagtatgtgatttctcaggaacatcttttagatttattttgccatacctaatttattctagaaatctcatatgtattctagaaatacataatgattagaacattttatgccattatctattcacatagctccttgtctgcatattatacttccttttgaagaagaaatgattttttttaatgttaaaaacttcttctcgcctctacttttttttaagaaatagagtgccactgcactccagtmtgagtaatagagtgagaccccatctcaaaaataataattataataatttatcctctacagaatactaattgagatgtgarggtaattttgctgggacttctgttaattatttgatcagcagagttgattcaatagcagtgtcatgtgcctgtagtcccagctactcagaaggctaagacagaatgatcacttgagcgtgggagtcccagaccagactgggcaacacagtgagaccccatctctaaaaaaatgaaaaaataaaattattaattagtgtctctattcaggagatattttaacttgaggttattctatttccttttgtcataagactaacgggtctctcagtgtttctcactttttgttattgatacccaaagattatcatgtacgtaccaaaatgctcttttatctgttaaaaccaacatactgcttattgattaaaagtaaatcctacttttctttcagagactaatagattggaatatatttttgtttcagctttctgatgagttaaaaaggtcccagagatatatagacactggagtactggaaattgaaaaacgaaaatcgtgtgtgtttgaaaagaagaatgcaacttgtatattttgtattacctctttttttcaagtgatttaaatagttaatcatttaaccaaagaagatgtgtagtgccttaacaagcaatcctctgtcaaaatctgaggtatttgaaaataattatcctcttaaccttctcttcccagtgaactttatggaacatttaatttagtacaattaagtatattataaaaattgtaaaactactactttgttttagttagaacaaagctcaaaactactttagttaacttggtcatctgattttatattgccttatccaaagatggggaaagtaagtcctgaccaggtgttcccacatatgcctgttacagataactacattaggaattcattcttagcttcttcatctttgtgtggatgtgtatactttacgcatctttccttttgagtagagaaattatgtgtgtcatgtggtcttctgaaaatggaacaccattcttcagagcacacgtctagccctcagcaagacagttgtttctcctcctccttgcatatttcctactgaaatacagtgctgtctatgattgtttttgttttgttgtttttttgagacggtctcgctgtgtcacacaggctggagtgcagtggcgtgagctcggctgactgcaaactctgcctcccaggtttaagcgattctcctgtcacagcttcccaagtagctgggatttacaggtgtgcaccgccatgccaggctaatttttgtgtttttagtagagacagggtttcgccaagttgtccaggctggtcttgaactcctgggctcaagtgatccgcccgcctcagtctcccaaagtgcgaggatgacatgtgtgagctaccacaccagcaatgtctatgcttctcgatagctgtgaacatgaaaagacatctattgggagtccgaggcaggtggattgcttgaggccaggagttagagaccagcctggccaacaaggcaaaaccccgtctctactaaaaatatgaaaattagctgggcttggtggctcatgcctataatcctagctacttgggaggctgaggcacgagacttgcttaatacctgggaggcggagattgcagtgagccgagatcacgctactgcgctccagcctgagtgatagagtgagactctgtctcaaaaaaaagtatctctaaatacaggattataatttctgcttgagtatggtgttaactaccttgtatttagaaagatttcagattcattccatctccttagttttcttttaaggtgacccatctgtgataaaaatatagcttagtgctaaaatcagtgtaacttatacatggcctaaaatgtttctacaaattagagtttgtcacttattccatttgtacctaagagaaaaataggctcagttagaaaaggactccctggccaggcgcagtgacttacgcctgtaatctcagcactttgggaggccaaggcaggcagatcacgaggtcaggagttcgagaccatcctggccaacatggtgaaaccccgtctctactaaaaatataaaaattagctgggtgtggtggcaggagcctgtaatcccagctacacaggaggctgaggcacgagaatcacttgaactcaggagatggaggtttcagtgagccaagatcacaccactgcactccagcctggcaacagagcgagactccatctcaaaaaaaaaaaaaaaagtaagaaagaaaaggactcccttagaatgggaaagaaaaatcataaaatattgagctgatgcctgtatatagaaattaagcgtttctcgaaagctgttctatgttttgctgttattttagtctttattctcttcctttaggtggagaaacaaagtaccaatttgaagggattttttttattttgtcttttggtttctgtcagtagaaataaccatatgtgctaaccaaatttctgtgaagaatgttttcatggttatcattatatctaactataacctcccccatagttatgaagagtaacctgaaatgccactattgtggaaataggataattgtaattgtgaaaaaataattttaaggaaatcttacaagtattacattaaaaagatactatgactgccacctgccatttaccttctaataaccctgccatgtggtttgcagaaagagatggatatagtagcctcagaagaaatattttatgtgggttttttgtttttcgttactagatttcatggatgaggggatatggttgaccttttactttttaatggagcagccagtttttgttaattactcacttgtaaattgtgagattctgaattccttacctgctattcttgtacttgtctcaggccaaatctatgctgtggttcttatgagacttgtatgaagatgccctgatttgtacagattgaccacgggaatactactgccatgtaatctgtatagttccagataatttgtcatgaacattgacagaatgacaattttttgtatttgctttttctccctttaagagcacattcttctgtaaggagaaaggcagcattctggctaaaatgtgtagaaggtaatttactacacttataaaatagtgtgacttttgtgaaaattttgaattagctttcatatgaagtgccttaagtagactcttcatttacttytctggtaatggtttaaatatcatttgttatgcatttttaagatacagttcagaatgacacattgtagtggcaaagataaccaaatgtctggctgtttgctttttgaccatatcaataaacttttacaatctaaattctgagtttttgattaccatctaaagaggagtgagttttaaacactaaactagaattgtaaaattaggattttacattttgaagttataattaaattaatttaaatttcatattgtcctaaggacagtttgatgggacagtttctttaagtatttctggattgggatatattattctaggaatctatacatggtccctcattcttaatgttgttacccattaggtgagtcaaaacaaccaagatgagtagataaatgactgtttgcaacaattgatctacctttcgtcccagacagtgaacattccttgactaggtaatttccttttgataataaaaacttgatttgaaagttaccctggcagattataagttatatgaaactagacagcagctcttttgcaaacatggagtagaaacactgcacaggaagtaaagagatctggcttttagcccttgctctgtttctgtctaactatatgaccataggtgtcacctgaacctctctgaacatatttctttatactaagtaaagtgtattaggctaaattaccttagtagtccttcctgctctattgttctattatgcaaaatattaaagatgcacttaaatttgaatagataatatttttatatccagatttggtgctgaattaaaatcaattgaaatggaggatattctgcagtcagatttctgaagaagctaggaaatgctggtggaggccattataactacaaattgcttaatatgcattgaaatattttttggaaaggatgcacttggaactctattagaccgttattgcattgctctaaagaaatacctgagattgggtactttataaagaaaagaggtttaattggctcacagttctgcagggtgtacaggaaacatgatgctggcatctgctcagcttttggggaagcttcaggaaacttacaatcatggtggaaggcaaagggggagcaagcacatcacatggccagagcaggagcaaaaaggtgaggggagttggcagacacttttcaatgaccagatctcgcgataactcactatcacaaggacagtaccaaagggatggtactaaaccattcatgagaaacctgcccccatccagtcatttcccaccaggccccacctccatcattgggaattacaattgaacgtgagatttgggtggggacaaagatccaaaccatatcggaacccatatgttaataagatttttttttttttgagacgcagtctcgcattgtcacgcaggctgaagtgcagtggggcaatctcggctccctgcagcctccacctcccgagttcaagcgattctcatgtctcagcctcccgagtagcttggactacaggcaaacaccaccccacgcctggctaattcttgtatttttagtagagacggtttcaccatgttgacaagcctggtctcaaactcctgacctcgggtgatccacctgtctcgccctcccaaaatgctgggattacaggagtgagccaccgcgcccaacctcgaggtcttgatttacatgggttctgcccaattctgagcaagaatgagatcagcaactgtaatagtatgctgttacaacagaaagtcaaagccaaaaggatcttagataccatttaaatcagccccttcattttgactgctgaagaaacctgccatagaaaagtgaagcaatttactgaagtttattccagggaagtacctacaggtttcctctttagctgcaaattccctatggattacatttcaagtgtagatgcaaattactcccttgacgcttggaaaccatactgtagttcaagcttatccaaccctcagcccatgggccgcatgcaacccaggatggctttgaatgcagcccaacacaaattcataaacttaattaaaacattatgagtttttttctgattattttttagcccatcagctatcattagtgttagggtacttaatgggtagcccaagacaattcttccaatgtggcccagggaagccagaagattggacacccctgctgtagtttgtgctcactaggtttgcttcctgacatctagattgcctggagaagagtcctaatgagagagagatttccctagaggagctgagcagacttcctaaagaggaaggagtttaatctacctttaatctgtgaatgtagaatttaggtggggagactgtatattagggttctgtagaggaacagaactaataggatagatgtgtatatgaaggggagtttaggctgggcacagtggctcacacctataatcccagcactttgggaggcccaagtgggtggatcactttgaggccaggagttcaacaccagcctggccaacatgaaaccctatctctactaaaaatacaaaaattagccgggcatggtggcatgcacctgtaatcccaggattacaggagaggctgaggcaggagaaatcgcttgaacccggggggcggagattgcagtgagccaagattgagccattgcactccagcctgggcagcagagcaagactctgtctcaaaaaaaaaaaaaaaaaaaagagtgggggagtttattaaggaatattgactcacacaatcaaaaggcgaagtcccacaatagaccatctgcaagctgaggaggagcaaggaagtcagcccatgtcccaaaacctcaaaagtggggaagccaacagtgcagccttcggtgtggccgaaggcccaacagctcctggcaaaccactggtgtaagtccaagagtctaaaagctgaagaacttggagtccaatgttccagggcaggaagcatccagcacgggagaaagatgaaggccagaagactcagcaagtgaagtctttccacgttccgcctgcatttatcctagccatgctgagagcagattaaatggtgcccacccagattgagggtgggtctacctctcccagtccactgactcaaatgttaaatctcctttggcaacaccctcacagacacactcaggaacaatactttgcatccttcaatccaatcaagttgacactcagtcatcacagagggaggtagctggcaagatggccaaataggaacagctctggtctgcagctcccagcgagatcaacgcagaaggcaggtgattcctgcatttccaactgagcctcctctagtgatacccaggcaagcagggtgtggagtggacctccagcagactccagcagacctgcagcagaggggcctgactgttagaaggaaaactaacaaacaggaatagtatcaacatcaccaacatcaaagaccgaaggtagataaatccacgaagatggagagaaaccagcgcaaaaaggctgaaaactccaaaaaccagaacacctcttctcttccaaagggtcacaactcctcaccagcaagggaacaaaactggacggagaatgagtttgatgaattgacagaagtaggcttcagaaggcaggtaaagacaaactcctccgagctaaaggagcttcatgttgtatttatgtttagagaagaacataaatgacctgatggcgctgaaaaacacagcacaggaacttcatgaagcatacacaagtatcaatagccgaatcgatcaagtggaagaaaggatatcagagattgaagatcaactcaatgaaataaagcaggaagacaagattagagaaaaaaagagtgaaaagaaatgaacaaagcctccaagaaatatgggactatgtgaaaagaccaaatctacatttgattggtgtacctgaaagcgacggggagaatggaaccaagttggaaaacactcttcaagatattatccaggagaacttccccaacctagcaaggcagaccaacattcaaattcaggaaatatagagaacaccacaaagatattcctcgagaagagcaaccccaagaaacataattgtcagattcaccaaggttgaaatgaaaaaaatgttaagggcagccagagagaaaggtcgggttacccacaaagggaagcccatcagactaacagtggatctctcagcagaaaccctacaagccagaagagagtgggggccaatattcaacattcttaaagaaatggcaaagacttggaactaacccaaatgcccatcaatgatagactagataaggaaaatgtggcacatatacaccatggaatactatgcagccataaaaaaggatcagttcatgtcctttgcagggacatggatgaagctggaaaccatcattctcagcaaactaacacaggaacagaaaaccaaacactgcatgttctcactgctaagtgggagttgaacaatgagaacacatggacacagggaggggaacatcacacaccggggcctgctggggggtgaggggttgggggagggatagcattgggagaaatacctaatgtagatgacgggttgatgggtgcagcaaaccaccatggcacatgtatacctatgtaacaaacctgcgcgttctgcacatgtaccccagaacttaaagtataataataaaaaaaatcatcacagagacagacttttatttagaagagaggcaggaacaatcgcctagagattactgttcagaagtttgtgtttgtacatcccttaaactctgtgttctcaacttggcctgtgcataataaaggagttaattatgactgcctgtcactaataataagggaaatgcaaatcaaaaccagaatgagataccacctcataccattaggatggctactatcaaaaaaccagtcacctgtagtcctagctactcaggaggctgaggcaggaggatcgcttggcccaggagtttgaggttacagtgagctatgatcacgccactgcactccagcctgagcaacagagcaatacctgtctctaaaacaaacaaacaaaaaaaatgttggcaaggatataaagaaattgtaacccttgtgtaccgttggtggaaatgtaaattggtgtagccaccatagaaaacagtctagaattgcctcaaaaaattaaaaatcaaattaccatagagtccaccaattccactttagggtatatgttcaaaggaattgaaagcagggacttgaaaagatacttgtacactcatgttcatagtagcattattcacaatagccaaaaagtagaagcaacccaagtgtccatccacggatgaacagataaacaaaatgtggtatatacctacaatgggacattattcagccttaaagaggaagaaagttcattctgcaacatggaagaaccttgaggacatgatgctaagtgaaataagccagtcacaaaaacaaatactgtatgattccacttatattaggtacctagagtagtcaaattcataggaacagaaagaagaaaggtggttgccaggggctggggagaagggggattggggtgttgtttaatgggtatagagtttcagttttgcaagatgaaaagagttctagaaattggttgcacaacaatgtgaatgcacttaacaataatgaatatatattttaaaatgattaagctgagcacagtggtttgcatcttagtcccagccactcaggaggctgaggcaggaggatcgtttgagcccagaagttcaaggctgcagtgtgctatgatcctgtatgtgtatagctgctgcactccagtctgggcagtgtagtgagatcctcatctcttaaaaaatatataaataaataaaaagaatggtaaattttatgtgtattttactacaattattatttgttaataccagtgcctgggccccaaacctgtattggtacatctccactgacaccaccttgtatttgttctttcatgtgggtcctgaaaatatgaatacagctgaatagagtatgactcatggtggaaaagttgagagatggtcttcagccacttttgggtgatagtttaagcacattcggctaaaccttgcctacagcatcagtgatgatttgtattaatatattccaatgagtgcttcctaaataatgacttccagctggga

SEQ ID NO: 94523 - DNA, 23844 bp, Homo sapiens
ggcctttcacaggtgtggttagcaaggaaattttgacctgctccgtttctgacctgggccagttctcccctccttaggcaacctggttatccgcctttccccagaggtcaccatactaatgccaaacttagtgcagacacccaatcggcatagtgcattgcagcccagaactcctgtacagactcaagcgatcctcctgcctcagcctcccaagtacctgggactacaggtgtgtgccaccacatctatttattttttgagacagggtctcactctgtcacccaggctggagtgcagtggtgcaatcatggctcactgcagatttgacctcccgggcttacatgatcctttcacctcaccccaccgagtagatgggaccagaggtgtgcaccatgcacccctaattttttaattttcttgtagagatggggtctccctatgttgctcaagctattattattttaaatattttttctgtttctttctcttctctttgtttctcttctctttcttgcatccccattatgtgtatgttattttttttcatagttgtcgcacagttcttgaatagtctgtttcactttttcagtctctttgttctttgcttttctgtcctggaagtttctattgatatatcctcaagcgtagagattctttcttcagccatgtccattacactcatgggcctatcaaaggcatttctcatcactagaacagtgtttctcatctctagcctttctttttattctttcttaggatttccatctctctgcttcacaggttcttgcatgctgtctactttattcattagagcccttagtatattagttataattgttttaaattcccggtctgataagtctaacactcctgccatatctgagtctgggtctgatgcttgctctttttcttcaaactttgtgttttgccttttagtatgacttgtaattttcttcttgacatcagacatgaggtactgggtaagaggaactgcagttagtaggccctacagtaatatcgtagtaagatggcaaaggacagaagagtgatcacagtcctatgattaggtctcagccttttagtgatcctctgtctctgaaatgttaacttcacaagtgcttcttggttttccccctttggatggaacaggacagttagagctctgtatacacctaaaaaacataaacaaatattgaactttagccaatgtatgcacgttgaaatgtttgagggggacagggaaagtgtactgatgtctataacttactttgaaagtcatcaaaagacaagatggattgatagataggtggaaggatagatagacatgtgataaagcaactatagtaaaacataaattgtaaggtctaggtggtgagtatacaggttttcattgtacttttttttccaacttttttgtatgtttgaaaatttcataatacaatgttcaaaaaataagcctaacagcctagggagataggtcagagtcagtaggatgaaatttaatgtcagtgaagggcaagtggtctcttcaggtgtagatgctcttttgcttagatgaagaatgaggaagtcattttctgccagctgttcatgtacataaggaatgggttgcactcaaggtaattatgatgtgcttctgtaagagatgctgaattcataaatgtttccataatctctggacaaggaattgggcatgctatcctactccagaccattcacatcctcttaaggtgagatatcccactttctaagagactttggcaaatgagtcatatcagtcaggatgggctgagttttgctgcaataacaaaagactcccaaatctcagtgtcatctccctcatattccacatccaatgtgagttggctgtggctccatctatggcgtttttactctggaacacaagctgacagagtggtttttatttagagcattctatctagtagcagagggaaaagagacatggcaaacacaggccggcttttacagaagccttgtaaggggtctatgatgctcctacccacatagcatcggccaaaacaagtctgatggccaggccttagttcagctagatgtgaacaccccatgctccagcaggaggaggcacagctgatgatgactaacggtgattgaatctaccccaaggagattatcagaatgatgtgaggtctaagaaaggtgagggaactaggggagaggtggcagaggaatgacatgctggttttattcaaacatattagaaaatgcaagacaagatgtgttctgcacagctccaggggcaagctgaagacatttctaccagctaggagtcacaggcttcaggttatcatgggaagcacattctgacaggaaggactacccagcattagggaataccgagggcacgttgttacctgggctgctccatgcgcccaggacagtgatgacacttgaagacagtgttgccttccattctccccctccccataaaatactgggcccagctgcccacacagcagtgagctccctatccctgaaaaaatgtaagcacagcctgggtgctcctggacagagggctgtggatggagcccctgcatcgcagggtgaggccagaccacagcaagccagaggagggtgtgtctagcccagggtacacgtaggacagataacctggcagggatgctgtgctccttcttgctaacatgtgcccctctcaagcttccaggaaaaaaaaatcacataatgaggttgctaagatctacagaaagaatgaatcttctatccatgaaattgtgaagaagggaaaagaaatttgtgccagttttactgtcacacctcaaagtgcaaaacttatggctacagtgtgtgagaagcgcttagggtagaaaaagcattagatttgtgagtggaagatgtcaacagaaacgtattctgattgacagcaaccgtgtagcaccagattaacttcatctggattaaatttgttcactggcatcaatgtataggaaaagatgtggcagatgtagggtttggtactatctgcagtttcaggcatccgccaggggtctttgaagatatcccccaaggatactccatataaatgaaatcatccaatatgtactcatttttaatctaccctttttcactccaaataattatcttgatatatatccatgttgtatcaacaattcatccctttttcttgctaagtagtattccctagtgtggctaaacacagagtgtttacacattcacctgttaatggaaaattgggtggtttccagtttggggattttacaaaaagcctgctgtgaacacttctgaatacatctttgcatgagcatatttttcttatttctcatgtaattactatcaaacaaaaatataaatctggattccataaaaagagaatttattcaaaaggattgttgtgggggttggggggggactattacaataaggagacagtctgacgatgtgatcctcaagtgtctcagaggttaggcaaagggctgaccttgtatagggaggcgtaaacgtggctagaaagaactgttatgggaaagtgagctgagcaagagtgtcatgatcgagcaggtcttaccatgcagatagcctgttctcaggagggaccctcaggagggcggtgggttggcacaagctgcgggtgggccaaagctcaggggcttggagaaggagagaatctgaaccaaggtttggttacaggcattttgttcttattgatctgtgggaacaagcagtccagctaatcatttatgatgccaagaatgggaatttagagggtctgtgtatggtctggtcatgaggggacattcaggattcttatccaagctatatggaaagtcactggttctttccagtagggtgttttctggaacaaaggagtggagggattccttaatcttcactatttctaggagcaaagggctaaggtgcaactcaatactgtcaatagttaggattgaaatggctaggtcatatggtaggagtatgtttaactctcttcatacactgccaaatgattttcaattgtagtgatactattttataatcccataagcagtgtacaagaatcccaggtcctccacattctttcgaatacttggtataatcagtcttctttgtccattctagtaggtgtgagacggtgtcacactgtgcttgtaatttgcatatccttaattattaatgatgttgagcatcttttcatgtctttcaattttctatctgtatatcttctttggtgaagtgtctgtttaaatattttgtccatttaaaaaattgaattgtttgattttatctattgattttaagtgctctttctatattctggatacaagtcttttatcaaatatagcctctgaagatcttttctttcaggctgtaacttagcttttcagaaagtctttgggagctatggcttaatgaaacacttacgccaggttctcctcagcacatccccttgatcacagccacccccataggctccatttcttttttttttttttttttttttttgagacagagtctcgctctgttccccagtggtgtgatctgggctcactgcaagctctgcctcccgggttcaggccattctcctgcctcagcctcccgaatagctgggactacaggcgcccgccaacacgcccggctaattttttgtatatttagtggagacggcgtttcataatgttggccaggatggtctcgatctcctgatctgattcgcccaccttggcctcccaaagtgctgggattacaggtgtgagccaccgcacccggccataggttccatttctatatcagtggtgactttctgcaagctaggctgaagtcccaagctccagacccacgtctccaactgcccaccgttcaatgccctttggatgtcccatgcaaattggagctcactatcatctccccagacccactgctcctccagaagccctgtctccatgaacggccctgcacctaccgggctagagacccaggagccggccttgtacctgcttccttctcacttccacctcctgtcatccagagctgtcagttcttcttcctgaacatctctggacactcaccttctccgccaagcaccgcaccaccattgttctcacccgcaccacccacccagatacctttccttagacgggtggccagagaaaaacttctcaaatagaagtcgggccatggcacgccactgaggaccttccagcggtctcctgtgcacttaaacgaggtccagactcctttgtgggacaagtaaagctcttgatgatctggtccttgagtaatgtgggggcctcttgcccagagcccctcacactcttcaaagccggcagctgaagagctgagcagtagctgtctgtggagttcagccaccgctccccgcacgcctgccctctgcaggggatggagcaccgtttccccacttccccacctgcgcccagcagtgcaggtgaaggcctggctgcggagagtggctgggaaacgctgagctttggggtcaggaatgccagctccactactcaccgcctgtgtcaccctgggaaaacagctctggccccaggttctccataagtaaaacagggtcactcatccctcccctccttaacgacatatgtcagaatcagaagccacaaatcattctctcccacccagcacgctgccttggtctcctagaccactttccccaacaatgggaaaggcgccaggcccagaacaaggccgagaccggatgaggccagcgaagcgcccagggacaaactttcaggcagcgcccactctcggtctcgggcaattgcagggtccctccgagagcgaccgtctccagaaaacgcggccgccgcctgcctatgccctgagcctgaagagcccccggcgccgcccgccccgcactgggcccgccctccgggattggtgccctgctaggggtggttgcctgtgacgtcacaggacgcgcccgcttctcgctggagtgcgcaccgagcggcagtgacttcgccgctgctgtagttccccggctggatgcggtgactggtgccagtgctcaggcgcccgctgcccttgacctcccgccccgcgagccctaactcagcgcaggaggaccggctgccgccgccgccgccgccaggtagaccaggcctggctgggttaggccagaagggtgwccctggcgcaggtctcccgcggagggcagaactagaaccaggtycccggccgtttccgaccacacggatggggcggacccatgtgagccctcactaattgcaggggacgaagctgggcatatggggaaactgggggtttccaggcgagtggacggtgggatgggatccgacgtgcacacccacgtttcaggctactgtttccacctcacgtcgccgcccctttgcttatggactcttgcagagttggattgagctcggactgtgtgacatagtggttgttgcagaagccccagggccactttctgactagtaccttgggcacctgacgtcatccctttgagtctcagtgtcctcttctgtaaagtgagggcgctttacctgaggggattgctgtaaggttggaatgaacctgcatgtgtgwgtcatgtgggaagggaacagtcaatggggcctggrgttctcttggagagctggtaaccagcctcgtccctgaggcaayagccagagagcgcctgtagtttccccacgcatggctgtttgcagggcctctgsaggatctcctgtgggaggtccctacttctcactacaatctttagggcctttggaggatttcctatggaaggtccccacttctcaccacaacattctgggttaaaatgtccttggtaggaagatggggctgaagctagattttcttgcttgcattacaggcttctgaaccaaggacttcaatgtcacctggacttggattcacatcccagctccctcccctcctagctttaagactgtgtaaccttgggcaaatcccttaaccgctttaagccttaactgtttcatctgtaaaatgggactaacagtacctaccttccacaagcgtcaagaattaaatcaggccgggcgccgtggctcactcctgtaataccaacaatttgggaggccgaggtgggcggatcacaaggtcaggagatcgagaccatcctggctaactcagtgaaacaccgtctctactaaaaatacaaaaattagccgggcgtggcggcatgcgcctgtagtcccagctgctggggaggctgaggcaggagaatggcatgaacccgggaggcagagcttgcagtgagccaagattgcgccactgcactccagcctgggcgacagagcgagactccatctcaaaaaaaaaaaaaaaaaaaagaattaaatcrgacattgtaggtagagcacttaatagttggcattcagcggcagcagttactgttatgttagcatgtggagtgtctgagtgtgtgcactttggctcgaacagccttttgacagtggcacagttggtgcttgtgtaagatagcagggcagagaagtcaaaactctgttttctagtcaaactggcgggccacaacagtggtgacctaagtctaatgagtctttaactgaacaaggcagattgaatctycaagtgaggaccaagagtctggggctcagctgcctcaacatttttgggcatagaaggctgtacaatacaaactgcctttgttggaagagcaaggaaccattcagggaaggcmccatgtggtaaggaatagtggccagacttggattcagaacaaaacaagagaatagtgtttgtctttaagtggagccttggactcaaaacaggacctgagctctgtggataatttctttttttttttttttttttttttggagtcgctctgttgcctgggctggagggatgtggcatgttcttggctcactacaacctctgcctcctgtgttcaagtgattctcttgtctcagcttccctagtagctgggattacaggtgcccgccaccagtcctggctaatttttttgcatttttaggggatacagggtttcaccatgttggccaggctggtcttgaactcctgacctcaagtgatccacccacctcgacctcccaaagtgctagggatttcaggtgtgagccactgcgtctggcccttgtggatactttctaggtgatttgaggaggaaaggcacagccatgtctcctgaagttaacaagcattaagctttcccaagtagtgaaatgtcaagcccctgcttctgtcacttatttgttcatttagcagaaagtcactgagagccttctgtgcaccaggcacagtgctgggcagtgaaagagacagacatgtgccctggatccagggaggagatgaccaagtgatggctgtcaggcctagaccttgctgtttgtctgcagcctcttccctcaggcaacttgttctctatcaggagaaatgaaataattattatctggggaggcaggtgggggtgttgctcctagaagacaaggacagcctggtagaggttctagcttgatcatgtgagcagtggaaaccattttaaacaggaccaaaatagcatttaaaaaattgcttatggccactgtgaagccagtttcaccagcgtcacttgcccatgctaggctgccacccagctaattcctggtcctgctcatttagcccagctcagctcacatcacttcctccagaaactagacaagggtagagcccctgaccatcttcacagcattagtcctgatagctgaatcttacgtcagttgttaacatctgtgacctgtgcagggagaatggcagggctgagtttgacctacattgtttccccaatacctacagcagagccaagcacagtgggaactttcagaaagcactggttgaaggaacgctggaatccctgggacttactgcgtagcatgtagtagttgctcctctacaaaagtttcaccttatgaagtatagcaggtaaaatacaagcctggaccgcttcccgtgtggtatgcagggaacggttgatggggcaaagggccttgggctatagccctaggaatatcarggatgctgatgatggctctgagatcctccatctcctggatcctgtgtttttctctgcaggctctgatgctggtgtctggtagaagaagattactcacagctctgctgcaggctcagaagtggccctttcaaccctccagagacatgagactagtgcagttccgggcaccccacctggtggggcctcacttgggcctggagacagggaatggtggaggggttatcaacctcaatgcctttgaccccacactcccaaagacgatgacgcagttcctagagcagggagaggccaccctctcagtggcaagaaggtaagtaagtgggcagcatcgccctgaagcagctgccctggtccccctgcaccctccccgctctgggaaacagcaccagcaggtagctcttttgcaagggagcagagtaaccccacctttccttttctcccrttctcttaaaagatccttagaaatcttacataataacatcttcagttttcagaggagaaaacagagagctaggggaggtgattaacaatttgaaggccatacatgtggtgctggaaccaggactctatacttcatcacactgcctcctctgggaatgaagtcctggactgactgacgggtctgggcccgggggtcctaaaaggcatcttatgcagctgggggagtgatatagactcccagctcctacaaggagagaggactgcaaggaggttttctataagacacttggttcctgggtttggactagattaggtgagagtgtccctgaagcctggacccctatagaatctggtctaaggagctgatgaacaataaattaaaaatactttaagatgtcattttcatctattaaaatggaaaaaaatacaaatgtttcacagctcacagtattaacagtatgttcccatattgccatattctgcaaagactggaaatctccatgcccctcattagggacttgggtatatctctatagagcagtaatatgcagccacaagaaataaagaggacactctctatgtattgttacatattgttaagcagagatctccaaagtcagttgtttttttaaaagatgtaaatagtatgctatcattacatacaaaagggtgggagaagaatatccatagagtagctgcgaagagccaggggaacggggtaaccagaaggggaaagggagacctttccatgtattccagtttgtatcttttacatggacatgagttacctaagggggagaggaaatcaatactggataaataaaagccctgctctgacagcaaaggacaatagtcagtgrttttcacamtgactctgatggttgatagagctaggaaatagatttcaraaagcaaaacctktagctgctgcaggatctgcccagcctgcccgggattgcccacctgttcccagccagaccctctcacctgctctggtctctacagagccttggctgcccagttgccagtcctaccayggtcggaggtaaccttcctggctccagtcacaygrccagataaggtggtgtgtgtgggcatgaattatgtggaccactgcaaagaacagaacgtgcccgtgcccaaggagcccatcatcttcagcaagtttgccagctccatcgtggggccctatgatgaggtggtcctcccaccacagagccaggtcagtgcctccccactgccctccctagtcactgggcccatcacaagggcattctgagctcagtattgagcctactggagccacctctcgctcagtagtgcattcaacagaaactctacaggattatacacacagtagtaacactggccttggaaaaaaaaagttaatgtacgtgttttcctggttacaaaagcaatacaccttcactgtagataaaacagagataaacatttaaaaattacgtcacccataatcccactgcccatggctcggaatattaatgtttttctgtctaccttcccagtgtttctccactcctgtatatgtttatactgtacatatacttaccttttacttaagactccatcaggagcattttttcatgccattaaatattctccctgacatatttaggttaccttggagttttgtgatgtacagggtagtttatattcctgagtaccttactgctggatacttgtttccagtttttkgtttctataaataaatgtcgcaatgaacatccttatgtagaaaagactttgcrtgtccattaatatattattatttccttttttttttttttttttgagacagagtctttctctgttgccaggctggagtgcagtggtacaatcttggttcactgcaacctccgcctcctgggttcaagtgattctcctgcctcagcctcccgagtagctgggactacaggcgcatgccaccacgcccacctaatttttgtatttttagtagagatggggttttaccatgttggccaggatggtctcagtctcttggccttgtgatctgcctgcctsagcctcccaaagtgctgggattacaggtgtgagtcaccacacccggccttattatttcctttgaatraactcttaggatttgaatattatcaaactacaggcagtatttcaaaacccttgagaaaatctcccaattgtcctttaagcaaattgtaagagcaacttacacatccatcgttagtgtatatacccttactaacactggttacttttcctcgcaaatttttattttagaaatgtcttgggaattatagaaaagctgaaataatacagtgaaygctcatatacttttcacctggtttcactgtagacatttgctgtatttgctttctctcccttgccctctccctgcccttcacatggcaaacacacattttttttttggcaggggttggggtgacacattgcaaatattgtcataaaactgaaatagacaytttataaggacaayggcttgcatgaccataccattatcacagccaagaaaattaacttgaatgatatttaatatgaaatccarttgccccaaagatgacttttaatttggttactttgttgctctgtgatcaaccaagggcacacactgtattcagttatatctctttagtagttttaactagaacagggttccatagactttttmttaaagggctgtattagtctgttttcttgctgctaataaagacatatccgagactgggcaatttacaaaagaaaaaggtttaattggacttacagttccacgtggctagagaagcctcacaatcatggcagaaggcaaggaggagcaagtcacatcttaggtggatagcagcaggcagaaaagagcttgtgcagagaaactcccgtttttaaaaytatcagatctcgtgagacccattcactatcatgagaacagcacgggaaagacctgcccccatgattcagtcatctcccaccgggtccctcccatagcacattagaattatgggtgctacaagttgagatttgggtggggacacagagctaaaccatatcaagagccaattagtaaatattacgctttgagtgtcatatggtctgttttgcaacaattcaactctgctgttatagtgtgaaaaccaccagggacgatacagaaatgaatgatgggtttccaatcaaagttgattatagcagacagtgagctggccatagtttgccaactcctgacctcaaacaatcccccctgccctttccttgaagaatccagttgtctcatagcatgtttcacatcctgggtttgtctggttgtttcttcatgattagtgtcagggtaagcatttttatcaagagatctacaaagatgttatacatttcccattgcatctgactgggaggctcatgtcagtggtcccagaatttgaccacttggtttagctgacgttcactaggtccctccattgtgaagacgcatttycatttttgtaattaacaagcaatctatgtggtagtttgagatcacataactatcttattgccccatagattctcatccaaggatcctgtagtcatccttactggacccattattgcattgggggatgaagagcaatgacttttcttttcttttgtgatggagtctctgtcacccaggctggaatgtagtggcaccatcttagctcactgcaaccactgcctcccaggttcaagcaattttcctgcttcagcctccctagtagctgggattacagggatgcaccaccacacctggctaattttttgtatttctagtagagacagggtttcaccatgttggccaggctggtcttgaactcctcacctcaggtgatccacctgcctcagcctcccaaagtgctgggattatgggcatgagccactgcacccggccaagaacaatgatttttctaaatcatgcagtttttgttagctggcattcttctatgaaaaaagcctggccagacacattggctcacacctgaaatctcagcactttgggaggccaaagygggcagatcacgagttcaggagatcaagaccatcctggctaacacagtgaaaccccatctctactaaaaatacaaaaaattagccaggcgtggtggcrggtgcctgtagtcccagctactcgggaggctgaggcgagagaatggtgtgaacccaggaggcggagcttgcagtgagctgagattgcaccactgcactccagcctgggcaacagagtgagactccgtctcaaaaaaaaagaaaaaaagctgcctccctctttattcctgtgtcttcaatatcactgtgaattcctttttgtttttattcaattggttgtaatccatcatttacattcttcaggtgacctcaatttggccaatgagggaccttcaagtttgttccatccccaagcttttagcatatatttgctttctggccaagacgttccaggctcatcatgtactgtctgtcttggaccaaggaacccagtgctccttagtggggagtggtattagagaccaacatctggatgtcaggtgtacttataccaactctggttattattagaaagagccaccaattttgaaggccaaattatatctattttatagtgtattttatggattatgggagaggctgagcattttttcatgttttgtggccatgtccgttacctttttgtgaattgcttactcaagtcctttgtggcatgtcaatctttctcttactaaagtgagttaatagattaaaacacttaraayagtgcctgacacacagtaaggttacatattgctaggggatattacttcgtatttatcctttgttaaaagtatccagagtgacttttaaactcagtgccctggacacgtgttgctcttctgcagtcacagtggtgtggggacctgtgcctgyatyccatgatgctgtctgccactgcccaaaatgtatgggtctacaagtcacacctcccttgtcattcactgggctctggttcagggtgatggcaaacgtgggatggcagccaagccatactgacagagatccatggcgtacagcctctgagcatagataatgggccccgaagccactgcggctcactattcctctcccaccctacaggaggtagattgggaagtggagctggccgtggtcattggaaagaaaggcaagcacatcaaggtgaggtggaaagggtgggctcccaggccagagtgcagcagaggccccagctcctgcctctcctagttctgacctcactcaccgacacatggtgccagctgtccctgacactaggaagcagtcagcctccttgctccctgacactgcctttcccttcacccacctttggctggctctggctactaacatgggataacagctttgagatcccttgccacaggtgttggtgtcacccgtgatctaacctcctgtatggccaaatcccctgcccccataggccacagatgccatggcccacgtggccggcttcactgtggctcatgacgtgagtgctcgtgactggcwaayragacgyaatgggaaacartggctgctgggaaaaaccttcgacaccttctgccctctgggccctgccttggtgaccaaggacagtgtagcaggtaggtccctggtccctgccccctkrtacctaccattgcacagatgaacagccctccagggaggagcatgggttcaggtacatgtggcacctgccctccctggctgccctttgactgctgactccatacagggaaagtcttttatcctcagccaccagttctcccatgggcttccttcccaagccccctagagggaacacaactgcagaggatgtgaaactgcatgcgtgaagtaaattacaaagaacactgagctgatgggtggatcgggcttcctgcggctgccaccatctgaaataatctaagttgagcatcatggagcatagctatcgcaaggcccaggcattttccacactacagatgaaagccagtgtgactcacccagccactgtggaaacaacagcattgaccacacacagtgaggggacagcgccaggttggaggcagtgtgccagagggcagagcrcagcctcttaacacacagccacccacaactgtggtggaggtggggggtgtccacatgggccagccatgccaggataccaaagacccyagtgcctcacagcacccacrcagagtcctcggcaaagttaaattgtgtttcagstgctctacttaagggtggtagaacactaagaccaacaccaacagttaaaagtgctggttagccaggatgttcttacagtaatccatcccctgccagcggctgatacacgaggcttctctgtccyggctagaaccaytgcctcactgctttatagattctgagtctttttttttttttttttggcatggtcttactgtgtcacccaggctrgagtgcagtggcccaatcccagctcactgaagcctcaacctcctgggttcaagcggtyctcccacctcagcctcctgagtagctgggactacaggcacgcaccaccacgcctgactaatgtttttattattttgcatagagacaagcactcactgtgttacccaggctggttttgaactcctgagcttaatcagttctcacctgttttgccctcccaaagtgctatgattacaggtgtgagccaccacgcttggccctgcccgggagtcatttttgtatctacaggtatcttcctatgctgtagacagatgccctttcttgaggcaaaaaccctagccatttttctcttctccttcagagtctggaacatcctctcaactcattcaagtgactactgcctggtgctcttggtggggatgcagggaggcctgagaaggccagtgtctatacagaaagttctaacatagtgcactgagtcaatgtgggcactttaaagccctttcacctgccaagtcacgaagcgcccctacagttgtgtttgtaaaacactggggggtttgagggggaaaagggataactccaaggttccatctttgcatttcagatccacacaacttaaagatctgctgccgagtgaatggggaagtsgtccagagcrgcaacaccaaccagatggtattcaagacagaggacctgatagcctgggtctcccagtgagtgacaagggctgtcctgccagccccgctccacctgccacacatgtggaggctgacctgagccctccacctttggctgtggccactcagccagcccctggtctcactgggtccttttgctttgctccaggtttgttaccttttacccaggggatgtcatcctaactgggacccccccaggtgtcggtgtattcaggaaacctcctgtctttctcaaggtaggttagcgaaaagcaaagagagcaagggccccaaaggcctggcaggcttggctcagacttgagaagtacaggcttgtgtatgtgtctgacggaagggctgacaccgtcatggcctgctctgttgcagaagggggatgaagtccagtgtgagattgaagaactaggtgtcatcatcaacaaggtggtgtgatggctcctgcacaggcccgacataggatgagggcatctgctcccactcagcctagcccagggaaaggcccagtgrcaggtgtggrcaggtgccagccctgcaagccgcctcttctcggtagaagggagaaggacagagctctcttcaataaatgcgtcgggtcaaagcagcagcttggcttgtgctgtttgtcttcttttgggctttgtttcatggaacaagttggggcattttgtgggactggggaagaagagagcaaatacacacacatacrccaaaaagatgctgctgggctggggaaaagacaactcgtctcgtccccttgtttatcacatcaaagragggaaaaagcaagagatggcaagggacaatcaagcctcaatgattatatttatagagcagctaagggtttgcagcctcctctccatcttctggctctaggacacagctgtgttctggggctgagaagtctcagcacaggctcctcctcacagttctagctacaaatgaactgccggatgaactgttctagtttttcctgattgtccwggctggcaaaagtaggggayaggtggagcctggggcctgcagggctcggcgtctgctgcagaacctgggccatggaagatgcgccatgagtgcgctcaccacagggactgtgtctgcatggcycaggggccaggcctgtcccccagaaacctgccttgagacctctggccccttagacctcagtgtttgcatgcaaatgctgccgcaaagcagccccacctagaaagatgagccagtgatttgggagaccaagaggcaggaaaccatcccaccttctccaacccatcaccacatctgttgctggaagacaccaagtaaatcccagggtcttaatgaggcaccatcaggccagccctgtggagtgatggggacatagctgggtttccctgagccactctattggggtgggagcagggggacagaagatggtgacactggctcctctcacccctaggtctctgaaggtccagatagcactgatggcaagctttgggtccgcacactctggaaagaagagagaagtgaaggctctaggtagggaggacagggagccactgggcacaggcttctctcctcttgtttaaagaagccccgggagggatagaactcagactggacagaagactgtctgtactctgcagcccaccttcctagacttgggttgtcactgtctggcagggggcagcagccaccagcaaacaccactgcctgcaggagcctgggctgactggttgagactcaccgaagatcccttcttcctgggcggtggcctgcaggaactggaacagctggtctgtgtagcccgactctgcagaagagagaagacctagacctggcacccagcacagacacagcctgcctcgaggactgcaagggaacaagggcctcaccagtatcgggcagctggccctggcggaggaaggcggcagcctgtgcaaaggccttgagcagcgggctgagcaggcagcagaggaaaagaaagaaatctgggcagtgtgactgctggctgagctggaggggacaggccggggtgagtgcagctccccaccgcctccctaccacctccctccaggggcagctttttgaaacacaccctggagtactggccctcggtctctttgaagtcatcactgtcactatcagtaaaatccccactcggtttccacagcagctttctgctcagtcgccgttgccctgtgtcacaggctggccggacccggagccattgttctctgacaagctggccagggatcaaccctacacccccagaccaggtacatgcaggtgaaaccagtaaaagcagacctagagacccaagaggatggccagagccatgccccagcacctgctgggccaacttgcagagtgagaggaagtgaattcccaccctcaagggcagtagccctgtggccaagaaatgtggggagcaggaggtgtgcagagaacctcagaggcacacatgtccagtgctatccagagagcacacacagaaccggggcataggtggccatatcccaaggcacagggagcagaggtgcgagctaggcttccccgctgcaaggccaggggctgcccacccccacagcacacacagggcagaggaggagcctggggcagctggcactcagggtgggaggctggaggaggccaggctccaggcaaggatcttgtctccaactgccctgcctacctcctcagcaaccaggagcccgcattggatgagcctgtccagcacctcctgacagtagcagtaggaagactggcagggctgggagaaaaaggcacccatgtggcctcaggagagccaggcacatgggcaggggcctagccaaagaccgggcaaggccagacctaccacccaggaggtttcagaggtagagcatgggcagggatgggccattcctaccaccaagaggggaaggcctaggaccaagtgggccgtaggggaggcctgacctttagcagcagcaggtcttgcggcagcaggtgcatcagcagcaggatctggcggtacagctcattctggctcagcagcaatatgccctgcagctcccagggcccctggggcggcactctgcctgccagcagcccccgcactgcacaggctgggggcggagggtccattatgaggaaggagccgttcccttcaccactgcacacacatcccacctcggcctccagaagtgctgggatcacaggcatgaggcaccgcgcccagcccccaaagcttcttaagctgataagcaacttcagcaaagtctcaagttacaaaattaatgtgcaaaaattgttatagcatttctatacaccaacaacaatcgagctgagagccagatcatgagtgagctcccactcacaattgctacaagaagaataaggtacctggcaattcaggtaacaagggaagtgaaggacctttacaaagagaacaacaaaccactgctcaaagaaatcagagaggatacaaatggaaaaacattccatgctcatgtatagggagaatcaatattatgaaaatggccatactgcccaaagtaatttattgatccaatgctattcccattaaactaccatggaagttcttcacagaaatagaaaaaaaaatattttaaaattcatgtggaacccaaagagagcctgaagagccaaggcaattctcagcaaaaagaaaaatctggaggcatcatgctcttcaacttcaaactatactacaggtctacagtaaccaaagcagcatggcactggtgcaagaaaagacacatagaccaatggaacagaatagagaacccagaaataagactacacccccacagcaatccgatatttgacaaacctgacaaaaacaagcaatggagaaaggattctctaataaatggtgctgggaaagctggctagccatatgtgcaaattgaaactggactccagcctcacacctaataaaaaaatcagctgaagatgaattaaagacttaaatgtaaaaccccaaactataaaaatcctagaagaaagcctaggcaataccattcggaacatagacatgggcaaagatttcatgacaaagatgccaaaagcaatcgcaacaaaagccaaaattgacaaatgggatctaattaaactaaagagtttccacacagcaaaagaaactaacagcagagtaaacagacaacctaaagaatgagagaaaagttttgcaaactatgcatctaacaaaggtctaatatctagcatctgtaagaaacttggctgggcatggtggctcacacctgtaatcacagcactgtgggaggccaaggcaggaggatcacctgaggtcagaagttcaagaccagcctggccaacatgatgaaaccacatctctagtcaaaatataaacattagctgggcgtggtggtgcatgcctgtactcccagctactcgggaggctgaggcagaagaattgcttgaacccaggaggtggaggttgccgtgagccgagattgcaccacagcactccagcctgggcaaaagagtgagactccgtctcaaaaaaaaaaagaaaagaaaagaaaaaataaaataaaaaagaaatttaaacaaattcaaaacaaccccactaaaaagtgggcaaaggacatgaaaagacacttttcaaaagaagacatacatgcagccaacaatcatatgaaaaaaagctcaacatcactgatcagtagagaaatgcaaattaaaaaccacagtgagatactatctcacaccagtcagaatggtgattattaaaaagtccaaaaataacaggtgctggcaaggttatggagaaaaaggagcacttttatactgttgatgggaatataaattagttcaaccattgtggaaaacagtgtgatgattcctcaaagacctagagaaataaataacattcacccaagcaatcttattactgggtatataaccaaaggaatgtaaatcattctattataaagacacatgcatgcatgcgtccattgcagcactattcacaatagcacagatgtggaatcaatctaaatgcccatcaatgatagactggataaagaaaatgtggtatatatacaccacgaaatactatgcagttataaaaagtaagaataagatcacgacctttgcagggacatggatggagctggaggccattatccttagcaaactaatgcaggaacagaaatccaaatattataccacatgttcttacttataagtgggagctaaatgatgagaacatatggacgcaaagaaaggaacaatgcacactggggcctaccagaggatggagggtgaggagggagagcatcaggaaaaataactaatggatactaggtttaatacctgggtgatgaaataatatgtacaacaaactcctatgacacatgtttacctatgtaacaaacctgcacatcctgcacatgtacccctgaatttaaaataaaagtttaaaaaaaagtatttcaagataaatgtgttcttattgaataaacaataattttgtgaaaaaaagaggctgaattgaaggtggcagaagagctcccaaataacagtcacctaaacaagttagtatacttcttgctcacacaaaatttgatagaggcttggccatccgggtttggtgtggcagctgtgcctcatgagccactgggactccacactcccccagctttacttagggcatgtctcatttactaatagtcacatagagctgctggagctccaggaaatataagtgcatccaagctgcagtaatgaaagaggagtagaaaggacaaaagataccctcctgtaaggaaagaccctggaagtcacaggcaaataatcgtgccttcatctcactttcccaaatttagttccatggtcgcaatgacctccaagggaggctaagaaacgtagtgtttacgtaaatgataatgttctcagctgactgtgtggcgttctaagggaaaatgggatttaataaatattaaatatttattatttaatattcaataaatattaaaaagaaactaggatcctttgacacacataatactccttctacaacagtaataatacctttttaaggtactcttatattacctagaaaaaacttgggaaatgcagactctgaacacaatatgaagaggtaattcaaagtagaggaaactttaatgggttagaaatatgtgaacagcaactcagaaatattagtgacctaataagtgacacaaaataacactttatatttgtttattaactttagaaatttggattacgccaaacattagtgacaatgtgaggatatgggcatgttcatgttttacttcaaggatgcagactcctttggagattattttcttagtacttagggaaaattattatgtgtatactttacgtcctgaccatcacatcctgggtatattcccctgagaagcagccacagaagtctatcagaggacattttcaaagatcttatttgcaacagtttattctacttctaattgtactgaatttagatgccctttacttggagatttcatgcataagacatggaacagctattataaataaattcatgatgtaatacgcatatacgaactatatattccacatgaaatatatatttgtgtacatatgtgcacaatacatactcacaaaacactactggtaggcttaaaatgatgtgcaaatacactaagcatattctaagaagcagatggctatctagacataaataacttacgtatatttaaaagatacgcacatggccgggtgcagcggctcacacttgtaatctcagcacttcgggaggccgaggagggtgtaccacttgagtccaggagtgtaatatgagcctcggcagcatggtgaaaccccgtctctactaaaaatagaaaaattagccaggtgtagtaggaccctccagatccaaatgaaaccaaccagaacagacttacccaggaccatgtagctgtcaccatctgaggccacttacctagcccccaaaaggccctaatggccctcagtgccattccaccctgacctggttctctctctgccccctaccatctgatgccatccacacttgtactgccctggcacatcctgagggttcagacctagccgtttttcctctccaccttggatgttcaaaagaagagtacctgtcctaattgaaaagtttggctaaagtagacagctttcacattagagggtgatgggccttggaccagctct

SEQ ID NO: 94524 - DNA, 42479 bp, Homo sapiens
  misc_feature (1)...(42479): n = A,T,C or G
atgaaaacacaaaacaaattacatggtttgatgaaataaaccaatattcttgcagttttaaaaagaggtattaatgtaaatccatatcccaaatatgttttggtagtctagggagcacaacatacattcttcacccaagattcatcctaactggctcttcagtgaaacaaggaagtgaaatctgtcatagaattttaaataagacaagtttgggagcaacctctccattgcttgaaagattcacttttgatctgtataagtattcttatatttactattttaaaaagggcagttcattgggtataacaacatatgtaatatataattactgtttcttaattcattcaacatctagaatataaattcagttaatttattttattctctaagaaartgatctctctctgatgaacattcttatttaattttatcctgagtgatagaaaatattttatcaacagtgatgcatcatcctatttgctttccaaaggggattcagatgttagaatttatttttatggaacactgaaaataagaaaggtcccattgttaaattaataaaactagggccttataaaattgaagtctggatattttgaataaagaactgatttcaactataaaataagatgtgaagagaaataggcacttctgagaacggggaatattttactgtgttcctttctaaattggggctaggcagatcttgacatacacttttctatatgacctgaaagagtgatggagaagtaaagatgatgtatgtgacaacccttggtggactgcaaaactgtagatatgtaagctattaaaattccaatgatgataaactatggctaaaaaaaatgccaagtcaaatggaataaactgtagtaatacattgtgttggcccttgtagtcgacaaatgcttgcttgggtaattgtaaaactcttctgctttattttggctccatttgtatgctctcttacttccactcatcttcccagctcttcccacatcccaccctcacccctagattaccataaacgtgcttattctctatcagtttaatatgggataaattaacctataataagcagtaaatgacttttaagaggtctctatatcactttttccaggcatgatcatactttttagatacgtaccaaacctgtatttgaccaaatgctgaatgactaaacataaaatccttttttgtacgtatgaagcaaaaattgtcatcacagtttgaacttctggaatagaagaataaatctcaagaattatcagaattttatcattttaatttttaattaaaatattttagttgatacatttgaaacatttgacattatagggtaaacacaatactttctcagcactgtcagctaaggcttctatactcttgggatcttcaaacattttccttgtattccttaaaagaattttattaaacatgtaatatcttacatacacttgacatctaaagtgtctacactaaaataagtgtagtataatactgatgtttaaaaaataaaatgtaataccactttttaaatgtatccgatgaaatgtagacactgcagtgattttttttggccaccaccgttcctgtaaaacacacatgaacacttttttcaccagcaggaaattttatatcactcttgtttctttttggtcttatattttcattctacttcctcaggtaattttatcctggagttgcatacttcaatatattttattgatcgccctattatatgtttctgcaactaaagatcatcaaagattattataaaaatattcttgagcctgtaaagttctaattagtaataaatgttttctaggttgcattatcattaaaattattatcaatatactatttataaaattatatatctgctataatcttaatagatattaaaaatgagaacattttgttcaaaaataattttttagtgaaataaatcatgtattccagctggctccctaagattgtgtattcttggatgaatattgcttattgctggattaaaacaagtttcatctattctctatttgttctaccctgctctatttcaattctagaatattgctattctgttttctattgtatagatgtaagcactaaggaaacctgttcacataaagagagaaatagaaataggggacgttctattataacaatgttatctaattatttaggcttccatgttaaaagccaaaggtcacattataaccattaaaaattacttttaattatctatcagctgataagtcctctgtaattttattgaaagcaaagtgctaaaccaggtcaattgcaacaggatttggaaatcagccattatgatcattcttattctcggttcctagaaagtattcaataaaggcttaaaaggacttataaacggccaccaatcattactttcttacttaaaaacacaacttttaccaaatatactcagaaagtttggaaattttgaaatatcatttattttaatatactttgtcaatataaagcctcataaaaggcttttatctgatcagaaccataacctgcacatttagctcatttcatttaaaggaagtctccaccagtaacctgatttgcaaagccagtccttattgtcaaaataaccagtcaaactggacttatttctaacagaaaaaaatgttgcattatttttaatttcaataaactcactaatatatattcccgggatgactctcccactttgcaattctaagatgaagagttgtgctgaatatttgttacctagatgaagtaagacaaccctactttggtatttctttccatgctttctgctttattcttatggaactctcagggggaatacaacattgacaagagttggaaaagggaagaggggaattttaaatgtgaattgtaatcatttctgtcacctctacaatatgtatgagtactgaaaatttcagaacaggccaaaagaatcaatttctaacatcatgtttttcttataccagaaattgttttaagacagatgggtatatgatacctacaatgggcttatgatgccttgattaagagagtttgtgcaaaagagaatttgtgcaaatattaatattttgatttatctttttgtaagagacaagcaaggcgtttttcactccaagatacatctaaaatacatattataactgaaagagaaaatgtatattaaaatcaactcataagttatgccttgattatattacagcaagatgacagtggttttataacattgcttacaacaatcgtaagattattgatcattcayaatttcaaggatcccagaaatgacactgacataaactgagggcaaagctgactgtaactaaaagattttagccaaatgtcaaagtcaaagataaatgtcatagcgccctaacaaatagtatgtgtttatcaaaagcgataaacctggagatgtcatcacaacaacaaaaactttcatgaaaaagacaagacaaaggtaagttacgactgtaattgtagcattaaatatagggactagaagagaagagatatatgtgaaaaaagttgactttgtaattgagaatagttttgatacattaattgtataacagatttttcaaatgatccaaaataaagctacttttcaaaggaactctacaaaagacattattacctttggacatatttctaaaccaactttattttcaaagagaaatgtgtttacgaagcattgagcaactttgggtgggttgagaccgaaagtatccttgccacttgagtatacattgggggaggcagagctggaatcattggcatatgtggaatgaaattaatgcatgtattagcacataagggatgtgaatagcaatacttttcayaaacaaaaaaagcaggattattggttgtaaaatttatctaccatgttaatatgctgaataatcctgtacgttttctatccttgtgaatacttgggctggcagagaacaggctggaaaaatcaggagattacagactacgtttccatccttcaagtatttccctgcatggatactgagacgtagaacaaatgataaaaagaacatgatgaatgtgctttttgtcttattagaaagactcacacttaatatgacactatattaatattcagagatcaggccagtgggcttgtcaactgagctgtaattccaccagcctgctttagtcaatactgcaatggcgcttccttctatacatattattagaaactgccctagtggaaaataatcttctaccagcccagtcttgctttttatattagaattaaaatttttattcattaaaaacattattaggagagtgaaaggaaaagtcacagaaaagaaaaagatattttctgtatatataattgacaagtgcttatacccagaatatattgaagacttccagaaataaattagaaaaagacctagcaccttacacaaaacatccaaatagctaataaatatatgaaaaggtacttggtctccagagaaatgcaaattaataccacaatgaaatctctacatatcctccaaaatggttaaagttaagattcataatgccaagttttagtgaggatgtggagcaaccgaatctctcatccaattgtgaaaatgaatcatcattatctactagaattcatcatccacagagcctctgtcccagcaatttttaccgctacataaatacccaggagagtgacagcaaatgtgcaaaaagtcacgtataagaacatttgcggttgcattatttgtaatagctctaaattgaaaacaactcaaatgtcccacaacaggatatgtaaattgtggcatattcatacaattaaaactttatagtgtttttcaatgaaatagaataatgttaactgcatcagtgtcaatgaatcccatgaatatagaactgagcaaaagattccacatacacacacacaaacacgtatacacaaacacattacaaatcatataattctatttacagaaacactggtgtgttcattctaagtcatccagactagtcttctttcttgctcttagtgaatcaccaatggaagttttgctcaggagaatgaaatgtcccatacttgtacatgcaaacactgggatccccagttaccacaaccccaacctgatgggtctcctaccttcacctcctcagccatactaaactccttgcttttctttggcagttgagaatctttctacttgacttgaagccttcacaccttttattatcttctgttgtattgttcttctgtatatgttctgatagctaacttccttactgccttaaacctttgctcatctatcagcttctcaatgaggtctaccctgatcacagcatttaaaactgcaaagtctaaccccaatcttatgatactcttgatctcccttgctgtgcctttttaaaaataacatttgtcattttatgacatgttataaaatgaacttacttatatttcttgtttattgcctgtctctcctctctggaatataaggcagagatgtcttgtttttcactgtttcttattattcagaagtatatccactaataacaagcattcaataattatttgttgaataaataaatgaaaagaattatgtgcccatgagaaacaacacttgctttttctttcttaaaagtatataaaaagatgaatggataaattgaattgtatgcatatatttaatatagaatgaagcaataatatttcaaggagaatgacttaagaataacttcagatgatgtgaagtcagtctttgtacaagcaatcacataacagagtcaattatatagttttatcagcagatcacagggccttctttctcttttgttagtgacatagatgaatacacacacacacacacacacacacacacacacatatattctgtataatcattaaaaatgtcacttaatgtaagaaagaatgcggttctcatttacattcttctagtttattattatttcttgagaaaatattgctgggttcattataaaatagattctggctgttgcgtgttagcgcgcgtcccggagtgcgcatgcgcaacggcgggggttgttccggcagcctttcactgaggccacccgccagtttcaaattcagtggcgtttgccctgattcccggggcctggctttcagcgtagcaattctgccggcgaagaaggtgagcgcagtgctgtgtggcagcagaggtccttaggacgaggagcagcgggacgaggaagggcagactggtgaaatcgcaaactgggcgtctgttccggcgccggacccctgtttgcaaaggtgggtggcccgtccggagcggaaaaacattccggaagtggagggcygggccagcgtgattgacaagcgggaacccctgtgtggggacggggcmggcctaggaaggttgtgcctgcggtggaacggsgcggtgcgcaggagtsggcattaacagcagccgcgtgtctgggtcttagatttggcctagctgtgttgagcttttcatggattatgttacgtagataagacactgcaacagtgagtgagcgcttgtaacccacctgtctcttacagaaactgagccccagcgatactaactttagcaaggatacagctgggatcctaaacttggcgatcagagcccagagccgataaagttagctgcgtgagtctagcttcccccrgggcgggaatcgaggcggagcagggtacagtacggaggccagggatgagtgcagttgaccagattgttgacggaagtgtcataaaagtggacttaaatgttgataagcagctggttgggttccacacaggktgcgagctcaggatgcacgttggaggggacacagggycagagcaaggtgggaatgcgggtattatgggccaggccatcctccagctggtggagcaccgcagcactgcagtrtgtggccctggcttaacagcagtgcggaaaagcttttctcttggggctgtggtgctttccaggtgtgtgaagttaaaacattttagggccatacggtaggtagyacctgccacatagttgtcttggtcagccccggctgccrtgacaaaataccataaactgggtggcttagacacagaaatgtgttttctcacagtcccagaggcttgggatgtccaggatcaatgtggggaggacacaactgagcccacaacaatagtctgtactcggtaatgagtgataattggggactgaagaaaatgaacacgttaagaactaatatgttcctgaagtgctttcacaactctaacctcgttttatgagcgtgagctttgctgtcctggtgtgtgccttggcactgggaggtgatggttgtcctccacacagccaacctgaagagggctgaacaagtcgctgcaaatgtttttaatagggcttagtgaatccgttatactcagatttatctaaacctctatgatttagcctgtgctgcttctggaataatgagatccataattaccactgatggggaagtgaaataatacttaacgtttcttctgtattgtttagtgttgtcattctagagtttggtcaccaaatctgtcttttttatcccacttaccctggtgggaggaaaagtgaggagatagaaagtttcaggtggcttgggggtctggcagatgtggttcaaatcctgagttcaagcacttgctgagtgaccttgggcaagtcatataagtttactgagtctcagtttctttctctataaaatagagcttataaaaataccacacagggtttttgtggggttatctgaaaacggtttgaaaccattaaagaactggccatttaactaataggtattcaagtcatgggacctccgttacccagcctcggaagagaaacctttacttacagccccgatgtctggctggctcctcattcattcatcagatttttgttgaatgcctatgaggtgttgaagcacctagttctgagtcctggagccagagaagagcaagacagacaaggttcctctatttatggaatgtatattccagtgaggaagaataaataggttcagatggtgctaagagctatgaataaattaaatacagagtaatgtgatttttwaaaagtgacttagagcaagctagggggtgaggagtgggggtggtgtttgaccactgtccagcggccagacagccggagaggcttctctgaggaggtgagccaaagcctggatattgaggaggactccttctccaggccaaggggagcagcaagtgcaaggcccgagctgagtagatgaggctgggagccagaccagtctcaggctgaccagtgctctgtcttgagaggagctgctggtcagctttttgtcttgggattcagaacgaggagacatgaagactttttacttggcagtgggagctgaagctgaaaggtccaggggctgatgaggccacgtgtaagcgaaagtttgggataagcagaaaccgagtgcgctgagggagtgagattgtggctgtatccggcrcctggctgagcaggagagtgaaccccgtgggtgtgtgtttgctggtgacgttcctggagctgtcttgaagtccgagctgccttgcagctctagtctgcttctgtttttggctttcccagatagtttcaattcttactctcagtttgtgaacctcccttcagtgaacctcccttyacttatgctggatatctcttgcgactggatgagcttcactaaagcacagtcatttggayctggattcgaatccctggttttccactttttagctgtgagtttgagcaattatttaatttctgtaagcatcagtatccagtagctgtatccttatagtgttgtacagattaaatgagataataaaagcaaaagaccactgtagagtgtttaacacataggaggtactcaaaaatttgttaggtacctttcctcccctttccttcatgtgttaaagctttttcagtacatacccctctctcaggattgaattgtaagtcatattttttaattacccttcttgtaataattcctctacctctgtagtcatgtttttcttttttcattttgtcttgtccccagaatgtctaacaaaacagccaaatatacctctgtraagacagagggtaaaataatgctagttctgtgagttctcttcttgtgcaaatccataaactgccaccaatctgtagtcattttaattgcycctaaaccgaagagcatcrtggcaactacctttcccctcgtagagtgacactatcactagtcttaytgaggccaaagttataaagatgggctctcgatctactaatattagtaaaatgggtttgggacttactaacatttgtgcttagaagagacagacctggcaaagagcttggagaagtgagttccaaagagagaggtgtgggaaccaggatggaagagtcaggcctccagatagcgtttacttctcctttcttccttgaatcactgtctcasagataattaggttcagragaggaggaaaaaaaagatgacgtcaacatggagcagagtttttcttagaccttagcctagcaaggaaagagaaatgcctggtctcagtgctgggaagctgttycagccagagccccgtggctgtgaagagagctctcctgtctggagccaaacagaaagctcataggtcttgaggccagaaaagttagtaggtggcggctctggtcggtgctggaaatggaggccaggatgaactaagaagcaaactaaagatacttgtaakataaggacgtgtaggctgggtgcggtggctcacgcctgtaatcccagcacttcgggaggccaaggcgggcggatcacgaggtcaggagatcgagaccatcctggctaacacggtgaaaccccgtctctaccaaaaaaaaaaaaaaaaaaaaattagccggccgtggtggcgggcgcctgtagtcccagctactygggaggctgaggcaggagaatggtgtgaacccgggaggcgagcttgcagtgagccgagatcgcgccactgcactccagcctgggtgacagagtgagactctgtctgggaaaaaaaaaaaaaaaaagataaggacgtgtatgttaacttgcgctatccaaacaagctgtgcttatggtcctctgcctgtgcgtcatgattttccaggacttcacaacgggataaagtgaagtagcttcggcttgtgaatgtgcattgcagagacgtgggagaagaaagctgcaaaagtcattatragcaacacccttgatcttaggggtgctggtctktgagaagagagctctaagccttttgtagaggyattagaaaggtatcggmgccacggtgaaatgcaggggagattgggtttaggggctttcctggtctgcattctgctacagccgttaaatgccgctagatggagtgcgtgattctggtatggcctcaygtggacctgcgaaggatggagagaacatggtctctgcttcccagaawaaaaggagaaatttggtaayaagtgtggagactgctcttaaataatgctccagatttcaagccacttcttcctggaccatgagagagctccctaatgttgtatttatttttcctaggtccatggctaatgaaacacagaaggttggtgccatccattttccttttcccttcacaccctattccatccaggaagacttcatggcagagctgtaccgggttttggaggctggcaagattgggatatttgagagtccaactggcactgtgagtatgaacagtgagagatactgaaaaggacaacttwacggcagctgtgctagcttttcctgtttgcccatccagagattttcatagtatgaagttgggcagaatagttgctctcagtttatctttctgagtaatagtcacttcctctattaaagtcttttttttttttttttttttttgagacggagtctcgctgtgtcgcccaggccggagtgcagtgggacgatctcggctcactgcaagctccgcctcccgggttcacgtcattctcctgcctcagcctcctgagttgctgggactacaggtgcccgccgccacgcccggctaattttttgtagttttaatagagacagggtttcaccgtgttagccaggatgatctcagtctcctgacctcgtgatccgcccatttcggcctcccaaagtgctaggattacaggcatgagccaccgtgccggcctaaagtcttaaacatagctctgtggtctgagaaaaattaggctgaagtcattggtgcctacctattacggtagatgagatggctttcttaccaactcttttccctccggttccccatccttcaaatataattctaagttttagtctctgctgagtgaaccagtgcgttatgattatgttttgaacataattttgtcttgaacaatatgtcttaatattctgttttytctagttaataattgcccttttaaagttagtttagtttttaatatacctatgccagttcctcccacatcatccagtggcctctcaatatgattttccgtacagataactcctgtcttagtcggccaggactgccatagtaaaataccatagactgggtgacttaacaggaatttattttctcaccattctggaggctggaaagttgaagatccagattctggcagggttctggttctggggagggggtctcttcctggcttgcagatggctgcgttcttactgtggagcaagaaaagasgaggaggagaaaaacaaatctttggtgtctctttctcttttatgaggacaagggctgctcccttatggctgctcckttatgacctcctttacccttgaaggccagatctgtagtacagtcacatggcagggttaggatttcaacatatgtttgtttgttaagatgggcagtctcactrtgtggcccaggctggtctcaaactcaagcgatcytcccctctcagcctcccaagtacctggtggctggcaagatccaagattactggtgcacaccaccatacacagcttcttttgtttkgtttttgttctttaaaaacttttttttaacatgcattttggtggggatacaattcagtccacagcagtgaccaattccatttttaccttggagccctcctggaatcctccatcctttccgtgtcatttgaattagttgctcctcagactgacttgacagatttcagcatgagtgttartggggacagacggccgcacccacaccacgtcagggtataygtccgtttggaggctttcctcaaacgtctggcagccctggactgcctgtgtatgctgaagaasagggcacagaaaggctgagtctgcagggcaggctggctgtggctgccaggctgggctcctttgttgggggcctccagttgccagcacatctgtgggattttccctagagtcttcggtctctccagagcaggtgcctctgagctctggcccagcaggtacagacgctgaagcccaatagccggtcttccgggaggtggtctggggaaggggatccaggtggagagtccccctcagtgcctgctttcagcctgaccctcctctccctccctcttgcctcctcaatctgccagttgcctccagggytctcctagctcagcttccacttagagcccacttcctgtsttctgcaaggagcaggagcagggattgcaacctgggaatctaattgttcttaaacagaatttcaacccgtccctttgttttcagtggcctgctgtgttcctaccacttcctgagtctttctgagaatgagtgggggagatctctggggacacttgggcttgagtgtctctgcsgaatcacttccatgtctctgccttctttccctctctcctaaaacatattactccttccactttctttgtttttgtgggtgtaagcctccatattactttggttaattttagtgtgctttggaacacagatgagtgcatgttcattctgccttgtttaattttagagacagggtgtcgctctgttgcccagggccgagtgcagtgttaagatcatrgttcactgcagcctcgaccttctggcatcaagtgatcttcccacgtcagcctcctgagcagctgggactacaggtgtgcgccatcacacctarctaattttttaatttgtagaaatgagatctcactatgctgctcaggcyggtggtcttaracccctaggctcaagcaatcctccctccttggcctcccatagtgctgagatgacaggcgtgagccactgtacctgaccccttttaccttgtttagcctgacaacccatcttctscctctcaggtctttccatctcagtcttctgcactccaggcttctgcatcttcctcctatgctcagcctttaattgtcgatgtttctggttctatagcttcatcttcttgtgtgcactctctgtgaatgtaccctgtggctttattacctttgacattcttctgtcttctaaatcatctcctgaatagagtgttttctcctgtcctgggtgtcccccagcccataggagcagccatgctgtgggacaccctgagtggggtctgtgttacctgttgtgcctaccatgcccttccccgccttggatgcacaggtgccccaccttagctgcccgagatgctgtttatccttgatagtcaccttttaagccttmtacaggtctatcaagttgagtcaccattaccacttggtgtgtgctgtgccttgtgtaayactgcagttccgggagtcntccaacctggaatgcatgctttgcggggatctatgatgccctcgaattgtatgttacatgtgaacytgtgagcattttctaggggctctgcacctttgtgtyctcagctctgagccccatgcttgctgcaaccagcaggtgttcagagtgaatgaatttgcttatcttggcataaatcatgtaactgttgatgataccccaggaaggtgagcctttggttataaatccttttaacattttccagtctaaaagttttgtggtcttattacasgatgtagaaaacagkgggcctcagttattcttttgctgttgtgccggartataccacggttgtttttgaaagataactttgaccatacccttaggaacttcctcagctcactttcaaatggagggcactggctttctaaccattgtgtctcccagcccagtgacagctgaagctgwctgcttccgatrtcacagrcagcacagaagagccgccctccaggtgctgctgggaaatgctgcctggaacyctttgccatttactttctatcaaaagctgagggaaatggtacatatggggctttcctaaaaatatgggatccatccatttgtcagcaatgtcattctatcctatcccagggcctttcaagattttggtgaaaactaatagatcccatattccagaataatgctattaataattttattattattacttaatgatagcaaaaagttagctaactccaaccgctcacttgttatttgccaggtaatcctctaatccagaggatttggccttttgtgtgtgttaatgtcctgcttgcaccagctctatgaggaaggtgctrctgttgtcatttccatttctgcactcgtggaaacaagcgtagtgaggccagcctgagccacagagctgcaggtaggggaggcagctggaaccctggcrcctggctgtggagtttgagrctctgactcctgcgccgcgctgctgccccaaccstagtcatacgaggtgtttcaccccgccctggatactctgagatcccctctgggttcagcaggctcagagagctgactgcctggagcagaaggcatggggtcctccagagactcccctgagctgagttcccctgtggacaccagggccgcctccttgtggcgctccctgaagggtcctctctggaagaactgtattggttccctggggctgctagaggaaagcttcacaaactggggcttaaacaacagaaactgacatcccacagcgctggaggctggagtccgagatcaaggtgtcagcatgcttggtcccttctgagggtcgygagggaaagatctcttcaggcccctttccttggcttataggggcgtgttctccttgggtatcatsacatcgcctgccttctgtgcatgtytgcatccacgtgtcccctttccaataaggatattagccctttaggctgggtcccgtcctagtagtctcatcttaactaattacatttgygacagtcctatttccagatmaggccacattctgagatgctgggggttaggatttcaacacaggaatttggaggaatacaaytcaatcaggcttatggacaattctggtcttaagtcaagagtagtsttctccagtctgtatgtggaggcgcacacctatggtcccagccacttgggaggctgaggccagagaattgtgtgagcccaggaggagttccataccagcctgggcaacatagcaagacctcctctcaaaaacagacaaaaaaagtggtgttccagagtgattagtttgctttaaaaaaaaaaaaacaaaaaaacaaaaaaaaaaaaacacaaaccgtaaacactggcactcgtgactgatcatcctgtatccacgcacgagctgcacgaaggccgcgcggtcactgtggctcccygttggcgagtacctgggatttcttgctcagcaktttggggccttaattcttttaggggactttttgtctaatgtctccccttcttctaattatgtgcgatatttacatagaatctgataaactgcttcaaatttgttttcagaacagtgagctggataattaaagaagctttttcctgcttcttgggcccagtttccatttcttycttttttctgtttttcctggctattctagtgctartttccttcctttcctttcctaggctggycttagagcatcctctcctatgtacagccagaccttctttcaagcttttattaaaatggggaaaggtcatttgggaggctttgttgttttcctgtttctaaagatcatttttcttcctgcaggggaagtccttaagtcttatttgtggggccctctcctggctccgtgactttgaacagaagaagcgtgaagaagaggcacgactccttgaaactggaactggccccttacatgatgagaaagatgaatccctgtgtctgtcttcctcctgcgaaggggctgcaggcaccccgaggcctgctggagaaccggcctgggttactcagtttgtgcagaagaaagaagagagggacctggtgaaccgactraaggtgagacctggggtatccggaagtgggagtrctggaggaaacagggcttcagcgattgttstggggcgattccgagactcaggcagtgcatgctcccctgccgttgctgtgcctctcagctcttccctcagctccttgggtcgatggtgctgccgctgtgctgtctcttttgagctggaggtcagcagggccttctccacacaaggaactgttggtgcccatttattactcacctgggaaaggacctgatcgttgccattggcagcatrgttcartggctgcaaatggatctgatggagagcgtgtggctttgggaggagygtgccgccttccacagtgagcagcgaggctgggacctgcagggatgaggtcccgggaggggatgcggcagcccttgagtgctggtnggrgaaggagagctgcccscagtgaggaggcgccgrgctgagtggcccagactccttaggagasgcctggttttgggcttcctggtgattttccttcatgtctgcctcctgtaggyggagcaggccaggaggaagcagcgagaagaacgcctgcagcagctgcagcacagggtgcagctcaagtatgcagccaagcgcctggtgagcctcatttcttggggggcaggattatgtccaggcagggtcgcyctgcttggaggctcatgggtgcgtggccagggycttggtctcccctccatgaccctcactggctatgtgctcccgtacagaagctgggctgtgagtggttgaggcgtggatcctaggagtcgacctctctccagccaggcagccaggcctatgtgaatgggcgtggtgtgctttgtctctggcaygtggggaggtgggtactggtgctgagacttcttcctccctccccacctccactgcccctgtccagaggcaggaagaagaagaaasagagaatctcctccgcctcagcagggagatgctagagacaggcccggaggctgagcggctggagcagctggagtctggggaggaggagctggtcctcgccgaatacgagagtgatgaggagaaaaaggtggcgagcgggtgagacagaggcggtagcactaccctgccccaggccaggggacacccttgaagacagctctttccctcatgccacagatgccatgaagcacctggcaagaggcatggtggcctctgccctctgctctaagccgggtccctcctagggtccatgagtgccagtggcagtgaggacagtcaccggcctggcctgtgtcctctcagctgtcctcacagcagctcaggcagggcaggaacatttgygtctgcaccttatacacaaggaggctgcagccccacaaggagagactccttggctgaggccacaagcctcggcagtggagagctgggctagaactcagcyggcctggctctasatctcaggctctgaggcagctgactgcactgggtaacctttgaggtgccaaccgtcaaggcgtccttagcctgagctttccttctcccataaagcctctgttggtccagactcaaggtttccacttgatgagccatgagctgctgggtgacttagccctgagcaggccacccaggccatttcgggcccacaggatccctggtgacagccccgttcccattcacactggaacctcaccaccatccctgagtgtctgctctgagtatggcactgtccagatgctgtggacrtagaagggaagaagacatggaggggacagttaatagacatgaaaacaaatagcacctatgtgaagtcagcatgtttgcctacaaggaaaacaaaatggtgatgtggatggggtggggggctgcacctgatgatgagtcccgtgtgtcctgtgacatcctggccaccacatctgtgggagggtaactgcaagaccagagaccctccgtggatattcctgaaggttcatccccggccttcacggtctgtctgcagggcgccttctgacgccacctccagccgccatccaccagacgccagcttccccgctgccctgaacttcctccagcgcaccaggccttcctctgtcctgtctgaggatttgctcatgcaacgtgctgtggccaaacaccctgccctcctcccttcgcagatgtcttcctctcctttaaggcctggctcaggtgtcgtcttggtggcttcgggtgtcagctgctctgttttgctcacgcacctgcttgtgcttctgttgttgcctcctctccctggctgggctcgagctgcttcagggcaggaaccacgtctttacagtttgatgttcccagagctgacccagtgtttggcatagrggtgtgctcaatamaatcgagttgacatgaatgagcagatgctgcctcgttgcagtctggtagtgtaattccaggctgcscatgtggacytcgacttctgsccctgcccagggcagagaccaccrtgytgctttatgcctcgctggtgagagggggtcataaacagtttgtgctccatgaaccsttcctgcccacctccraggtcrtgtttctgctccctctcttctcccttagagcccatggggacaaggcagagaacttgagtggagatgaaggtggtgaatattagaggaacaaagtgctccttcaggtctgggcaagagccgtggatcctgtaggtcagcttccggggcttcccatgccctcacgtttcaggagataacgtgagcctcrgaggacctgagttctgaatagaaaatttttgckcttcatttcttcacacacccagcctctcagtgagctcctgctggctttgtccagcatgcgacataagattgaatccaagccttttaagatagagccgcctgctctttagtgaccatgaagccaagcctgtaataattactcttctgatagcccaagacaattgtattctgctttgttagaaaggaatttcgaggtgaacaaaaatgttttctttttatgtgatgttgccataggtggcgtgtgcctgtcagatggttttgtgttttctgaggagcatagactagtagagctagctcagcttcaggccatgggatgcagggctggcttccctgccaacgcctggcgctgatggattcttcccgcattgctggraagggcagactgaggcgctgacamaagaagagttgyagctggtcataagtgacagcatcctctgttcactcgattggtcagttgtagcttcatccaggagatggtcatggggttcctgctgcataccaagctctaggtgaggccayggggactcagcagaaacaaggccgacctgggtcctcccttgtggacatgacagtctggggagatagaccgagaggaagcrattttgaatgagatgggtgtgaaggggccatgaatctgtgtcagagcagccagrcctaccagggaaggtcaaagaaggcttcctggaggaggtgatgtttctgctgctatctcagagttgactgggagctggtgaggggagacaacattccaggcacagaacatccgaaggccygagatgatgaagagcaaatatccsccctggggcctcagaggggtccagcttgctggagggagggcagagaggagagcagcctgccatgagtcccgaggcttccractcaagacttgggtttggggtgctgagctcatgtctcctttttacatttccctacccacagacctgagcggccangggaggttggggttggcatttgcctgggggagtttctgagcnagcagcacctgctaccttggtggaacccattgctgggaatggccagggctcagcaccagcgctcagcagatgctcagtgcgttttgctgagtttgctgagggaagactgttttctrttctctctcacacacacagagtggatgaggatgaggatgacctggaggaagaacacataactaaggtaacacgagtgtcctcagctggtgctgtgctgggggctntgggctgggctgtgnacccttggggaagaggctggagtcactcggctacttctcaccctcctctccacaaaggaggagcttccagcacttggactctgttgcttcttgcacgcaaccctggtcctgagttgctcccttggccagctgcagtggaccctggagtcctctcctggggtcagggcctggggagtcctctcctggggagacctttcctgggagcagggccatgcttgccaccccagggcatagaggaacagctgttctgggctgaagtctgggtgttttctgtccctgctgggtggtgctggatatgactcgtggaaggagctgcctgtggggcattcccttgaacttctggagctgtgggtgacttgggaatccctgggtccctcgatagatgcctgacatgggacattgctgtcctgcctcggctttgtgcattgggagccactccctttccctcagcctctcaggccctggcgtgccttgatgttagagaatgctgtgggatgttttggttccctctttgaagtgcctttctttctctctgctagatttattactgtagtcggacacactcccagctggcccagtttgtgcatgaggtgaagaagagcccctttggcaaggatgttcggctggtctccctcggctcccrgcaggtaaacagtagccagtatttccaccaggggccatcctgctcctttcsccacaactttgtcctgctcgtccaggcctgggagacgctgggtctgtgacaggctgaaccrtgtgaggagcagccccctccctgrcctggccggcccakcactggaaggcaaaggagaggtggcgggggcaggtccacgtgtgttggtaggatgtcatttagctggcaccatctctttgccyctttctttctcctttgytgcagaacctttgtgtaaatgaagacrtgagaagcctaggttctgtgcagcttatcaacraccgctgcgtggacatgcagagaagcaggcacggtagccaccrggaccrtggtgtagccgcaggtggtctggagagagtgaggcaggggtggcagtgactgaagaccattmagtgtctttcatagaaagaatggcagaggagaccccagttcctycctgagtcccctctccttgggaaaaagtgttcctactctctgggtgagcgtctggtccgaatcgttggcttggagatgattttacgggctctttctggagaacaraagtaaaacsttacagtgttccgatgagacacagtaggcagtacttgggagggtcttatagacccyaccctryggaagtgggtctcaacattacacaaccccctctygggcccgtggacagttgctgtcytctctgttttctctctttgtgcctgtgccmccctcagagaagaagaaaggagctgaggaggagaagccaaagaggaggmggcaggaraagcaggcagcctgccccttctacaaccacgagcagatgggccttctccgggatgaggccctggcagaggtgaaggacatggagcagctgctggcccttgggaaggaggccmgggcctgtccctattacrggagccgccttgccatccctgcagccmaggtgagggccctgcagggccagaaagccgctcttggctctcactgtrgtctaggccatgaggggsgtcctcatcacactgtagtttgggggatgccccccaccrtggtcaggttgatggcaccttaacccattctctcctgaggcgtgagttggaggaggcgcgtgggatcccttggggtctccaggcagcagggccagttggcattactggggatggtatttaggagccaggaaagccggtgcattcctagtgaaaccacagggagaggggggatgccaggagctgagaagagtgtgctgcatacatctatttacaaatggctttccaagtgatgctcccaacttccatgcctatgatgtgatggaggatgtcagtgatagaaccattcagttttccagtttttcctttttgtaatatcagtactcttaactggaaagctttccctaacttacacctacctgcagcacgtgagaatactgtcttctctgccwcaacttctcttgatttttaaacagaaggaagaactgctaatgtagcagatgaaaagtagtatctcactgttacttggtgggtgcagtttcactatttccttgctacttctttaacttgagtgactttggaaatgggatatcactagtggaaaattctgtataatccagaaaaaaatgtaaggttttaaaagattcagggaactaagtaaccgtttgcacagcagctaaatgctcaccagcatacctgctgagctgtgtgggcgctggcagagaaactgaggaaagctgccaggccccatggtgtcccaggccttccctccggtctgtttgcctttagagcaaaattagtgctataggcatttatacacaaataccataatatggcccaaaatctttacgatttttgaatttgtaaagtactttgaccatattttgcttttatgttaatagtattccagtgaaattccgtgcatggggacgctggagcccagaaaagttaagtgactcatattttctcaccaagcgtgggtgatggagccattcagttttccgayattttatttyttatatgagtattcctttaactggaaactttcctaacaacaaacacctaaagacctgcagagttgcttttatttttgttaccccagctccacgccttaaccctcactttgaaataggatgtrtcaaccctattttgcagatgaggaaagcaagggtcagagaggttagacaactcttccagagtcacacagctgggragtagcagctccaggagcagaagctggggccgcttcctggtgcaccgatggtcttcargtgttttgtggaaactcgggggcctccggggygaccttgaggacatggacaaggctaagcaggggttcccttcacccagccctgcccttggtttactcaggagtcagaccagccctagtttcctgtgtttcatgtattggcttttcatgtgaaactcgaggagagcttgtccgttgctacaagctgttttttgaaygtctctacacagtccaggcaggaartagaagcactcacatcaggagctcagtgtcaggcaggcaagcctcctgcaggggagcccygccctgctcaggtggcctcatctcccctcccagctggtggtgctgycctatcaratgctgctgcatgcgrccactcggcaggcygcvggcatccggctgcaggaccaggtggtgatcatcgacgaggcgcacaacctgatcgacaccaycacgrgcatgcacagmgtggaggtcagcggctcccaggtgcgtgggcctcccctccccrggccagggcctgccgtgaggtaaagggacttggatggttcctccagacaccygggccaagaattcctccggaggtggggcttgctacagggtgcacgagtcaaggyggtgacctcatcggaggctgaccatggctttccagtgcatcccagaactctggggaccccgctatgacagagtgcctcatttccctgcacctcacctgcccccatgctmctgagtccctccagccctggatgccagcagccagttctgcaagccagggagatggcatgtgtgaggcaraagtcccctcaggattggattttgtcattactgaagttgtctggaggggactgaattgaggaatgctcaagatcagygcaggctcctcctgctgccctatcatgcgccatgcatggcaccaggtgtctctggtcttcacgctgactctgccatgggkgtggtgttcctgttttacattggaaacktggagattcaragatggtcaagctctgtcctgaggtcatgcagctcatgagtgtggagctggggtgtgcccactggtttctgactgtgaaacccccacgacatcccaccrgctctactgacctgtgcctgggctgaattgaggctgggatgtgatggtgrccttgaaccatcactctttgtagactctaggtcttttcccaacccggtggaaactagcaggsagattccatacttgaggaattcagcctyttgctttttctctgacccacagtggacactggaggaaaccttcccttccttcccttttctcttagctcccacyagcctaagggctgtggaaaccmgtaccttttgtctgcacccagccccctctcctccctttggtggcttcctgtgtgtccagggcyagcrtcttctaggtgaatctaagatgtcagtaccttagccctcrgctgcttgctcagagcctggtttgtgttctttccccagctctgccaggcccattcccagctgctgcagtacatggagcgatacgggtgagatgtgactctctgaggtagtgggacagtcccttggtggccccctgcatgggcctctgagaggcagcactttggttcccacctctggcccgkgctgtggcggggtggagctgcatgccattcatgtcctaggcacatcatggtgtgtgctgcacacagacctggaaggctggggactgaccgctggctctgaggcctggggcygtggccagcctgctctctgggaaaggatttgtagcttgtgacccagtttgagaggcaccgggcagcaaggcttccactggggtgggcggggcgagtcgccatcaggrcaccaccacttaatgtccgttggcttcttctcaggaagcgtttgaaggccragaacctgatgtacctgaagcagatcctgtatttgctggagaaattcgtggctgtgctagggggtgagagcctcgccccccggctaacccccggcctgcaaaacccgccgggctgctttttccttggatgcccatcaggacgcctcagttctctgtgtttttaagaagggtcggccaggtgtggtggctcacgcctgtaatcccagcccttgggaggccgaggcaggtggttcacctgaggtcaggagttttgagaccagcctggtcaacatgatgaaatcccatctctactaaaaatacaaaaaaattagctgggagtgttgccgtggcctgtagtcccagctgctccagaagctgagacaagagaattgcttgctcaaacccgggaggcggaggttgcagtgagccgagattgtgccactgcagtccagtctgggcgacagagtgagagtcagtctcaaaaaaaaaaaaagaaccaaaaaaaaagaagggtcttggtcattgatttagaaaattcttgttctttgtagcttagttgagttgtctgacttgagctttttttagacccatgggttctttgcccatgttctgaggactttttatttcaggcgctgctctggggggatattaaggatacagcatcacatrgacacacggtgtttccgtgatgggcatagttctgtgggttgttcgaagcacttgcatatgcggttttgtgtgccctgtgagaacgcagtgctggtatttgaatccttgttgatagacgcataaactagagctcggagcaagggctgctcccagcacgggagcctgggatcttctgactccagctcccacgcctctttgcrtgaccctgtcacgtccccttcttttatgatggggcacccccttgctggaaggtgtctgtggaagtggaagctgcagaaagcctgtgggagctcctggcgggagctggtctcgtgttgctgctctgagccrccagctctgctttgcctcaggctcaccagtggcctgggtagctcctctgtgctccggtgccctgcataccttggtctggctgctgtgtcccggcctcctggagaaggggtgaaaaacatgaacttacagggctttgggttccacgtgcaagcacgtgagtcagacrtgggaggctcctggacccacctgccctctaagtgggtccgttgcatrctataaacagtgaaaagcaaaacaaagccgttcaaatacagatgctcttcttacttgatgtgcagtgtggagggagagaagatagggaagggttgggggkcctgagaaccaccattgtgacctatttccattctcttttttagggaacattaagcaaaatcccaatacacagagtctgtcacagacaggtaagagagttgccctcagagsgcccagagctgatctgagccacttccgagcttaaccctgggactgaaacctgaggcttagggtgaagctcccaaggcccttcatgtgtttgctctcagggacggagctgaagacyatcaacgactttctcttccagagccagatcgacaacatcaacctgttcaaggtagaggtttccaccttgccatgttccacatccaatttccttyctgtcaccacctgtgggtagagtactatgttaagactatagaaggaagaaaaagcaaaacagacgtgtaattacttaacccttaacgcaacacgcctgtgagacaaaagtcatcatcttttagagtgaaggccacagggatgagggatgggtgagaaagggacctttcttggtgccccatagaacakatagagactccaggtccttgctgtctcaccccatcttctggcacagtctccctcaggcttatggacaggaataggatgttgatttgttctgtgcaacccctgtcacgtcttcgcacttgggccttgggtgtggttgcagcctcagacctctgctcgctccaggtctgtgtacccagcgctccccagatgaaacacggccactgccgcctgaaccccaagctcgtaactcaaatcagcaacagtgactgcccctgggtacagggttctgcctctgttctaggcgccatgccacgtgctgtgctctgagctaggatatccttttgccccggcaaggaaagcaaacaggcccatggaggtgacttcaggagggtggcgagcacaggcttcccacaagtgagccaatagcaagtggcagagacagcgtccaaacctggctgcactgacttggggccccacattcttcccatcgtgcctgccttttttttcttaaaaccagcttttcccctgaattacacatttgggtcactgtcactgccaccatccctgccagacaggctggatccacgtcatccttgatgcctttctccccttgtctcccacatgcctgtgacagccgccaggcctgacagcctcagacagtcctgccgtccccgcgcttctcccacagctgggacatgggtgcaggcactccttctctcgccttccctttgccctccttgctttccttctcccctcttcttcccatgggtctcgggtctcatcacccaccattgagggaatcctcatcgaaggacgtcgctctttttagaaaccggtttaaagcctccaaactcctcatctctgcatcccaagctaagatgtggcaccaaaccacacacattggatgcaccgactgagtggcactgccccagcccctgagcaggtcccagccatcatctcctctgtggctttgctcatagaagttcctttgttttaactctctgtcacctggaaggaaagccaaggggacctagattttactgggcactcttagacttgggagagacatttggaaagagggtctcccccctgaggaggacactgcgttgtgggcaggggcagtagaggcgggggtggcctcggagaggrgatgacaaggttggtggcaaggaggctccaggtgcctcagaaggtagcactgcgttgtgctgcctgggtggtagaagtggtgttttttgttttgtgtttaagattacagcttgctcagtttgcacwcatgcctacagctgggcttggtttttgcaggtgcagcgatactgtgagaagagcatgatcagcagaaaggtaactgctcccatcttgtggtcctgaacaagacccagctgtgccccaaccccctgccgttgccatgctttcctcccctgccctcaggraactccagagtccccttcrtctccaccctccttggtgcagtgggccttgctggggtggtgggatgtgcgcttcaggtgtcttgagcctggcagagcctccgatccacccagcctctctctcatggctgttcctcgttccyctccactgctctctctcatcccacccagctctttggcttcactgaacggtacggagcagtgttctcatcccgggagcagcccaaactggctgggtttcagcaattcctgcagagcctgcagcccaggacgactgaaggtgaggcaggagggtgagcaggcagagccggctgcacgcatgggcaaggacttctgttcctcatgtgtggacctgacmagagggaggcctcctccccrttctgctctgtgcagcwcttgcagcccctgcagacgagagtcaggccagcgtcccgcaaccagcttccccrctratkcacatcsaaggcttcctggcagctctcactacggccaaccaggacggcagggtcatcctgagccgccaaggtaatcaggtggttcttggccaggttcagttcccaggaaggagccaagctgagcccgggagccgcagcatgaaaggattctttccttccatcctgggaactycctgggttaggaggaagcagtgcagtgggcactggcctgctgtgacctgggcaagcagtggaggtggacgggaggagatcgaggggctgggatggaggtcctctagggcaggggtcctagggaaacttgtattgtggggtaggtgggctttggtttgggtcatgattttgtcatctatgagccttgtgatttggactattttctttctcaacttcagtttcctcatatgaaaatggagaggataggccgggcgcggtggctcacgcctgtaatcccagcactttgggaggctgaggggggcggatcgtgaggtcaggagatcgagaaccatcctggctaacacagtgaaaccccgtctctactaaaaatacaaaaaattagcagggtgtggtggtgggtgcctgtagtcccagctactcgggaggctgaggcaggaaaattgcttgaacccaggaggcggaggttgcagggagccgagattgagccactgcactccagcctgggcaacagatcgagactccatctcaaaaaaaaaaaaaaaragagatggagaggacagtatggtccacctctgtgggctggttgtcctagagattaaatggtgtttaatttaaagagaaagcactagcacttgtgcctcagacctggactcacctgggggaccccctttgctgggacgayagaagtgtctgttgggcttgcactcacctcccaccgatctgtttttccaggcagcctcagtsagagcaccctgaagtttttgctcctgaatccagctgtgcactttscccaagtggtgaaggaatgccgggcagtggtcattgcsgggggkaccatgcagccggtaaggacacctttcccagcccctcgtgccccaggtgttgggatgagatggggrcttgggagagatgcrttatcagtcctgttctctcctggggccscaagccagaaagggtcagctcgagcaggcccagtggtgtccrctgggtgacactgctattctctcactgctgtgccttttaggctgcaggagcagtgcagactcctctgctgctccattctgtagccccaggatcacacttctcccagagaaagctgttctgtggtttcaaactcaaggaaaaaaatcatgattccacttttaaaaggttcattttgatgtatatgaatataatagtctttgtaggcataatttttacttatgtgcatagctattttaaaaacaaaagtgcggctccctccatgtgctgtcactggaacttgctcttttcactcagcagccagagggtcataaaccctgtctccttgtcagcaagcatgcacgtatttcagtatcccagctgtgctggattccagttacccagatatacagcatttcatgtacctccttctcttttgttaggtgtgcaagctatttgcagttttctgttttgagcatgactgtgatgaatataaccgcatttccgcacagtggtgactcctacctagcaaagggcctcctggacaaaaagctgctgggaatcctgaagcagtgcttcccagccccagatgccttagcttttgatttttatatttttgtatggatagattcatagttttattcattcggcatattaaaagttgtttacagtcattattgtttctgacgttcacatggtgaaagccccttcctgctagctcaggtcctccccgtggcccggtcagtctcgcctccagcacagcagaatgtcatgggatcaccatgggtgtccttgccgcacactggattgattcatttctccaagctgctctggtttcttgtaatggggaatgacatttagaagtcaagctgtgggtgctagggtgtttgtcgtgctcctggggcattttggtagacagatctaggaaatgttttcagagtgaatccatactggtatttctttctttctttctttytttttttttttttgagacacagtctcgctctgtctcccaggctggagcgcagtgacccgatcacggctctctgcaacctctgcctccggggttcaagcgattctcatgcctcaacctcctgagtagctgtgattacaggcatgtgccaccacacccagctaatttttgtattttagtagagatrgggttttaccatgttggccaggctggtcttgaattcagttgatccgccagccttggcatcccaaagagctgggattacaggcatgagccaccacgcctggcccatattggtgtttctaagtaaaaatcaaaggatttgtttacttgaccttttattgtacctctttttctcttaagcctgaacatgtgtgctacattaacwtacttatctgctctatcctataatatacttaaaagttttgaaatcatagtaccaatattacttctaacaatagatctgattgaaattgcctttcctctttgccyttagagtgtaacccactaaggatgcctggtcactaggctctaaagtcacgtggaaccaggcttctctccgtgtgcttctgttgtcagtttcatagatarctaggctgtttttgtttcattttcttttcaattttagaatttgctttyttcttttctgacttgtagtttttaaatatgtaaatatttgtatggctcaaaagtcaaagcaatataaaaagatctattcaggaaagcctcactctcatccctttccagcccattccccacccccatagggaatccgttttactagcttatcctttcagtctttctttttcccctaaataagcaaaaacgtgycttcwtttttccctttcctgttttatttacayrgaaggcatcttagtcagttgtctgrccatcgctcctctagtgggctgcgtggttctctgttggacagatgtaggragcttatccaaccagtaccctctggataggcaggcgcatgattacagggaaaggtccgggggcacatgctgtttggtatttgtgggctgtatcttctcactggactcctaaatatgggattcctgggttaaaaagtataaatatgtttaatttgttaactactgtgaaatttcatgagaattgtaccattctgtatcccaccagtactgtctaggaatgcctgtttctccagagtggttacttttggatttttgccagtctarcaggtgaaagcctggagattsttattcagtagtttgggctggggcctggccaygtgtatttttgaaaattttcgctggtgattttgctgcatggccagggttgataatgactgtgccagatttgctggatttcctttgctattcctgcacatagtttaaacgagactgccagcactgggtatcagtcaccatttttctttttgttagtttgccgtcagccttttctttgacctcttctttcagtttgtgtgtacttgctgtctcttaggccagacttctcgcttcctttctgctgggcctctgaggggtcatggggccatgacgccgtggccttggtctacaggtgtctgacttccggcagcagctgctggcctgtgctggggtggaagctgagcgcgtggtggagttttcctgtggtgagaagctgtgcccagggtggggcaggctagaggtcaggttctggcccccgttttctgtgggtaatacctcatacygtgaccaggcacagrggcggaggagaccccgggatgggagcctcacccttcgtgcgctcrcccaggctctcctgctttgctccctgctgcstgctgcccagtgtgactggcgatggtgggtgggtgagcgctgtcagtcgctgttcctgtgctggatgatggggcaggtaaatgccctctctgcagtgtcttacagcacacctgcatctccagttttcggcccctccctgatcttaccaggtcacgtgatccctccagacaacatctgcccctygtcatctgcagcgggatctccaaccagccgctggaattcacsttccagaaaagagacctgcctcagatggtcagtcccagccagctcgctgcaccacagcctggcctcaggcagcaaagggttttctggggcagggacgctctggcccaccctgagtgttttcaggtgttggggaaattgcacagggacacccacttagagccacacagaatgagcggcgtcgatctagatgcttatggaggaaggtctgagcttccccgcctctcacaccttaggctgcgaaatatgtattcataaaacctccaggcatcttctgaggacgcctcackcaggagaaagctgctagttccctttggctctcttgccctttggttatatctgcccctgctgggggcagggatgtggggcttgggggcatctcctgtggtgtgcctggggtgtgcagcccctgattgtcrttgtggtgcccatcaggaccctggacagaagaagggaggactcagtgccagggcaatagggaggcccccyagggacgctagtgctgtgacatgtgtcagaaaggcgcagtcagcagcagcggctgggtgtgtttggtgggaggtggcacctaccaccccgtggttcccacccaggggagccaagtcctcttccttggctgtagtcctgccragggtctctcctcagttttgagtctcaaggtgaagacgcggtttgtgggtggctgaggggttgctccatgggggctccctccctyccttccttccttagatggacgaggtgggtcgcatyctctgtaacctgtgcggtgtggttyctggaggggtggtctgtttcttcccctcctacgagtacctgcgccaggtccatgcccactgggagaagggtggcctgctgggccgtctggctgccaggaagaaggtgagtggcctgtcggcagccttgccacttgtgaggacagtgycactgagtcctcctgggagctcttgtgctcatcgggtcrggacaggcttytggctcctcatccccaccgctcccagtccctgactacagaggatttccccmaagtccctggctgtgaggttctccagtccgctggccagaaaacacaaggccacgagcagacccgagacctggcaccctaaacctgtctctgggaaatgtcctstgtctttctcagatattccaggaacctaagagcgcacaccaggtggagcaggtgctgctggcgtattccaggtgcatccaggtgcgggcgtcatgctgrgcttgggtctgagaccrtgtgggggtggcagctggaaacgtgggtgtcatccaagttttggctcagcaactcagcrtctgggtttctcctacaggcctgtggccaggagagaggccaggtgacagaggccctgctcctytctgtggttggaggaaagatgagtgaagggatcaacttctctgacaacctaggccggtaagtagtggttctgctcatctcctgggtcgtgatacatggccggccctcactcccagcagctgggcccctgcctgctstctgctgccattagagcccacagctgggctgcgactgctcagaccagccagctggagggaggggctcagcagctctgggtttggccctgagagagtagttggattttaggctggycattgctgtatcaggacccaatcaattggcctagacgggatctctcagccttacaagccctctccaggtggtaggtacagagtggagagaggctgagttttgatcacagtcggagagggctgacgraaggggtagaacggagcagctggtgacatgggtgatgacccgggagttcctgacgtccacccactgggctcttgtctccyccccacgtgtgtggtgatggtgggcatgcccttccccaacatcaggtctgcagagctgcaggagaagatggcctacttggatcaaaccctcgtgagtgaccccagtgtcacagagggtgacagagtaggcagtgggtgggagtggcatcacccccagggctgatacagccaggccttccccactgcgctggtgtctcctgccccctccggaagcttggatgcccctccacaccctcttgatcttccctgtgatgtcacctggacccctgctgctggcattggccacraagcctcctgktctggctccaaagcctggcagggtcttttccccgggggagctgcaggcagggaacrgtcctgatgggtcwtccccttcactcccagcccagagcccccggccaggcacmcccagggaaggctctggtggasaacctgtgcatgaaggccgtcaaccagtccataggtgagcctggctgcctccagctgggtggacagatgggrgctggagaaggggagaacaggaaagaggggttgcctgccctgtttcctatrtaagtctgaggaaggggagggggtcgccatgggaatgtgctgtagggggaggcaggtgttgctcggagcsccagcctctgttcctatgcaggcagggccatcaggcaccagaaggattttgccagcatagtgctcctggaccagcgataygcccggccccctgtcctggccaagctgccggcctggatccgagccmgcgtggaggtcaaagctacctttggccccgccattgctgctgtgcagaaggtcagtcctacctttttctttctgagagcctcccmaccccgagatcacatttctcactgccttctgtctgcccagtttcaccgggagaagtcggcctcttcctgatgggcaaccacaccaccgcccggcgccgtgcccttcctttgtcctgccctctggagacagtgtttgtcgtgggcgtggtctgcagggatcctgttacaaaggtgaaacccaggaggagagtgtggagtccagagcgctgccrggacccaggcacaggygttagctcccgtaggagaaaatgsgggaatcctgaatgaacagtgggtcctggctgtccttggggcgttccagggcagctcccctcctggaatagaatctttctttccatcctgcatggctgagagccaggcytcctkcttggwgtccrcaggaggctgtggcagcwgtggcatccactgtggcatctccgtcctgcccaccttaagaggygagatggagcaggyccatctgcctctgccctttctagccaaggttatagctgccctggactgctcactctctggtctcaatttaaaatgatcccrtggccacagggctcctgcccaggggcttgtyaccttcccctcctccttcctgagtcactccttcagtagaaggccctgctctctatcctgccccayagccctgcctggatttgtatccttggcttcgtgccagttcctccaagtctatggcacctccctccctctcaaccacttgagcaaactccaagacaccttctaccccgacaccagcaattatgccaagggccattaggctctcaacatgactatagagaccccgtatcatcatggagacctttgttcctgtgggaaaatawccctcccacctgcarcagctgcccctgctgactgcgcctgtcttctccctctgaccccagagaaaggggcygtggtcagctgggatcttctgccaccatcagggacaaaccgggggcaggaggaaagtcactgatgcccagctgtttgcatcctgcacagctacaggtccttaattaaaagtgtrctgttggtttctgctgagttttttattgatatgtgctgctgttttctctggaagcctctttagggaatcgaggagcgcactggtgcaggggctgggtggagccatcctccgatggagcacaggcagatggaagcccccaccccagctgygtggcctgaagccagcctcccgctccccgaaggtggtctccacacagaactgggacagttccatcccygccccttcctccagggcagcagggctgaggatcccattctggctgtgtccacgtccgggccatggctggagtctgggtttaggggaggaaggcatggcggcgcccgctaggatttccagttgtcctcttcttcctctgcctgtggctgctgggggttagcagacacggtttgttgtctgacatacgggctctctcctcccggcccctcaccagccccagaggtgaaaaggctggagggcaaaggctgagtgagggaggtctgtggggagcactggtttccccaggccccagagacttaaacacaggaagaaaaaggcaagagagaattaacgatgccacagcccatggcagacagcggccctgcctcctacccttgcgtctcaggaccagcttgttgaagagatcccacatcagttccctgccttggcttacggctctcactgcaataggaaagccacggagtggggtgtggggttcagtcacattggacccccggctccgtgttcctgtcccctgtagtgtttttgttattagaccctttttcctccttggtttaggaatgggggccccagggccacccttgtccaggctccctctaccgtagaggtgagaattccagggcgctacagtttgaaaaccactattttatgagccaagtagaacaagaaatgacaactattaaaaaaaataagggatttctgaccagctaacaaccccacagaaaatctgccagggatccagaaatgagactgaggtggcctcagagagcggctccctcctgaaggggatgctgctgctgtcatcctgcccggcaccttggactgcagtgggcagggcctggggtggggatgagggtgcactgaccagcaccgcagcagcttggggaggttggggtgctgttaacatgccatcgtataggtcggaagtggaaatgggagaaagtgtggggtgcctagggaaggaggtgactgagtagggagcctggctgccatcctaacacccagctcactgggcttgagagacttgagcctggtgccagggcagagtgggtgatgctggggcccaggctggcaccatacttgaggtctgccaggcaggtcaggtaggatggcacatcgaccttggggacttggcccaggtctggcgtgtagaagtagttctccgggacacacgggattaggtagggacatgtgagaggtgacagggacctgcaggagcagctagcgagacctcatgtgcaccctgcacagctgtggtggcataaggggttcaatagagcctctcctagagaggagcctggcaaggcccccagcccctgcccctgcccctgcccctccccctccctgtccacctgctgctccagctgctctctcattgatggacaaggggcactgaacagtttcttctctgtctctgcccccagcatcacatggctctttgttacagcaccaaccagttggtccgggaagacagacttcttgtatctacaggggcaacgtggaggtcaggcaagccagcacctgctgtcctgggaccatgttcctgacctacctctcccatgtcatcagggacactgcactgaggggtcccaggccaccgagccaagccaccctggtcaccttctggctcccgcctctgtgctgcacctgagtgtgatgccctgggaccccattaagtcaggctgagtcttgcacccacaccctgcgactccattttctgctacaaaggatctctctgatgttgacgagcagcatggagacttggggagacccccccaagcgcctcctccatgtcatccttgggctccagcttggcgctcacacacacaggaaaggacttcagcttctcctgggagggctgggtggctgaggggtggtggatttcggagttggaccagcagctggcctagaggctactggggaggagggagcagggagcacccactgctgatccagattcactccttccctcgcctctgtcatgaccccaaagaagcagatcctgaacctgggctcttgtcttcacctttgttctcttccactctggggtaattaagaatgatttgctggccaggcgcggtggctcatgcctgtaatcccagcactttgggaggctgaggcaggtggatcacaaggtcaggagatcaaaaccatcctggctaacacggtgaaaccctgtctctactaaaaatacaaaaaaattagccggtcgtggtggcgcgcatctgtagtctcagctactcgggaggctgaggcaggaggatggcgtgaacctgggaggcggagtttgcagtgagtggagattgcgccactgcactccagcctgggcgacagagtgagactccgtctcaaaaaagaaaaaaagaatgatttgctaattatgcaggcagctgatccagtgctgtgtaaccttgggggccaccagatgccaatcagtagaatgggagagaaggaaggatggaggaagtgaggacaaggggcaaggaggaaggtctgtccacctgtctcttttgtgcaggaggtgtccaagcaggaggagcacgtcacatccccactgaaaaagcccacagaaaatgaaaagcccacatgcttgtccattgctgcaggatgggggcaagtggagagggagaggtgtcaatgctcccaccttactcccagtcatggctgactcctccctttccttcgttcttgttcctaatctgtcaccatgtcctgtcgttttctttgtctcacccaaccctctgtgcctgcaaatcccctgactgcagcctcatccctgtcacctcctgactgtagttggtgacagaagaggaggctgcaccagtgaaggagcagggactccaggtctggcaacaaccagggatggggccgggtgggggtgacttggaccaggagaggggcctgagtcaggcagtcacatgcttcatgctggggtcccccaagtgaggcacagcccggggtcccgggaagaagaccaagcctcatttcaggttgcttgtggccaaagacaggacctgtgtacccaacaacccctgggacttttgcaggaaacagcaaacaccattcgctcactcgagttagataaacactgagcgaaaagtcactggagcccaaggactgtgcggggtcagtgctgccgatacaagaaccgcagccctccagctcggctccctcaacggcctgcgctgcagccacactggcctcctttcaggtcctccacctcagggctatagctcatgtgcttccttctttctggaatgtttttcctgacctacccactcaccgtgagatttttaccacaaatgctatttcctcacatccgccttccctgacccctgagaccaagctaggtcccccatgatgggcctcgcagcacctcatctcccctccacagaggcggtgataacccacagaacccagggccacgatccctggctttgaaccctggctttgccactcggccagatctctttctgtgcctcagtttcctcatctataaaatggataacagcagcgcctgctcataaaatgtggcaaggattaaatgagttaacgcactcagatcaatggtggagcaagctccatgatacatgaagattagtgattacaaaatactataaataggccttatcacaactgtaattaaataactgatcattaattggttatttaggtctgtctctcctgccagagtgtatacaccagttggacaaggacgctgccttattcatcactggatctatagtgatttgctcagtgccttgcacacaggcactgttgggtaaatattttctggctgcaggaaagagtgaaggactaacctccccaacccccctcccacccccgccccttgctacctcgtgggaggaagagcatgagttgggagagcagagccaccacaggaaaccaggaggctaggtggggtggaagggagtgagctttccggctctcaggagcgaaagcttccaagttgggctctccccttggccccttccacccagggaagacagctgggtccgccaggaccaagaatccccaaaggggctgctcccagaggttgtgttgcagggactggagagaggacttcccagtacagggggtggccctctgatcaggtgggggtgggtggcagcagagcatttggtgggaggtcaggagctcacaggagatgggattctgccgatgcctgctgaatgaatgagggagggagacggcaggaccagggactggggaattggtactaaggtgctgggtacctgccgggcactctgtccatacatgatctcagttcagctctccaccttggaaacacaagaaaggagccgtggctgcagagaaaaacagaggctggaaacaggggtacatgggcagggtggtggtggtgagagaattgcctgaatcagctgccaaatggtgcccaggttggaaaagcaaatgtgcacacatgggttcttcccactctaaccctgaggaattagaggcctgcttctgacacagactgggcagtggctagtgactctaggtatagagtatccaggccctgctcacccaggctagagcttagggagccagaaggaaggaggtgcatgttggggtgcaggacaggagggaaaaatactcgaattgcaaggtgagggcacagtctatttatattgggttgaattaactcctccccctgatgccactaaagcaggaatcacactgcagatggcactgatttgattggcaagagacatgccaggaagaatattaagggaccggacccctataattaggcctaatcatagcctgttgtttgaaaagggcatgaaggacattcatcaggcctggcactgtgccctagacctgctctcctgggtagtgggaccctccgtggcaacagaggtgtgggtgggcctgggtgagtgtggcaagaaatgcctcggaggctctatttggccttaaagtgctgtgtgaccttggataaactgccctctctgaatctctggtcctttccatttcccattctccaggctgagaactgcactgtgatatatggttattcccataataataatgtgtgtatcatgcataatgcactgcacctcttcaccacgctggtgcccactcttctgctccccctgccggcttcctcagccccttctaccctgatggttctctcctttcctcctcaggccagcacttcccatgatctgagatgtccgtcctccttcctcttcaactttttctccagcagtgagttcctcctcctaactgaggcttccaggaaggatatcctctgcttctcagacctgaacctgccttgaatactcatgaggacccaggagctactcctcacctcccacttctcttccctcctgtcagataaccaaggcacggccaactgatctccaaccatctgaggaacccaaccgtgtgagaccacccacacctttcaagaatgttcctcccctccccttctttgtatttatactgatgcaaatttgctggccatcttaactcagtcctgtgcctcagttctcccacctgtaagatcaggaggaggataaagatgtaagactttctgcacacgttttaagatgaattccttgttaccacatctgagggtgtctgtgtttactgtactatccacgtgagaggattgtacagacacgaatctaaacaaggaagtagcaagtccattcaagcattaagaggctgattagtggtttattcattctgtctacaagcatctactgatcatctattcagtacagaccattatcacaacaaaggtgaataagacactatgc

SEQ ID NO: 94525 - DNA, 143566 bp, Homo sapiens
  misc_feature (1)...(143566): n = A,T,C or G
ggacacacagctgccccatataaagactacatttcagtctgccttgcagcctggtgtggccatgtgattaaattaaggccggtggttgtgaatggaagaaaagcatgcagagctttgttctcctgttccctgctgactggcatatgaacacagaggtggcaagccaccctggactataaggacaggggcaatattctagagacggtggtgcaaaaaggtagaaggaactagggttccccaaactctagagctgccacataggcctggactgtgtacagtgaattctaatataagaataaactctcttgtttaagccagtgttcctttgttctctctcataccagctgaatctttatccaaaaaatcattgaagagaaaaatttcatctggaaataatttctcttaatagaaactccccctgacatattttagagctttgttaatttctatataaccataatattctcagtatgaaaggtgacttggtaaatacttcaaacagtgaagccaaatacttcttctagaggcatgccttacccacctaaaatcatggttaatatttatttcccacttgacctctcccagcatacacagctataaactgtaaaagctattttccaaaaatagattaatgacatagtaaaactaatgtccaagcttattaaaactgtacaaccctaagatgaagctgtatcccccaacctaaattaatattctttttaataacagcagttctcccatgttcctatcatacaaacatgcaagtatttgtcaaactgcacaccaacatgtatatgtgtctcttccatacatttttacttgcaggattaaccaaagtcatgaatcaaaatcttccaaaattgttaatcacacgtggagtttcaaatgtctgtgtcagattgctgaaaattatttgattttgtaggttaaatcaggcctactcactgaagtactcaataaaaaccctactactatttcacatataccagtagtatgtacaatatttatatgctgagtcttaattatttcttttgaattatatctgaaataaatacaattttcatatatcacaacaaagctatttgtgcaaacgacaagattatatactacaaaagttaattgtatcattaagaataaattagaaataaagtatcattttcaatgaggaagactatctgattttcaacgtattaccatttcactccattatccttaaggttctagaaagttatggctatactgtttaaaatatttatcccatcacaagagaattttaaagtcaagaacatattgatatttctgaaagtattatagtatcacaagatacacaaaacattgttaaatagcttatacaataaaaacagttgcatatttatctcaagtcagaggatactgtaatttactttagattaagtacttatctgaaactaattatattataaagaaaattaaagccccaaatctacttattcagcagttggatttataaaaaaatcaaagtgagataattttgccctttcactgctaattactgtttttttgtttgtttgttttttgttttgtttttgagacagagtctcactctgttgcccaggctggagtacagtggcacgatctcagctcactgcaagctctgtctcctgggttcacgccattctcctgcctcagcctcctgagtagctgggactacaggcgcctgccaccacgcccggctaatttgtttttgtatttttagtagagacggtgtttcaccatgttagccaggatgatctcgatctcttgacctcgtcttctgcccacctcggcctcccaaagtgctgggattacaggcgtgagccactgcggcaaattcagcagacaacagttatattgacaggaaacagtaaaatgtactactgaatgtataaatctataagatacttcaatggcttaaggagttaatcaccaatgaagcccaaattccggaggataatgatcacattcaaaatctaatttgaccagcaactaaatataaatggtacatgaagaatatcaagagacttaaaagtttgttcttcgtgttttgagaactctttggagaagtcgaggcttaatctgaccctatttgtgtgcagagacttatgaagttattataggaatccaaaataagatagaaacattcaatcacttccatattcacaaatatgaggaaattacctgattgttgtggtagaagtgtctttgcctactaaaaagtggtgtctgccctctctgatctgctgagcccatgtgggatgaaaccatattacatgtgaaaaatggccagcataaactgcaggcataatccaattttcaatacttaattctctggaaaagaaacatagagacaacattaaaacttttatttttattttttcccaagtgtaattttatccacaacattttaagaccacaggtctcaaagtgtggtccctagagtggttcctgagactttttcagggacatcactattacaaaactattttcatgaaaatactaaggcattatttcctgttttcatttactgacatttgcaaagatggtgcaaaggcactggtgggttgatgttccaacattaattaaggcagcagcaccaaactgttagtagttactatattcttcattaccaaccactgccaaaataaataaataaataaatataaaagtgtcattcgagaacatcttgattttattaaatttccatcctgagtatacatttttaaatattatgtgtggcaaaatgagaaatgcacagaaagctctcctgctacatagtttgaagcataacagttgtctcaaggaaaagcacttgtgattgaactttgaggtgaacaccatttatcttgaaaggagtggtcaagaaactatggttattcacacttgatactgaattgctgaattctacatttcaaataagctttaataaactactacttttcaagttttggcgcactatcaaagaatattcacaattatctaaaaaggctatcaaaatattctttccttttccaattacatgcctgtgaaagcctgaatcttcatcatatatttcaaccaaaacagcatatggcaatggactaaatgcagaaatagacgtgagaatccaatggtctctataaaggcaaatattaaaaggattaaacattggctaggctgtttttgtaaacaaagtttttttggtttgtttcttttaagagatggggtctggttatgttgcccagtctggagtgcagcagctatccacaggctttgatcacagcctggaactgctggcctcaagtgatcttcccaccttagcttcctgagtagctgggactacaggctcatccaccatgcccagcttgtaaataaagctttattggaacacagctactgtcatttgtttacacagtgcttgtgattgctttcacactacaaaggcaaagattaatagttgcaacagagaccatatagccagcaaacctaaaatatttgctaatctggctctttaagaaagttgtcaacacttgttctaaataaaatgaaaaagacaaaaagacaaacaaaaaacccccaaacccatgagtttagcaaagtctatttcctataattgcttattatctactgcaaattgtacttcaaacacaaaagaccataaataaaatcacatattacccaaagagtgtttccttatcaaacacggtgtctgctggcatattcacaggaataaggaggtctggatgtgagtcgaaatgtaaaaaacttacattactggcaggaagatgctttgagcctatggcccggtatataaagggtagaacctgtaaaagacacaggcacacaataagaattaacactgaaaccatgagcacacactcaactgcagactgaaaaacaatgctaaataatgcacataattgaaagcatactatgttgctgtaaagtggaaaaacataaaatttgtttactgtagatggtgcagatgataatctcaagcattactttgtcctcagaacttccaacctgcatctccagcggccttcctgctgcccccttgaactcaacaggtcatgtggggaaacagaccaggactggggctcaggaacaaactaccgcttaatgcctgttctaacattaactaggtgttcaaggtaccctaggtctcaaagtattcttttttttcctttaaaaagggataggggcttgtcagttgcccagcctggaaagcagtggtgtgatcatggctcactgcagccttggactcctgggttcacacgatcctcccacctcagtctcctgagtagctgggattacaggcacgcaccactacgcccagctaattttttcacttctatttttgtagagatgggatttcgctctgctgtccaggctggttagggtctttttggtacccttagaatggtggggttgggctaggtggtctataaaggccatttctcctcttacatcttctctaattctaggtttaatacctaatttgaaagcaccgtctaacctaggctttctcattctctcaaggtcatagacactatatccaggtcctgagaaacctatcttcctctcctattagctgtcaccaacagtaaatccctcttcttttttaacgtccagagaactgcctcccatcccaagcctactgatgctactttaaaacatatttattagatccatgggcctcctttgttgacttggaaaagtctagattaagacaccaatttggctactgtaaatcagcacggccataaacatggaaaccccttttagtgtttatctatgcagggcaccgtgttaaatttttttttttttttacgcaatatgggccgtgcgcagtagctcacgcctgcaatcccagcactttgggaggccggcgggggccgatcacgtgaggtcagactttcagaccatcctggctaacgtggcgaagccccgtctctactaaaaatacaaaaattagctgggtacggtgatgcgtgcctgtgatcccagctactcaggaggctgagacagaagaatcgctcgaacccaggaggcggaggttgcagtgagccgagatcgcgccactgcactccagtctgggtaacagagagagactccgtctcaaaaaagaaaaaaaaaagatttttaaacacagtatgcacacaataatactcctaagagccctgtgagtcctacgattactgtccccatttcagatcagagcccacgttccaagcataaagcctcccatctaaacagcagggctgtggtggcgattccaggagatacttggaagccagagttaactgcaggttaagaacacatggctctgcagccagactgtccggtttcgaatcccgatgccaccttttgtttggttctgggatttgggggcaaaccgaggtaaataagttgccccgactcgtaggaagcgcccataaatgtcagttctcattcttcctagttagctgttttggggtcctctccacagcaacggaatagggcagtttaactctggttaactctctggcctccgatgctaaggttgcgccctctgcttggccctctgagcgtcagggcttccgctgattctgccccagagccctgttgccgtccgctcacctcctgatgatcctccaccacccacactgggagcttggggtaacgccggagaccagcgcgccctcccgcggagtcactcatgyttttgcgcccgtcagttttgcagtaaagcggtggcagctggagaagacccgggaaagccggcgcctcaacccggccagctctctccgggcggaagcgctccctcacccggttgcgttttcggattggaggacgtagggggagggggcgcgggctccaaagggtcttttgctgacgattggtctagacgtccatcgctttcgttgacgcgccaatcaccgcgcacaaggccctgcggtgggctgaagagttttccctcccttggcccagctttctcaggtttgctttttaattccctcggtttcctgttccggaggcgcgggcgktgccactgtcttggtacctgcggtagtagcctggctttgctctgacggcgatctcgcggcccgagagccttttataggtaaaaggggtaccttgcaagtgttagaagagagtttccgagtgtcaggatttaaacggggctggagtctccggggctggggtgaaaagcgtccgggaattggggtcgggcagccccacttcagatctgcagctaagggcaaaagagcgacgctaggcctggatcccgcaaataagtggaagtgaaaaaggagacctttcattcatttgtggagcacacactatggtccaggcctggggccgcccggctctcggaggggagtgagatcctgagctcagcgcctgcctcgtggggcgtaccgtctggcgggagatgcaaacagtaaatgtgcagttatggatcaggatgaaggtgactgccctgcagatccacctggggaaagagggagttctcaataaaaatgtagtcacactttaaaattctttttacatgcactgacgttctggccgtgttaactattcaagacagctccttcagtgtctctgtttccaaaccgcaaccgagaagagacagacggagaaaagagagttacttttccaggtgcagtgaattccttgacttttgaattaaagtctgcatccacaacacagccggactatgccttcaataggtcaatttcatgattagtatttttagattttctaactactgaaacatccatgaggatctggcagtgaatgttcagctcttgttacacactgtacaagagtgttcgtgaccctgacttttgcccacctctaggtgcggcacacacctttgtgttcccctaagccctgcacatacctcttttttgtgtgtttattgcattattttgtatttttaaaacacttacttgtacgtgggttctgagttccttgaatcctacaggctgtgtgtcttattatctctgagtctacagggcctgggacagtgcttcccatttatgggctcattaaatattgcatgactcagtgaaaaggcctgctttctgttgcggaggtacatggaagggaaatgtacagtagcaacatggaaacatactattggtgagagagtaaacatttattgaccacctactgtgtgtaggttgcttttcccggggatgtgaaggatacagaaatgactgtgaatcaacccatatcatcaaggagctgataatctagtggaagagttagacgtgtgcatacttcactatgatatgaggcagtctctggtaagtgctgtaaaaggattaagtatagactaagtctagagggaatgggattacctaagggaatcaggaagggcttcatagaggaggtggcatttaagattgatagatggatagaaaatcactgggcagattcatacgttgggagattttttttttttttttttttttgagctagagtttcgctcttgttgcccaggctggagtgcaatggcgcgatctgaactcactgcaacctctgcctagggtgggagattttagagaggagaacgggagcaaagaactagctggttctttgtactcgaatggtaatctgttgggaaaacatggggtagtagggtctttctggggaaggtactggagaacaagcctgggtccagagtcaatagagccttaaatgccaagcacagaggttgaacttgattctgttggcagtgagtagcctatggtggcaggagcacctgtccgggccccaggtttatcatgagggtactggactggataatagtaataaggagtcaggcgcagtgactcacgcctgtagttccagctattttggaggctgaggtgagaggattgcttgagcccaggagtaagagacagcagtgagctatgattgcaccactgcactccagcttagggacagagtagactttgtgtcttaaaaaaaaaatcagatattatttggtgcctattatttattaagcacactgactgctagcataatctgaaattattttcatgagccatttgaaagtctacatagtaaagttctattgatgagacttttagaaagactttcagaaaatgtttctatgttacagctttttgtactcaatatttatgtgagtttttaaaaaatgttttgctgaagttcaagtatttggaaaatcattcatgtttacagtgtttttatgtgggaggaactgagaatgaaaattaagaatcattaactggtgtgttaacaagattctggttatgtttgaatttgaatgctggtctcactgtgatttttgtgtttggtctatgcctacatggtttgtttttttttttgtttttttttttttgtttgtttttttgagactgtcgcccaggctggaatgcagtggcgccatctcggctcactgcaagctctgcctcccaggttcatgtcattctcctgcctcagcctcccgagtagctgggactacaggcgcccaccaccacgcccggctaagtttttgtatttttagtagagacaggatttcactgtgttagccaggatggtctccacctcctgccctcgtgatccacctgcctcgacctcccaaagtgctgggattacaggcgtgaactaccatgcccggcctatgcctacctgtttttaccatgaaggaaacgagagtatgaagggggagaggggaaatgatatttttcccaagtcttttaacaaattagagatgatctatgcctataagtctttttagctgctgatagttttgagttggcaaaactagtaataatgacattttaaaatttaaggacattaaaaatttagttggaaactttaacacagttcaacatgcttttaattttgtttgtaggctaagtgtattggaaactgcaaaatcagtgttatggtaattgcagaaatattttgtagcattggcagtttgggaaacatgtttatgtctgttttattctttctgttttttagagcttatattctctgtggaagatgtgacatatccaggcggaacatcatgatgcagggaaacacatggtgagtgccgtgatgggaatggcaatagtttgggagaaccgagagaggagcagacattggtgctgggctatagagggtggaaaggatttagatacatggggagaggggataatgtgctcattctttcaacagtgggcacaatacaatagagggccatgcccagggctgggaagccagaccagaacagttaatagaaatcccagagcgctgccctgacagcgcttgcagttccgaggtgcaggcagacattaaaggtggaattaggtccttagaaggtggattgtaattattgtaggacctgctaagaagcagcacagagtgttgtgagagcaaggaacctaacaaagccctagggtcagtgacagtggttgtagaaaggccagcaaggatattattataatagccatgtaagargtgatgatgtgaagtagatgaattcaggaaatatttatgaagcagaaacaattggattttttgtttattttttattaagggatagttgccatataagtgacagcaattttaaagtaaatttttagctaaggatggggggtgagggaggacaagtcagatgattccctgttacatgtcttaaggactattaatggtgtcatttattgagataggaaatactaggaaaagagcaaatgtttgtcttggagggcaaggtcattaattccttttarcatatgttatgttgaatttgttggtccaggtcagtgagacactcaaggagagagatggggttggtaattggcagtgtgggtctggagctcagaagttgtgggctaaaggtgtaacttgggagtttctgacagattgatgtcaattgaagcagtgcaggtgagtagcatcactttggaagagagagtgagcagagtgcctgggctagacccctgaggaataccagacggttaaaggccccctagcagagaagaagctggtatgggagactgccaggaggaacagccagagaagtaggaaggccacagtgaaggcatcatgtcaggaagccaagaaacgcatccatgggggtgggggctggggaggcaactggactgattgctgcacagagatcaagcaaggtgattgaaaatgacctttggttttcaagacaaggtgggcactgatcatgtcacttattggagaggtggtggaagctgaagtcggattagagtgagttagaagtatatacacttttgtcttagcttgggctgccatgactaaatgctatagactgggtaacttaaacagtaaacatttatttctcacagttctggaggctggcagtctgagatcagggtaccagcacagccaggtttctgatgcatgccctcctcctgccttgcaggtggctgccttcttgttgtagtctcacctggtaaggggtgkgtggcagggatttcttttctctttctctcttcataagggtactamtcccatcataattacctctcagagtccccacttccatatagcatcacatcagcgttatgatttcatcagcaggaattttgggatggacacaaacattcggtctgtagcaacgttttcaggtcatttgactgtaaaggggaggacaaagaaggggcaaagtcaagggagacctggaggccaaggaaagtactttatgttggaatagacctgagcactttcaaatgctgatgtgaagggtctggtatcagggagaggtggaggattgcagagggggggtggtaatcccaaatctgcatttggagatgggagtgggggctggggaggcaagcccccttgatcttgtgaggtcaagatcagaggggaacttgagcaaaggcatgacagcaaatggtgaacaatgggatgttraattggtcattttggaagtggagcagctttaaggaatggtcggtccagggactaaacatggcagtgggctgggtggccaagaaaggggaagagragtttattgagcatgagggtttcagatgttagcaggaacccagtattaaatgggtggcctattccagtggcttgactagggggtctttgagttgctcatcaagatggtcaggcatttatgaaaccctgtttacatagtaagaattattttttaaaaaaacttttccctttttcttttctgccatgaagtcacagaatgtcgttccacccgggacgagggtgtccccgaggacgaggaggacatggagccagaccctcagcaccatcctttaggccccaaaatctgaggctgcttcaccctcagcagcctcctgtgcaatatcaatatgaacctccaagtgccccttccaccactttctcaaactctmcagcccccaattttctccctccacgaccagactttgtacccttccccccacccatgcctccrtcagcgcaaggccctcttcccccctgcccaatcaggccgcctttccccaaccaccagatgaggcaccccttcccagttcctccttgttttcctcccatgccaccaccaatgccttgtcctaataaccccccagtccctggggcacctcctggacaaggcactttccccttcatgatgccccctccctccatgcctcatcccccgccccctccagtcatgccgcagcaggttaattatcagtaccctccgggctattctcaccacaacttcccacctcccagttttaatagtttccagaacaaccctagttctttcctgcccagtgctaataacagcagtagtcctcatttcagacatctccctccatacccactcccaaaggctcccagtgagagaaggtccccagaaaggctgaaacactatgatgaccacaggcaccgagatcacagtcatgggcgaggtgagaggcatcggtccctggatcggcgggagcgaggccgcagtccygacaggagaagacaagacagccggtacagatctgattatgaccgagggagaacaccatctcgccaccgcagctacgaacggagcaggtaaaccgcttgtgtgtagttctttaatgaactgcagaggcccaggcacggtcattctccatttatgacaaccaaaccaaaaggatccagtagggcatcttgatttatgtaaggaaaggaagcacattttggactctgttttcaagaggaagaaacaactgacaaataagttgatgtcagaaaaaaattgcttttaaaaagcattccaaatatatcagtgtagattcatttcagtgaatataagacttttactctgcataatacagttgacattttaatgatgatcccatgagatgaaagatcttgtattttttgtgttatcatagattaaattatgttcaatgtgatcatcatatcaggttatagcatttgagtttttttggaactggcgatctgcgtgttaataaagaatcaaattagttaacaggaaggactttctgagttttaggataagtagaaatttattgtacattgttgccttcttggttggtttctttgtaaaacgaagtaagattatttacacattatgaaagttagttttcaaaatatctttttttttttttttttttttttttgtgacagaatctcgctatgttgcccaggcaggagtgcaatggcgagatctcagctcactgcaacctccacctcctgggttcaagcaattctctcacctcagcctcccaagtagctgggattacaggtgcacgtgaccacactcggctrattttttttttttttttttttttttttgagatgaagtcttgctttgttgcctaggctggagtgcagtggcgcagtctcggctcactrcaacctctgcctctgggttcaagtgattctcctgcctcagcctcctgagtagctgggattacaggcgtgcaccaccacgcccagctactttttgtatttttagtagagacggggttttgccatgttaggcaggctagtctcgaactcctgacctcaggtgatcagcccccctcggcctcccaaagtgctgggattacaggtgtgagccactgcgcctggcctaatttttgtatttttagtagagacggggttttaccatgttggccaggctggtcttgacctcctgaactcaagtgatccactcacctcggcctccttaagtgttgggattacagatgtgagccaccatgcctggcctaaaattgcttttaatctgattttgttgcattgaaatggattcttactgaagaaagttgtattttaaaaatactgtttcattctatattacatttcttttttcaaaagatcaaataggtataaatatgagagaaataatgtttcaaggaggcatttctaaaactgggattctagctgggcttacagaaatactctgaagttatatgcaacttttttgtgtgtgtgtttttctagaaggaaacttacatcaggttctcaaagaaggagggtgtgagtctgttatcccaaaagcctgagaaccattggtttatatggaaaaataaaagacacatatcaattgtgctaatgtttatttatgcctcagtgaacccttacactgatgaagatttgagatcttctgttgtcaagctaattacggtgcttctctttctttccccagtagtgtacttaccttygttgtcttgtggaacttttgtgctaaaagtgtttgagctccccagaccaagtcacttcactctgggtttgcasagagctggtcttggytcttgttgctctgcagctgatttaggaaccagttcacatctgtttccacatttttctcatggctctatcaatttggttctgactgaacattttgccagtaaattaaatgatagtggtcattctctgcactgaagagagggattagtgctcagaaggttcagaaggaaaatgctttgttgcctctccctggtggcctggtagaagatagaagggaatgtgttacttgtagggatgactcatttctggtgggccaaagctgagtgagagttggtagactttaaaaatcttttcagcatgaactactgtttctggtcaatattctgtgatggactagttggcaaaggcataggcatgtgatagtttttttkttgttgttttttttttttttttttggagacaaagttttgcttttgttccccaggctggagtgtgatggcgcgatctcggctcactgcaacctctgcctcccgggttcaagcgattctcctgtctcagcctcctgagtagctgggattacaggcacctgccaccacgcccggctaatttttgtatttttagtagagatggggtttcaccatgttggtcaggctggtctcgaactcctgacctcaggtgatctgcctgcctcagcctcctaaagtgctgggattacatgtgtgagccaccgctcctggctggcatgtgatagttaatgttacagttttatagtgcaaatgttaactggaaagagtaaatagtttgtaaatagttttcttcagactctaaagtaattgttaataattttgcttctgggaaaacattttgcagcaaacattctagatagtgttgtatttccgcctctgttttgatatgctataattagaggagttgtcagggctytgctgtaaatcctaaatttttccatcaaggcttcaacttggagttatgtatttgtttgaagaaactcagatgtcctgtgaattgcggatctcagtaaaatcaagtgtcgtaagaattacttctaacctgatttatcctaaaccacactcctttactatgaggatctatatctttctaaaacgggctttatttatattcgagttgttttataatgtgcttggggcatttgctctggagctgcctagtggcatagctacattataattggctccctttgggatattaattaggtggaatgtcagtcatctgtcttatrtggcatgcttctgtgaaacaaacatggagcacatgaagtcctaatataacttctagaagtatatttggaaaactgaaacttcataaatttgcattgtgttaagtttatgcaaattctatagtctgttttcttgttgcccctcccctgcttcttggggtaagtgaatctatccttttacaaattctgtgttccctatttttctctgcctccaaaatgtggttgaataacaattgcaagattgtcttagggtggactgtttttagaaaaggtctgtgaaaaagtggatatatgtatttgttgtcatgaaaaatgaaagttactccagggataaggaaagaaattgctacaggcagatgtagtgcaccaagcacactgttgagcagagtggtaaggatgtgtgccctgggcttcacctagctagggagtgctaccacgcaagaattctcatggctgaccttgtgacagtaaatgtgtagctactggagaactaccctaatgtacctaaggaatatcttaatgtttgcaaacaaggaagaatcttgggaaaagtaacacaaacatagcttttcttgctttaaaagaatttgtcttaatagtgttactaatgtgatttatatccaaattggtcttttcaagtcctacccactcagaggtaccagtcatcattagaagtgttattcttaaatgcaaaattctattggctatatggtaaaaaaaaatatattagaaatatcctctaattagagtttttatttggaaatgtacgcaattatttttttcaacagccgtgccattacaaattacatatatctttgacatgtggcatggttcactaatttctatacaataactaagatttactgcccaaatgtaaactctgattttagaagtgtatgagatgaagaatgtagaatccaaatctctggctgctttatttgggatagctggtatatatctgaggattgtatatatatcagaaacattattcaaaggagtcttcctttagaacaggggaatctttaagtggaaagcaatttctattttaatacctaagcactcaccgatctctgtcagttttgtaagttctattttcaatgtattgacatttctgtttggtgataggttgggggatatttttgagttcaaacattttaatggtcttctttctggactcaggttaatatagcattttatttttcctgttctaagattggaaggttacttcctttagacttgtagttctgattcagacacactagagttcagatttctcttctaggtcctcattgttaaataggctcaaaagctattaatattattaaaccccagttttacattggaaggttttaaaaattcctcatctatttttttttacattaagtaagcccaacatctctatttagttttttttccagatgaaaaatagcattcaagtgacttagtcatggcctcatggcaggttagtgatagctagatctacaactcaagcctataagccataagcattaagagctctttcattatagaaccttgtcctaattttcactataaaagctttataatttacatttatttgataggtaaaatagagcattttttagaaatcaataggatgtggagttctttagagttttccctctaggttaaataaccaaggattggctgattgcaaggttttaagggaagattaggataaaattcccattattgcgtagcatcatgtatgacttctttctttaaagaaaactgcaaaaattctccaagttagttaacttctgtaaagtgaaaagctcctttatcctctaataaattaagaaggcataaaaatgtcccccagtgaacagtgcctgaaaaattcctagatgtggtccatttatttacaagatgaattcagtgaaaagagatggtgtttttgagtctttctgttgaaaacagctctgtgtattaattcctttaagagagcgagaacgggagagacacaggcatcgagacaaccgaagatcaccatctctggaaaggtcctacaaaaaagagtataagagatctggaaggtaagcaaggagttgacactgaaagaagtcataggattatctccttgaattcagattttgtgcttgtatggagcaacagccaagtcttcataatggcctcagagtctgtccaagatgacctgtgaaaagctaaagcagactgtaatttaaaagactttactttcaagatgcattgattatgcacaaggaaaatcttgataaatttccaaaaattagaaattatacagaccactttttctgaccacagtgctataaaactatacattaatcattttaaaaaaccttggaaattcataattatgctcttaaatttacatgtttcagaaaaaaagagcaaaactgcagtcatattttcattagaaaatgacattgagattgctatcacccaaaacttaaagggtgtaatcaattctatatcccgaagtaaaattttgtggtcttacattaatatgatggtaatgaagaacagcactctagaatctgacagattcggggtcagttattagctctcccaattttattactgggcaaagttatcagtgtcttcgtttgtaaaataaggacagttatatgtaccttcttgagtgataaggggtcattgagataatgcatgtcaaacacttagaactgggcctgaagtaagtgccaaataaatggtaactatgtatataattattatctgagcacttggctatagaaattggtggagcttaagaaaagcagaaaaagggatttaaagataaattaatgaaatggaaatagaactacagtgatataactatattgtaagtaaatgcaaatacaatttttaaagtgggaaataaaagaaaaatctacataacattaggtttgagaaagtgtattgttacaggaatgaaaagaaattaaaaaatttaaaaccgtttaaaaaattaacttgaatgtgatgggttgatttctaagaaaacaaaaataatttcacacaagaagcagaaaactttaataggtcaataactygaaaaatggaaaaagcttactttgcaccacctctaaaaaaagctttaaagtggtcttgaacactaaaaaaagatggaaggaaagctcagctcwttctgtagtagcaggaaaaaccagatggcaaaacctaaccaagggaaaaaaaatgacacaaaaacgacacagcaatctctcttacaaatatggatataaaaacacgaattaggatattagcaaatgttttcagtagtttgttaaaataacagatagagtttattccaagactgcatggatagaaaagttaatattagaaaatctgtattgtatgtgtcaaaatctgtagggttatctcagtacttaccttttaggtatttaaactaaaatcagcatccatatgtgagtaaaaactagtaaactagaaatattaacagttgtctttaacatgatgaagaatggtagctcacgatgaacctgatggataccatccccaaagagtcaaatgtggtgttgaaacctgcaggcctttcccatacaaatttgaaaaaaggcaaggaggccccattgcttatcgttgttactgaatatccttgtgatacaatcaacatggtaattaaaaacatggtgtttttgtgtgtcccgggtattgtactggtatgggtgatataggcattaacaaaggcccccacttaataggaaaaggaaagttaagtgctgtaagtgcgtttgataggacacttacatgttgctctggattagatgagattaattaggaaggatgaaatgccatgggttagatgggattaattaggaaagatgacaagagggcctgaggaggaggagaggagacaggagaaaagccagagtattgtgtcagtggacatcattgaggacctatttgaggtggatgatttttaatgtataagtgctggaaatagcctcggtttaatggtttcttctctaatgcctggtagcttgcagagaaggtagacttgaattctgtaagttctgactaacgcagcagaaaataaaaattagaaatggaaatactgtgagggggaaaatttaccagtttgcactgtggcatattggtaagaagaaacattgggagtttggattttgaattttggagtgcctgagacacttacctaaaaaagatcttttgtttctgtgttgaaatgcccttctcaaagtgttaaaaaaaatattaactgatgttcacaacaactgaccctgaccattcattacatcattcacaacgcctgcttaaaaggatgggtgaggatgtcttttgcctgtgtttcttggcaataaaacatttggtggaatttctttttagaacatgctgaaatgtctgtatcaaccatattagcatttaactaccacttttagctttatcgtattaggcaagtgactgattttcaaagctgttgcctcctttgtaggggatgttaatatctgcctcctaggcttgctgtcaggattaaatgtgaaatgtcagtaaagtgcttagcagggtgccagcctcagagtaagcaccaaaacaaaccaaaaagagtccctaggagctaagagttgccgttattacctgacagtattttaacagscttttaagtaaaaaggactacctggttagaaaatgtaatgcaaagacaaattaaaattcactatggaaagttattaayaaataatttaagcatcttgtaatgcataggaccaatgggaagaaaactataaaatgtagctgatgacaaagaaggtgatgtaataaaaggaaggtatgtccttttcccgtagtggatgaccatgtcgtaaaaataccagttttcttcacaatatagtcacgtaccacatggcatttcagtgacagactgtatacaatgttggtcccaaagattataataccttatttttttactggaccttttctatgttcaaatatgtctagttacataaatatttaccactgtgttacagttgcccacagcattcagtgcagtcacatgtacaggtttgtagcctagtagcaacaggctataccgcctgtccgaggtgtgtagtaggctataccatctaagtttgtgtaggcacactgtgatgtttgtacagtgatgaaatcacctaaggactcatttcttagactatatctctgttgttgttagtgacatatgactgtaatctataattttaacgtaacttcagttaaagtactttttcttttttttttagttattaaaaatgtaaaaagagatggggatctcgctatgttgcccaggttcgtctttgaacgactggcctcaagtgatcctcctaccccggcctcccaaagtgctaggattacaggcatgagccaccatacctgaccctaagtactggctttaggacttcataatgactctttaatttttccttgggatagaagttaggataatgaagaaaaatagtaatgcaaggatacttactctggaagtattaaaggttctggaaatatataataattttaaaaatttgatataggttaaatagatcattgaaacaactacagagcaacattcaagaatatgtattacgtacatctaataaatatgtaaagttacatgtgataaagaatatgtttttttcaaatcagaggagaaactggcaattggtgagccatttggaggaaaaattgagattagatttctgccttacaccttggagagagagaattaaaaattgtgttaaaagtaactgatgaaaatataaaatctttttttaaccttgggataggaaatggcttccaagcatactaaggcaggaagcataaaaagatctctagatttgactttataaaagttgtatgtagcagcaaacagatttcaaagcaagaaactggaaacggttacaatgcatatgacagagggaggacagttatcttaatgaaaactgtttcaaccaattaaagactctaatcataattttaaaaaatttgcatagcctgtgaccagaatgttcacaaaagacttaagcatgaaacatattcatttcaatattgataaaatacttcaaattaaattatatgaaaatactgtttcatcagaatggcaaagattaaaaataaccatagtgacaggatgtgtggaaatgggaactcttatgtggttttgatggtagtctaaacgagtactgcctaactagagagaagccttaaaaagtatgcatttgggaaagaatctgacaagtgtgcaaagaacacaaatgtgttcatgatagcattgtttatggtggaagagaagtaaatgttaacctaaatgactattattagttttgttaaattatggtatatacatataaaagaataataatgtacctattaaaaatgctccaaatatataattattgaaataggtgttcctgatttactactgaatgagaaggtcaggctataacattaaaacatttatgaaatatagtgattttctctgagtggtgttatgtgtggtttttatgtttgtgctttattttttctacagcgaacatacattgacagtaatttttctggtaacaaaactaatgatgcgtattgtaatgtctggaagttatataaataatatgtataatctttctaatcctcccaaagtatacatacctacacacatatatatacatacagactttccctgttagaaaattacaagttagtggtagagttaatgagaatacttattactttgatctggatgtaaacttacatggatagtagtaactttgttagtggagctgtgaaggctaccaggtgatcttacaaagcagtttttctacttagctggattctcaaggtctctgtgttctacctaaatttcttgggcttaaattaaaatctaccctgtaggttttgttgttattgttgttttgagacagcattttgctctgttgcccaggctggagtgcgtggtgcaatcatagctcactgcagcctcagccttccaggctcacgtgatcctcccacctcagcctcctgagtagctgggactacaggtgtgcaccaacatgcctggctaatttttgtatttcttgtagagacagggtttcaccatgttacccaggctggtctggaacccctgggcttaagtgatcctcccgcctcggccttccaaagtgctgggattacagatgtgagccaccacgcccagctgaccctataggtttttccctccaagtacatccataggatgggtctttgcagatttcaagccccaggaagtcagggagatggagttgttttttcatctttctttattgactgagttaatattaatatctgtgaggaccaacattaggcaaagtgttggttcaccaagtagtaatgcccaagactggggttccagagacagttagggatgacataagtggttcactctcggattataattatagtcctcaggccaaatttatggccatattgagaccctgttttgtgaagtcttaaaatctttttttcctggcaaagacagatgtggaggattcaaaactggtattctcattgctgaaattgtccatatgtggacatttccaaacattttgcaaatatctttttcttttaggagttacggtttatcggttgttcctgaacctgctggatgcacaccagaattacctggggagattattaaaaatacagattcttgggccccacccctggagattgtgaatcagtaagtagatctggggtggggcctgggaatttgtatttttaaacaagtaaacttcaggtgattctgatgccaccagactggtatttgggagtcactggtttaacaaaagtacacacggtgatttggcatggtattcatattttaggtgaaaaatgcaccaaataggtgaaatagaatagtttttacartggaagagtatttttaataattaacctcctttgccctcttttgaagtcgctccccaagtagggagaagaagagagctcgttgggaggaagaaaaagaccgttggagtgacaaccagagttctggcaaagacaagaactatacctcaatcaargaaaaagagcccgaggagaccatgcctgacaagaatgaggaggaagaagaagaacttcttaagcctgtgtggattcgatgcactcattcagaaaactactactccagtgaccccatggatcaggtggtaggtctgaagtagcagacaagctgtagactagggcttctcggcgttgtcactattggcctttggggctggataaattcttgattgtggggactgccctatgcattgtaggatgtttagcggcatctctgggctctacctgttagatgccagtagtacccctccccagttgtggttaccgaaaatgtcttcaaatattgccaaatgtcccctggggggaaaagatcacccccagttgagaatcactgttacagacaaaagccgttttaaaaagctaaaagccaagagtgcagtaggttaattaaaatatctttttataatgcatttttatttatttatttttgagacagggtctcgctctgtcacccaggctggagtgcagtggcaccatcgtggctcactgcagccttgatcttccaggctcaagtgattctcccacttcagcctcctgagtagctggaactacggggcacgtgccaccatgactggctaatttttttttattttttagtagagatgagatcatactatgttgcccactctggtctcgaactcctgagctcaagcaatcctcctgccttggcctcccaaagtgctgggattacaggtgtgagccactgtgcccagcctattctacatttttaatgatactggtagtatcagtactggtggtttcataagctttcacatgtaactagtttatgcagtttgtagtgtgtatgtgtatakgtgtgtgtgtgtgtgtgtgtgtgtgtgtkttctccaaaatgaaaaataaggaagaatttgagtttgtctcttcgaagtgtatccttgaccaaaagagcaccaaccctacgaagttgcccatgcatattggctagttttgcagaaagggagagccattgtcacccttaatgggctggagggaggactcctagagcacatgctgccagggccggggcgcctgtggtgctacagccggcgtgctcattgccatgacagactccaccactatttctacatgctcacttctcttttctttcttccatctccattttattttctgtcactgtcacctttttgctctctcttcccctcttccccctaggcgttatgcctccatcctgttaggcatatttgccacagagtaggcatgttgtaatgttcattgattaaatgaatgagtggacatctcattcatttaattaatgaactcgtgcagatttcgggcatgaaaagttgcagatgttagatttagtgtatgggattagataagagataagagagagttgtgttatttggaattttgtgaaaatagcttctatttggactcgtatctgtggggagcttgaaaggagatttctgtgtttttggaaacaaaggatttgagaagtctctcatagtggtgtgatattttatttgataaattagagcaggcttttaagtcatagttgatgtggtacagggaagggaaagctcacatactgtgcactttacggtgcctgaatgttattccatgcttctcatgttgtcttagttgaccctgaaaacacccctggcaagaaggtggttctgtccgttagaaatgctgctaggagtaataacacctgactaagtgggacttaaacaagctgggtttgttcttctcataataaggtacctggagggaggccatggctggtgttcactgagtggctcagtgatggcaggccctgctgtcttcctgagcatcttccacagttgcaggatgatgcaggactagcaggcctcaggtccttacacacccgcatcctcacacgcaggatgcagagggcatgttgggtgagcattcttctagtgtcttgcccgagctctcctttcatcccttgactccccttccatccctttaccagagccatgtgacatgcctaccccagggattcatttttccttactgccatgacagagttccacaaatggcatggcttgaaaccgcacacatttgtcatctcacagcttgggaggtcagaagtccagcatgggcctcactggctccatcaggatgtcagcaggtctgtgctcctttatggaggctctggagaaaatctgttttcttgctcattcaggttgctggcagagttcagttgcttgtgtctggaggacagaggaccttgtgtccttgttggctgtcaggtgtgggcacttcttggttcctccaggccatgtgcattccttgacttgtggatcccttcctctgtcttcgaagccagcaatggtggtcgagtccttctcgtgttttgaatatctcttgcctctttttctgttgtatctctgacccctgttggcaaaggttccctgattttaaggattcctgttctaagattgggtccacccagctgcaaatcctttttgccatgtaagttaacatatatatttaatttctggggattaggacatggacatctttgggaggggctggtggctcagcctaccttcccagagatcaggagttctcttctccaaatcttacagaatcctgcttctattaggaagaagggaagaatggctgccataggtgttattattcttaaaacaataaagatgaagacactgaagttcagggagtttaaacaggcagggctggttgttttttattacatcgttatgagtatattaaaactccagtgtaggaggaagactgataaactcaaaaggctgacatttgcctttgagttttgtcgtctgtgtggtgcagagaaggtggtgagaatgtcaaagctataccggcatcgccactcccaacaatgagatggggcctgaattatcccctcttctgggtaccagattttatgatttgccttaattttacatttgacaggtctggtttttacattttaaggctactaagtcagagtgtggagatgtaaagtgattttcaacctggaaattgagtgaggaaaagtggaaaattttctctaggaatctgttgcagagtcccgtgtttgtggtatgtgtttgtgtgtgtgtgagagagagtgtgtgcatgtttatgtcctcgtgtttaaggcatgagagtgtgtgtgtgtgtgtgtgcgtgtgtgtragagagagagaggggatatataggatatttcttattgctcgatggattgatataggagaagataggttatcagtgattttcagtaggaagtgtacattccctatgagggtatttgatgtcagttgtcatgattctctgagggtcatgattttttaaaaaatgtcatattaatagggcatagatgaactgttctaatgtttcttttctgtttttttttttttagatgaggtctctctatgtcacccaggctagagtatagtggcacagtcatagtcatagctcactgcatcctccaactcttgggctcaaacagttctcctgccttagcctcccaggtagcacaggcacacaccacctggctaatttttttctttttcatagaggtggggtcttgctatgttgcccaggctggtcttgaactcctggcctcgagcaatcctcctgcctctgcctcccaaagttgctaggattacaggcgtgagccagcacgcctggcctgttctaatgtttctgaatgttggcaaggcacatttacctgaagacygtgtcagcgataagtrtgtgtttgattcagagtatgattgccagtacttgagcattttgtttttaaatgtttgttaaatttagggttgaaaaatagcatcttgctgttaaaaatgctttgattacctgtgagatcttacatatctttgatatgatcgttattgatatagttcctaatattgatcctttatttttaaaagggagattctacagtggttggaacgagtaggcttcgtgacttatatgacaaatttgaggaggagttggggagcaggcaagaaaaggccaaagctgctcggcctccgtgggaacctccaaagacgaagctcgatgaagatttaggtgagtcagagtcactaactagcctgagacccttgmgattatagcttcattcctaaattttggggaaatacccttgagagtcccacattgagatttcttctttttcattttatttttcttaattacagtcagtaagatacatagcagtagaacttccttctttttgatcgtatttttccttagttcatttggcagaatacagcagcgatctcatttgcaaggcatgctaacaagggtgccccttggagagttgtccagtcagaagagttcagcatctttccgagagcaggagcccatgccccctgcctctcatgaggacaggtgtccttccttggccctctcctttgccaggtgcgcctggtttgatgagggaaacagcgactrtagcccagctctgtttgaaggtttctctccacttgtgtagacagtttgcatagctttttcataaggtggtctattttttcatgtgtatgttctgaggttccaagtaggttgtgagatctttgagaatggaaattgctttttatcactttgtatccttagcccctaacagaatgccatgcacagatgagacattcagtgtgcatttagctacatgttctctctggctcttatctgcccacctccattacatcccacacgctgagaggcagttatccatactgggcaaagacacctgagttgggagttggatggcttgggtttgaatccctgctctaccacctacttgatatgtgaccttgggccacaggttaatctccttagatttttcccatttgtaaaatagggatgacagtagacagtagcatctatctcatgcagtacatgtaaatacaactccatgttggatttcattatgctactactatgttaatctcttataggattaatttattttaaaaattaattatttttctttttgtggagatggaatctcactatgtaggattaatctaacttctaggtctbtttttttttttttttcaaattgtggtaaaatataagtaatacaaaatttaccatcttaactatttttaagcgtacagttcaatagggttcaacatgaccttgtttgcaaccagtctccagaactgttttccttttataaaactgaaactctggacctgttaaggaataactccccagaccccagttcccccgttcccttattactactatgctactttcttcctctatgaatttgactctcaggcatctcatatatgtggaatcatgtagtatttgtctttttgtgactggcatatttcagttagcataagtctgtgtctgtttttattcagtcactttaaggactaacaycttctcttgctgttattgagggaaaagaaatgtcaagtctttggtcttgcattcccagccttcgctgtggcattcccagcactcccagcccctaacctcccagtgtttttccgtgtggcccgcgctctagctagtccactgtgttcttagctccacgcttttgcctacgatgctccctcttcattcctttcttcttttctcctccttatcatgcttctcccatcctgttgcagtgcctgggtcacatgtgctccttctttgaaattatcaccagcctttcyggatcccagtgaaactgcccttttatggatcattacatagcttaagtgttaaactacgtactactactatggtttttcattttatctgacattgctcatcaagtcttactttctctctaaagatctttattttctttgcttccccaactagattgtgacttagcattatgggctatattttttttttatggtgttgcttagtagagtatttggtgtagagtaggcctttaagtattttctagaagaataaagaactcttcttacctttagaggtttaggtcatttggaagcctccacaaaaaccagtttgtcagccgggtgcggtggctcatgcctataatcccagcactttaggaggcygagacgggtgtttcacctgaggtcaggagttygagaccagcctggtcaacatggcaaaatcctgtctctactaaaaacacaaaaaatagctgggtgtggtggcaggcgcctgtaatcccagctamtckggaggctaaggcaggagaatcacttgaactcgggaggtggagtttgcagtgagctgagatcgcgcactgcactccagcctgggtgacagagcgagactccaactcaggraaaaaaaaaaaaccagtttgttaattccatcaatttctgtatttttctcccaacccctgttagagagttccagtgaatccgagtgtgagtctgatgaggacagcacctgttctagcagctcagactctgaagtttttgacgttattgcagaaatcaaacgcaaaaaggcccaccctgaccgacttcatgatgaactttggtacaacgatccaggccaggtgcgtgtttttatgcccttgctgtgaaggttgcaaacccagacataacggttattgctctgggctcagaagatacatgttgcctagtattgaaactgaattttactgtcagggttttgtccttcagagctatttcttttcagcttcaggttagttccaaagcataagcaccagagcagctgtcccttgaatcatttttgatgatgtttgtaaattccatgttggggagaggagtaatggccctgcctcattaaattgcagtagatggaaggagacacatggtaggatgaggagagagaacttggaggtctttttagaagtagttcacctggaaggtatcttgctgcaaaatagtaaataagtcctataagatttcttttttttagttggtaacagtcacaagttctcttccttgttaagcatgtttgagctaaaaacataataggtggacataattatttttatttttaattactgtcttaatatgaagtaatacataataaaattagcattgttaaaaaagatttgtgtcacacagatatataatacatacaaaaattatatctttaatgcatgtaaagttaggaagctaaggcatatctgtaaaaagataatttaaaatttatattttgtgagtaaatttataacattctatattaattaaaatgcttttctcctggttcttgttagatgacagctatccatcttttttttatagaacgtctggcagaaatgtattttgtgtgttccttttactctttggaattgagcagaaatgtttgcagaactgccartgcattttaaaacttggttttctttttaaacagctttgttgagttataatttacatatgatacaattgtacttcaaatttataatccagcattttttagtatattcatggggttgcacaactatccctacaattgaattttagaacattttttgtcccccgtaaaataaacttcctccatatatgggtttttttgtttttttgttttttttgagacctggtctcacactgttgccccggctggagtgcactggcgcaataacggctcactggaaccttgacttcccaggccaaacctgcttcagcctcccaagtatctaggactataggggcatcccactatgcctggctagttttttttttttttttgagacagagtttcgctcttattgcctaggcttgagtgcaatggcgtgatcttggctcactgcaacctctgcctcctgggttcaagtgattctcctgcctcagcctcctgagtagctgggartataggcatgcgcctccacgcctggccaattttgtatttttagtagagatagggtttctccatgttgatcaggctggtctcgaactcccgacctcaggtgatccacctggctcagccttccaaagtgctgggattacaggtgtgagccactgygcctggcctgcctaggtagttttaaaaaattatttgtagagatgaggtctcgctatgttgcccaggctggtctcaaactcctaggctcaagcagtcctcctgcctcagcctcccaaagtgttgggattacgggcatgagccactgcgcctggccctctagtctttttacttgactgttgtttcctgtttcgcaagaagcctctacactgatttccgtggatacctgtttctatcagaaattcaacagtgctttgtaaacagtctttctaatgctgtttagtgttattggttttgtgtcctctgtatagttgagccttgtgaagggctrartatgtaggatcccagaccttggtaaaaggcaagcatgtaggatgtctctgcttccctggagatccgtgagcactaagttaattttttatrtttttcatcacaacaagtcatgactggcattaagagtgtgttataactttttttttgkcttttttttttttgagacggagtctcaaaaaaactcctgctctgttgcccaggctggagttggagtgcagtggtgtaatctcagctcactgcaacttccacctcccaggttcaagcgattctcctgccttagcctccccagtggctgtgactacaggcttgcaccaccacgcccagctaatttttgtatttttagtagagatgaggtttcaccctgttggctaggctgttctcgaactcctgacctcaagtgatctgcctgcctcggcctcccaaagtgctgggattacaggcatgagctattgcacctggccttaggagtgtgttataagtttttttttttttttgagacggggtctcactctgtcgcccaggctggagtgccgtggtacaatctcagctcgctgcaagctctgcatatctggttcaagcaattctccctgcctcagcctcatgagtagctgggattacaggcgcccaccaccacgcccagttaatttttgtattttttagtagagatggggttttgccatgttggccaggctggtcttgaactcttgacctcaggtgatccgtccgcctcagcatcccaaagtgctgggattacaggcgtgtgccactgcgcacagctgtgttacaacttttgatgaaatcctgttacrtctcttatttgccagctgttactttagataatatcttaacataatatttctttttggtagcgatattattcctctgctgtaccacctggatctttagatttcccaagaggctaaagaaaggtatagctttttactttaatactttttttttcaaaaagtcttattgacttttatattttaattggayataatgagttataaatctccataactttaaagaaatatgtgtgtgtatatatgtatacgtatattttttcttttaaggctagtcaagtgaagaagcagtgggagtggagaagaaacgaagaaatctgtaactggctgtgatcaattacttgtaaaatccattacactctgaccagcctatatttttaaattattacaaaaaaagggaaatggaaattcattttccctatctgagctctggtcttgtttttgattcagtattaccatctataccagaggaactcatgaacctggcttgtgaggcccttcagattttgatcttagttctgcttcttttggtcttttcccccacataaatggtccattttatttagacgggtcttgtggcccagagcatgatgtggaccttctgccttctctccttttctcatgcatgctggtgcctcttgtggagcagccattttgttttcttgtccatctcatctgtttgacgccccagcattacctacttttaagtgatttttttttcttttaaattatgaagcacatcatatatatgttgttctcctgtctagaacagatattcattgagcacacggacccggtgctctttatcatccccgtgcttagcactcatccgttccagaggttttgaagaattgcttgcctatggagccttgtgggcggagttcgtggcactaaaacaaattcagggaaagagaygtaatctaacctgagcagtgtgggaagttcttctggctttagtagcattttcttctctctgctagtgaggtaccttacagtttctctttttgaaacattgaatccgcaggtcaccttcaaaacactctatgtgttcctccaggatataaaatttgcttttgtgaaagagtcatttttcttgagataagaaatagggaaacaaaagtgtcctgggaattggtagaagaagatgggggcaaacagtgtgctgacattgatattttctgcttggctgcacaaataactcaggaatgtggtgttgtcacacggtttccctttatcagacaatatagacagtttgcagctttattggttttggaacatccgtttaatcttctaaccgtgacagcctctcagagcttcagcgctcatgacattaaaacccacgcattttcggaggcatcaccgtgcatggtgtggatttttccctccaataaaaacgaattacattgtgtttctgacagatgaatgatggaccactctgcaaatgcagcgcaaaggcaagacgcacaggaattaggcacagcatttatcctggagaagaggtaactggtttgggttattatgtttgtaaatgctgagaagccagaagtagacagatgttgttgctgttctttcccccataaatgaaataataccatcaaaattctcttcatattccctaatagtctcttactgataattgcagaggaaagcacttgggttttgggagcgcagtggggaatgttctcaaggaaactttaacaaaagttttagtcgttttattatttaaaataggcatggtgtgtttgatatggtttcccatttcaagtattcttcagctgcacatattatagttttatgtttcatcataagtggctatgaatggccctggagcgacgctcttagtaaagtgctttgaagtgcatgtcttctctctctgttagtctgtcctttccaccaaactgaatatataytgactattttacctgcgtctctgcccttggtttatcagggaccctctaataagtttaactgaataggtagaacacttttacattgcagagtcatatataactatccctttcaattattgtccctcatttgttccctttatcttttatttttataagctatttttattaatcccaagctcctcactttataattcagtgcattgtatttaaacatagtatatgtaaaaccttaatttctatttaaaacttgtttgagggctcaacaataatgggaataaagactatgagatggtgcctgataatttgaaatacttgcatcacttctgctcatttgtctttgaaagttggcaagtgtagcgaggaattgtgggacaaggtggcatcttgtgagcgtttgtgcacatgcctcaggttgggagctctgagatgttgacgagggatcaacacctgtgacaggaaaagagcagaggtgggaactattcacctgtgatgtgggtctgatcaggcctggcttgtcagaatttttgtgtgttgtgctggaatggctgtcataaccccatctctctcagtccccagagcaaagtaccccaggaagggcacaaccttgggagagggggctctgcagctgaggttgaccctgaaggagccaatagctacaggctgtgtgctgactacacagtgcacatttggacagcaggcccttccttgaagggagactagatgggcagtggtgccagctagggacctgtaggcaggaaaggcaggtgacagtttggtctcctggaggaatggtcccattttgggggctcagcatgagtcattgtatctggctagttggatgtttggcagtggaagttagcttaattatatagcttagccttgataagcgggatccatgctgttgggctcatgtgaagcctcctctctgctactgtggtcacttcattcatgtgcccctcctgttgctctggggtggctaaggacagagggtggctgacaccaactgccccagtcattttgtctgcttggtaccttggtacctcttccatggtggctgctgtctgatggacctccatgtgtgagatagagctcgtcatgctcccttccatttgtgcaccttcaagtctctaccccaagaccttctcatccatcatcttccaatcttttttcttctaggcccctgaccagcaagcatggtcacttgcttctgaccaggagtccatctatattctaacttcaggccacttctctttccacacaaagtggatgaccaggtacactgcctgaaactccacccgctgggagagatttccccacagcgctatctctcagagccatcccagagtgaggctgtagtgccatctgttttcggttcagccactcttgccaactgacccatttgtaaaccaagcttgggctttttcctctgctttcatccatacatccttagtcatcagctgagggaggggagctggtgcaacagtggtggagctgtggggatccgggccatctgcccaggcagcttgtttgtgctcttggctcctgggtatgcttgactctggcagtaccactcctgccttatgatggattgttgctgatgctgtattgcctggtgggattgacagaatttagcctatgatgggtggttctggccacatgtgtatctggtatctcttggccaggccttacatatctatcagggcccagtagcacatctggagtattttttcaaaggcacataattcttcactatagatggcaggtcttgcttcagaacgtcagggaccagcattgtgattctcccaatgtggcctgcaacagattccttttggcaacttttcccaccaacattataggatctgccgaaacatatggccccagcagcagggctgcttgtactctagcctggaacagctgaggccatttctcacatgggctgtcctcagtgcgggcagctgttgatgctgtttgtgccactgtgtaagcaggttggaacaatgtttctaaatgtgcattcttttgcctcctgagcctgaaaaggcccacttaggtgttgtgctttcttcattgtaggaggtggaagatgcaataattgtcttttactttggaggggatgtcttggcattccccagaccactggactcctaaaaattgtgtggctgcggcaggcccctgaatctttgtagggtttatctcacatccactgcggtgcatgcattttaccaaggtctctagcctgatcatcgtaatgtcagaggtgtaatggagcagtgtgaggttctacagcatgccccgaccgtcgggagctctttggtattatgagtgggtgggagcactggggcaaaactataactataaatgtctgtgaaccattctgatcctcatttctgattgggatagaaaataacccattcaccaaatcagttgccatgtactttatatctgctctagctaaactacaacacctggcccggcagctacaatcagagttcctgcttggttaagtttgtggtagtttgcagtcatccttcaggtcttcaggggccagacaggtgaattaattggagataggaccggtaccatctcccctatatccttcagatccttaagggtggcactkacctcttccatccccacagtgcaatattggttttgatgcctgggttgaygggggtggtggtaatttcgtttctgcttggctttcccattaggatagctcttattccacatgtcaaggacccagtgttgagtagcacgttgggtctgccaagaatgtcaattctagtgtacattcaaggaccaggggaaggaccactgggtagatctgtgattcagtagacccactgtaagtcagaccttgaccaagatccatttattaccttggcctcatattctctactctaactggggcaccacagtgatgtatccagtctccaagtatcaatgatgattcagatactgcatctaacatggcttgaactgtctgctattcctcttttcccagtgtacagctccccaggtaaatggccataagcccctttggggaatgacagggctgttattttgttacaggatccttcctcctgggatctggccacctcttcagtcggtggatttcagtccaaaaaacatgatcacgtctggaactgggcaaggaatagtgtgactatttattggaatcacctgccttcagtgtcttggttatccattcttggtttcttatgttcgtacaaactaagtagtactcttactggttacccacttattttgtaccgaaggacaccatgttctattaactatttccatgactctttgtgggtcagaccccttyggctgctactttggcctggcttccagcacttagtcctatcacctggcatctcttgtttcaggattctgtcatccctattactgctggtgagctctgctctctgaccacttttgtagtcagccctggcctgcagaggaggctaccactgatcttcctgatgatgtttgtgctcctgtcacctgcacatttgttttggtgtgtcctctggggcttcccatgcaacatgattatttggcatattttccagctgtagatactttatccattctaacttccttgagtccttgaattccttcctccactgtctaccacggcaattccggtatttcagctttgctcagcgtgggccgttgcttcttcatgcttttaggagccatgctggtagggagttctcaacataccctggtggtgttgtatcctgagtgccccaggtcaatctactcttccctaaacaattttatgttctggccctgttgatcaaagctctcatcatcaggtcctctgcagacttctctggctgttgccacatgctagttagttcctgcaattcttttgaaatataatctgtttccttccagcacctccccagttggggccctgaaatgaccccaattataggtattggccaggaggggagactggttgaggggtgtgtgaagggggatagtgttgccttgcaggttcttccattgtcttctggtacaagtgagtggttgctcttaattgggagggatgtgccatctctgcagtcagatgatttagaggaatctggggagtcaaaacataaatgtccccatttcaggtttcctgggccctgactgtggctaattttctttgaggcttggcccctctcacaggtaagccttaggcttggtcctgccttgctgtgacctcccactgtaggtagtgagagtttcttctggctttcacatctggtttctaatagtcttttctcctcctctgctgttatacttctgtagtgtagtggttctctaagtgaaggctcccaactgagactcataaagcttcacctgggaacttgttagaaaggcagattcttaccccatcccagccactgaatcagaaactgggagtgggggaacaaacagtctgagattnnnnnnnnnnnnnnnnnnnncatcactggtgcttagcgacagccatccatccctgaaggatcatagccattgttcttatagctatcattttctccacagtcttaaacacctgggtgtttggcttgcttccagtgtacagcttctaattcaccatctttaaagtttagttgccctgccatctggtgccaggggctgtctgtgttccacttaccaccagtgatggcatcttcattgcttgttgagaggcgattgagctccaaaacaccatcttatttgctgttttattgggtcactcctagtaccaacagcctcatcttgggttctctagaagcagatgctaagatggagttttgggtgcatgatgtttattaggaatcaacacctgtgaaaggaagagggtggaagcaggattggacagaaggattggctgaactgtgagtgaggcccaccaaagctgcattcagcctgggggtgatctgtggaatgcatattgcccgtttgagttgggctgaaatggctgggcctttatacctctgccttgctcagtacctgatgtggaccgtgcctgaggtcagaggatggagatctgcagtggagagagatcctgaaggagcttatagctggaagctccttgctgtctgtgccctccacagccaggcagcaagtccctccttgaacgtgggtctgcgtggcacagccccatgtctatcacaggtgcacccaatgatgccatcacaactgatgctgtcacagcacacttcttgtgctggctttgtttgccttttctcgtcttttttttttttgatacagagttttgtcttgttgcccgggctggagtgaaatggtgtgatttcggctcaccgcaatctccacctcccgggttcaagtgattctcctgcctcagcctcccaagtagctgggattgcaggcgtgcatcaccacgcctggctaattttgtatttttagtagagatggggtttctccatgttggtcaggctggtcttgaactcccgacctcaggcgatctgcccaccttggcctcccaaagtgctgggattacaggcatgagccaccgtgcctggccagccttttcccgtcttaagatccatgcatatactgttccaccacctctcatgctttcttcatttctgaccttttcgatttttactcagcatatttattccttctagctttttaaatttcctrttaacactcactgctgttagttctcagattaatttccccactttttttttcagtttattcataagtataaccaaaggtcagttattgtgttattttacaagtaaaaggaagatggtcataggattctagatctagaaagatccttaaatcttgtagtctgaaccccctctggagtatacwgtaagtggcatattgtggctgtaagattaagggtagccataacttcattcaggtgtctcacagggctgatactccatgtcagcagtgttgtccgtgtcagcctgtgtcagcagtctacaacctagcctggagatttccaggagacaaggccacctaggcacagatgcagctttcataagtcttaaaacaaagtttccccttacaagaatagtttaaactccttttagaaaagagacacctggtaactgacctggactgaatacaggtataagcaaaggagaaggatcctccaaacttgagaatggtctctggatgaagaccctcctggtgacttggtcatctaagtccctggctatatctggcctgcgtctgctgttcgtcttgtaagagaataagcagaataaactgcttgagcatcagttggtgactaagacttatctttgaggagaatcagatggaaagggagaagtccctcctgaaagagctggttaattaggtccactcaaaacaccccagccaccaacacgacagctggggatggtgatgggatttgcataagcaggtgagtaatggcactcatttctatgagagaatcatgagagagtgaatgggagctatctctgatccagctactgggtgagccctatggactgttccacagtgggactggcagtttttattctgctttctggccaattgctaccttctgtgtgcactttgtacctctgttatggaaattgccaccaggcacatgccaaaattattcttaagatccttccaggcccatagtaaggggggacaggctcccaagtggaggaggactgtctggatgtcagggatgcccttggcttcaagagttgactgccggctggcgtgtctccagcccttgctgtgccagaggagcatcttggcctgaaggatcctgggattgtgacaccataggccaggaagtcttaggtcaggtttatctgcagaaagcctctctgttgttgtctgccagtgggggaattagaagatgatcccctgcaagtctgtacaatcactgaagggcaccattatcctctctgcactcctgatgggactgcgcagcttctccagggatgtgctctaccctcagatgcctgctgggtgccacgtaccccagtcacatgggctcagctcagagtcgcatcacttggcctggctgatccgtaggccttcaagctgtggaatgatgatcccgagtgcackgggttacsattggttgcactacaggcattaccagtcaccacctgggtcatggttaggacagtggctgtcacctccacaacctgctcagatgaggaggcatgccccagacaccatggaagtctgcaaataggtttaccctttgtcaaggccagaaatttagagcttcctcaaagacctgatgcagggactcagtgagaaagttgtcactggctgtactgtgtgtatcacacaggaactggactgtaactcacagactgaaaaatgtaacagtcggtagctatctccaaagatggtaagatctctcatgacttcaacacccagtcaaggttatccagggagcacaacttgatggggctgtgggcatagagcaggcagccataagctgtccctgtcctctgctgcagtggctgtttatggcttggagaatagcacacctcagcatgaacgtccccatyaagggctgaaagtagctggtgtaaagttcaggaaggaacatttaagcatgtttcagtgggtttatgcagctgccacctccatgggactggggcaccgctgggagagccctgtataggccaccttgcagccagatktttatggttttctttttgtttttgttttgagacaaggtctccctctgtcacccaggctggagtgcagttgtgcaatcttggctcactggaacttctgcctcctgggctcaagtgatctcctgcctcaacctcctgagtagctgggaccacaggcatgcaccaccacaccaggctaatttttgtaaagacagggttttgccttgttgcccaggctggtcttgaactcctgggcttaagcaatcctcccaccttggcctcctaaagtgctatgattacaggcatgaaccactgtgcctggccctactttacagttgtttttaaggtgagtcccatcacaggccaaacaagctctcttggtctccgaagttaatcaggctctgtgggcccttgccatgctggaaaatgccaagacacaaccaccacccaaccaagtgtttccagctgcagctcacacctctcccagccccaacttggcaccttgtagccagaggttcagacacctggcatcgctctccttggcctccccaggcccatcacccacaggacaagaccctgtccagctgtctgcaacaagggcagagctacttctactggcagctgcaataaaggggactcccaaatgggcccatctccggcaagcctcatgagttccttcagaccctccttacaactgacgtggcctgctcacccaccgacccagatggaagaacaccaagtcttcatcaaggccacctatgtgtactagcagtccagtgggtgtccctctggtaccctcatggatgataattgctcatttaccaagttcatggtattttggaggccccaaaacctcagacatttgcggccttattggtcatccttgcttcaccagcacctgaggaagcggctgagagctggagactggccagcccttttttattggtctaggtatggcaaagccaatactgttctttcctaccagtctgtgaaggaacagacataaaacctgttttgttagatgtgaatctaggaaatacaatatatttttaagtaaaagtactcttgctttacttgtaaactgattttcgtttttttcccctcaggccatcaagccctgtcgtcctatgaccaacaatgctggcagacttttccactaccggatcacagtctccccgcctacgaactttttagtaagtttctaaagaatcacatgcatatcatttaaaatgtaaatagagtaaaatgtgaataggctaaagttattgattctgttctcaaatgttcttactttgaaaaatattttatttttatgttgacaaattggcctttctcacgatgacgtttctttcagcttcctcttcactatactgctatatctttttttcattaaatattgttggcatcacttaatagccaaattcataatagccaacaatgttggagctatggagtgggaagaaaatatagaacacttccayatttcttgaaaattagtgaatggtggccgggcgcggtggctcacgcctgtaataccagcactttgggaggccgaggtgggcrgatcacaaggtcaggagatcgagaccgtcctggctaacacggtgaaaccccgtctctactaaaaatacaaaaaattagccgggcatggtggcgggcacctgtagtcccagctactcgggaggctgaggcaggagaatggcgtgaacccaggaggcagagccgagatcgcaccactttactccagcctgggcgacagtgtgagactgtctcaaaaaaaaaaaattttttttgaagaaatgccaaactgtttccaaagtggctgtaccatttttgctcattatttttttcttttttcagaggtgagatctcactttgttgcccaggctgaatttgaactccggtctcaagtgatcctcttgcctcaccctcccaagtagctgggattacaggcatgtgccactatgcctggctttcttttccttttatttaatttagaccatctttgtgaagtttttcaaatataaattaacaataatattggcaaaacaaataatagatatttcgatattnnnnnnnnnnnnnnnnnnnnatattcttttgctccccctctttccaagttgttcttaatagataatgtttaaacgaatgaaatctaatatctgtgttagaaatatgtcttataggtcatcagtcttaataattactgccatatttagcatttaaggttaaaaatggctgggcctggtggctcatgcctgtaatcccagcactttgggaggccgaggcgagtggatcacctgaagtcaggagtttgagaccagcctagtagggatggtggaaccccatctctactaaaatacaaaaattagcctggcatagtggtgcacgcctgtaatcccagctacttaggaggctgaggcacgataattgttggaagctgggaggcagagtctgtagtgagccaagatcatgccactgcactccagcctggggaagagagtgagacttcatctcaaacacacacacacacacacacacacacacacacacacacacacacacacacacacacagtggtgggttataagaatggcataaggaatagagggcttcatgcttagattgatatatgtattatttagttacaaatccaattttcagggaattaaggcctttgaacttgtgtgggaattgatttgttgcagtgtttggttggttgacttcttggagaggctgggaatagagctatgaggggttgaccttctggcaccaagaggcctttgagagacttctaggctgttgctagtctccactttatgatgctgagtctttttccactttgcatttgagtcagctgtgttattaccttgctcctgttaggacttctgttagttcagaaacatagttcattaagaacagaactggtagtattgtgagattaaataaacaagttcccagaaaatgaagcttaatatagccttttatttatttatggcacccataatattacatcattcattgtctaagtacgtaaatattatacttactatctgaagccggataatttcatgtaaaattaaactttgtataaagttctccctggtgtctgaaaggaagtccttatgttctattggttactttctgtcctgatggatttctgcatatgcaactcatgtcatttatttaatttggggttcgtgtttctgtttgcttttagactgacaggccaactgttatagaatacgatgatcacgagtatatctttgaaggattttctatgtttgcacatgcccccctgaccaatgtaagtatgtgccagttggctgcttttctctttccttgtacctccttcatcccttctttccaaaagtcaaaacatttcctgtcatctgcctcctaagaaacatttcctctgcatccctctgtattgtaaatgagctgcaggaagtctgcagcagtgcatcaggtggcattgtgacatctgtgctaatgagtcacgggttcggtctgcattaaatggtgtaagtaaacaagtgtcagagtaacattttgagagtgtgaaagattggaaaaggaggataaactgtggagtaatgtgttaaagctattttgggttggttgtccttcaaaagaaagttttaaggagaagccattgtttagtctctgagcaaaagaaacagagcttattcagaacgtttggagcctgaattcatgaaatagattttctgcttttgaatcccaggaatatgtcttcaagacactttgacatatggattcatgatatttttatacaggtattaagtctgctttgttggtaattggttcaaatggaagttcctgatccatgagtcaaaatctttccatctccatgctcacagtcccaggaattgtctttcttacttcatattgcagttggatgtagagtgaattggctggcagtggcacaggaacagatgtgtggcagtgtacttgacccagtacagatgctgttgtagaacttactgaattgtagctattgtatatccacatcaaatagaatgttctttaacctcttctggtttggttacgtgaaattacatctgcaatttgaaaaattattttagtactgtttacttcacagatgaaattctgttccattggagagtacagttaagactcaaatctttgccttagcttagccctttttgtcattctttttttctatgtaagtagatatgattccatagcggcgatgctaatttaggacaaattgttttcctaatgagattttctttatttcacagtattttttatcctagagaattttctttgagaagatgattacattgtaatgtaaaaataaaatcatttcataatatatattacatttttcttcggggggaccatctgttcactaatgtagaaaagcaataatatgggctgggtgcggtggctcacgcctgtaatcccagcactttgggaggtcgaggtaggcagatcacttgaggtcaggagttcaagaccagcttggccaacatggcgaaaccccgtctctactaaaaatacaaaattagctgggcatggtggtgtgcgtctgtaaacccagctacttgagaggttgaggcacaagaatcatttgaacctgggaggcagaagtttcagtgagccgagatcatgctgctgcactccagcctgggcagaagagtgaaactatgtctcaaataaataaataaatatagaaaagcaatagtattaggccattcttaaataatctttatggaaaggtactaagaggtttctgaattttcatgatttctttgctttttttttttttcaagtgtcacaaactttgaaaccctttgttacaccgaatctcatagccttagagttgattactctccaccccccaccatctactgcctgtctcttttttccccacagagggcttataaatacacagaatttagttagcgtgaaaatacttaaaactattcttcctcttatttcttgattccctagaagtaatatacatcttattttgacttttaggatcaccttaaacaaagaaggatagcagtgtggctttagagagaccagggtttaaaattagtgatagctctgtgatttgacatttcaatctttataagctttggctttctcatctgtaagattagggtattagtgggaacaatctcattggcttttgtgaaaaataaataagatggcacatgaaaagtgtttaccatggtgtttggcacataataaatactggcacctctctctttggaaaggatttcagacagagctgggtttgaatctttctttgaatccttttttttttttttttttaaccttggacaagtgaattctttgaacttcattaatgatagcaatgcttggggttttagtgagaatcggacataatttttttaaaatgtggacttttttaaaaaaaatagtagttttaggtttacagcaaaagtgagtagaaaacatcatttttaaaaacatcccccagcacaaggtttggcctgagaggccactgttgctaaattagtcacagtcgttactgtcattataaaacaaaaggacagaaaaaattcctggcttcagcatatattttatgtaaatgttcaagttctcggtgagaactttattctatgacaaaccctatcatttgtattagagatgttgataaaaatagagttttaagctgactgttgtgcagttcataggaattagatccatcaaaggcctcttgaatttgaaatagcctcctaaggaaaagaattgttaaattgctttaccaatctgattccttttcttgctagagagagaatgtcagtaagcatgtcatgcaaatgatggtaatgacagaatctccaccaaatctagttctataagttctcttaaggtcttgaattgaagtggattgaaagccttgttggctgagtatagagcattctgggagaattttacctttttatgtagtacatttgttattgtaatacctgatgttaagagctctgacaacttatctgaagttttaaagatatgtgtatttgccaggtgcagtggctcacacctgtaatcctggcactaaggcaagggaattgcttgaggccaggagttcaagacggcctgggcaacttagggggacctcatctctacaaaaaaataaaaatattagctgggtgtggtaatgcctgtctgtagtcccagctactctggaagctaatgcgggaggatcacttcagcccaggaatttgaagctgcagtgagctgattgccccactgaactccagcttggttgacagagctagaccctgtctcttaaaaaaaaaaaaaaaaaggaaaagggccaggtgcagtgacttacacctgtaatcccagcactttgggaggctgaggcgggcagatcacctgaggtcaggagtttgagaccagcctggccaacatagtgaaaccctgtctctaccaaaaatacacaaattagctgggtgtggtggcgggcacctgtaatcccagctactcgggaggctgaggcagaattgcttgaacccaagaggcggagtttgcagtgagtcaagatcgcgtcaccgcactccagcctgggcgtcaaaaaaagaaaaagaaaaaaaatgtaaggtatatgtatgagttacaccgtattttgtcgtattctcaaaagcacaggagaacccctggatcatttccctcccactttagttggcttcccatttgcagtggactcgctgactcctggatttggtcaatcagtgtgtggaagtagtagagttagaagatggaggtttggagagttttttagttttttgagttttttgctagggtgagataggagtataagtcagtataggatgttcttttaagtattcaaacatgatggtagtcatttatattatttgatggcatttgttgggaggtattttggtgatctttgaagttacacagtttcttggttgaccattgtgtagcaaaataacaagctcttcttgacacttagagagagattacagtttgaatagatgaggagatcctgcctttccaaatttgtgtgtctgagaagggctctggtggtatggatggaagcccaaaagaaaataaagtatatacaaagagaagaggtcagagaaggaattccaagaagtgattttacttaaaatgaaatggagaaaggactgtacgtgcataaatcatctagcagagtgctttttcctatgatagcaaggaagaaagtttgcacatttgctttctgcctatctcttgagaattcccaacagctctggttgttttctctcctgtttactctctgagtagttcatttccacccatgcatattctgatccccaccagatcaatattaatagctgtgacatgtacctctgtattaatactccactctcacattttagattgccttttgaaatgaacctcctcgatgtttcctcagatactttaccctcaacctgtgtgaaactagactcgtcatcttccctgcatattgaatttgaggtactaaggggacaccctcctgaattaagtgacctagttggtcacttacgccagaaacccagaaatgatcctcaattctttcttcactcttcctcccacatcagaatggtcactgtatatttcagtaatatctcctgtgtttaaaatttttctcttcctttccagtcttcccttcatttggctcctggactattgcattagacttcagtctggtcttctttgttcccttacaagccattcccacactgtttccacagtgtctcatctgaaatgtaaatgatgataatctgtaacttaaagtacttgaatgatttctcgttgccatatatccataagccctgaccttaacatggtttgtaagggctacataatagagttcatattttcctctctagatcatctggcatctctctctctccacgcacttctatctgaactgtgaaattactacttctttcctcagctccctttcctccatttttctagaagctaaacacctgctctgcctcaactttttctagatgacctggaaaattcctccccatcttttttttttttttttttttttggkgatagagttttgctcttttgcccaggctggagtgaagtggcatgatcttggttcactgcaacctccaactcccgggttcaagtgattcttctgcctcagcctcccaagtagctgggattatagacgccaccacgcccagctaatttttgtatttttagtagagacggggtttcaccatgttggccaggctgttcttgaactcctgaactcagttgatccacgctgctcagcctcccaaagtgnnnnnnnnnnnnnnnnnnnnnnnnnnnnaactcatatgttacctcctctttggttcttttgtactttatactttttttgttgcttgtttgttttttaattgaacttagaagttacattgcattgtattctgtttgtatttacttacatgcctttcttcttacacatctttacctcttaagataggacccgtagcttattttagagtacctatgaacctaatatagttgttagcaaagaataggtattttaaaaatacattgaatcatgcaaaattttgtaactcttaaatatttttaaatgattataagaacaaagtagaacttaaaaatgataatggctattatgaatttcactcaaattaaccactattctttagaataaaaaggaaaagcccccaagaactaaactttgtatctgagaaaaggatttccagtagatggcattataagactatttttctgtttttcktaccatccctttcactgatagaattaaaatttgtttctttctgattgctgtggtttatgaaaatgattacatctgtataaaatcatcttatggacagattaagcagccagaaaaactcagttaacgcgtctctgggacttctgggtctgttattttccccagctagccagccaattctctgcagtaatctccctccctttttcattctttaattcattcaaaaatatatttayggaaaacctgttatgtgtaggcagtaggcaattgtctgatgatacattggtaaagtaagatagatgtggatttattttatgctgagccttccttcattttcacatgtatcttgagtattagaacaggtaatgagaggggtatactctagtggctaagagctggagtctagagaaagacttcgcagttcaccaagctacctgttatcttaggcatggtacctgatgactcttctgccttagcttcctgcactgttcagtggacatggtagccaaacccatgttatagggatgttgtgatggttacatgaatgaatattgtgaagcatttgggacactgcctggctcaaaaaatgttagctattattatttttattatcatttgttattattatatttattaccacaattgcctttgcttaagagccagatgggcagcatgaattgggtgttttcagtgacctatgaatccataattgatgagttatcaccctactatccctgatctgcctaaggagccagagattctaaaatattttaaaaacttgagaaacagaaatgtttatggttatggttttattaattctttagaggtgatacttgtggttttaatgggttcttgtcatgtttgtgttgctgctgctaatactgttaattaagcaccacattatgcaggtttcttggcgaggccaggccagctgggttcttgtcattaaaatccagcagttgtggtcaagcttcatgtgcagtgttgttagccrctgagatgaaggtgaagccttctcatttggttcatggccttttgggtcaggtaacaaacgtgtataatatgagcctgcagggagacgttggggaactgaacctcacttctttttattgcagattccactgtgtaaagtaattagattcaacatagactacacgattcatttcattgaagagatgatgccggaggtaagggaaaagattgtgtgtggtttgatgtagtttgctcttttgcttgttccatacyactattttaaagcattgaacttggccagatctggcttttgccaggaatatctctaaagtatcatattcactgttgaaagagtcagtgaaatgtagctctagtatcaaggttaaaattcaggccaattttcaacttgttgacctgtttttatacccctttctccttgtgttacgtctgctgatattaactttacatctgtttctagtttcttttacgtaggggacagattttggttactggccattatcagaggggaaattggaatagtgaaacaatctgatagctgttgtaataatcttattcgttatctccaatgacaagatcaatgcttggttcatttttcttcccatatatttacatatttttcctaattgtttttcattgcgagtgctcaacagcagatttatctcaatatatgcaagagatttaaaattccaaaggaagattaatgtgaatctcagaatgattcatagtctgatcttgaatttagtggtgtcaacaaatcatactaagaaataacaactagacagcaaacaagcttgtgcacttaacattgtgttggagtcagggtcaatttccggagcccctggctctgcttgcaaaccttgtttaatgggacagctctgtcatgggcagggagtgtggagggggaaattgatcggcatcacatgtgtgcctagttggcacctgtttcattctgagcaagtgttgtttattgtaccttcctttcaaaaagaattaaagaaaaagaaccaccccttcattctcctgctttagaagggktttttttttttttttttttaacttccttttggtttttaaggtcatatgccttcatttgctattgtaaaagtttatgacttctggcgtgatctcacgcagggtgatttatgaactccgagcaaaacaagtaggaggaagaattatgagataagtctcacttgcaaatatatctgtttagcttgtttacaggagaaattttggtgcagagttgtataattttcttagccctttatttgcattcattactttttgaactttttgggtacacaggacctctgttttttggtaactccatgacaattatgctggatgtatggggcgggggtgggggacaagcctatcaggtgcatatgtataatctgaattaacaaaacatcctcagaagattctgacacagtttataattgaattagaaaaatatattaatataagtgagactttactttttgaatttcttattttatttgtatactgagaagggctaagttgacattaaggaatcctagtggcattattgtctatttcatttccgtctgaaactagcgatcagtggccaaactcttcaggaaactatatggtcttagtatagttttaacagacacttytaaaracacttgacaagaacaagttgaaccttcagttaatgtatattttgccaaactacagtaatttaattttggtttatttttcagaatttttgtgtgaaagggcttgaactcttttcactgttcctattcagagatattttggaattatatgactggaatcttaaaggtaagtaataggatttaaagaagagagtagtgtttatggaagaacattatggtatatgtgaaaactcttataaaagttgtagggagatagttgaaatttctcttattttttaaatacccagagaaaagtgttattcacaggaatgcttgttatcatttgacatgaataagtttctatggattttactttatacagtttgacagggcttattattagctggtagcggcttgaagatggtaccagttattatgtgtagctaccttgatatatgtgtacctgggaaattaccattagttaatattttaaatctagtaaactttgctgtaataaatcttctaagatgcaaaactttggttagtcattaaaacacacacacacacacgcacacacgcagacacttagagtgaactagatagattcaaagacttgatgcttggttcttggatagtagcttacttttttggaagtatccgtaatccttttttttttttttttttttttttttgagacggagtctcgctctgtcgcccaggccggactgcggactgcagtggcgcaatctcggctcactgcaagctccgcttcccgggttcacgccattctcctgcctcagcctcccgagtagctgggactacaggcgcccaccactacgcccggctaatttttttttgtatttttagtagagacgggatttctctgtgttagccaggatggtctcgatatcctgacctcgtgatccgcctgcctcggcctcccaaagtgctgggattacaggcgtgagccannnnnnnnnnnnnnnnnnnnnnnnnnnnnnnnnnnnnnnnnnnnnnnnnnnnnnnnnnnnnnnnnnnnnnnnnnnnnnnnnnnnnnnnnnnnnnnnnnnnnnnnnnnnnnnnnnnnnnnnnnnnnnnnnnnnnnnnnnnnnnnnnnnnnnnnnnnnnnnnnnnnnnnnnnnnnnnnnnnnnnnnnnnnnnnnnnnnnnnnnnnnnnnnnnnnnnnnnnnnnnnnnnnnnnnnnnnnnnnnnnnnnnnnnnnnnnnnnnnnnnnnnnnnnnnnnnnnnnnnnnnnnnnnnnnnnnnnnnnnnnnnnnnnnnnnnnnnnnnnnnnnnnnnnnnnnnnnnnnnnnnnnnnnnnnnnnnnnnnnnnnnnnnnnnnnnnnnnnnnnnnnnnnnnnnnnnnnnnnnnnnnnnnnnnnnnnnnnnnnnnnnnnnnnnnnnnnttttgtaagatttcttccaggtaaatcttctggcttgtcagtgacctggtgagatagtgcatctgaaaataagcttgccatttttctttcagtcttcagggacaactttcccaccttcgatactgttaattatctacttctcaggttaggcacggaaatgtaaaattatacatgtggatttatatccctgcataaattatggtagtccaaattagatgaacaatggaagaacagatttataaattttagaaatctacttgacaaaatatcatgcgggtgtgttaatgtggagaaatgattytggcttaaaaaatgcatatggctaattggaaaacaataaaaaaatttaaatgcaatatgattataactgctgaaaaaattactgtaataatagttacattaaggtagtaggattatagtgattttttcttatcttttgacatgtgcttgaattcattttacagtgaaaaaaaggtataaaataattttttctcccaataaaatatagggaaatatatgacagttttttaaagcaatattttaactgttttctaattttttaaaaagaatccacctgtaatatttggcattatatttagtgtttttaaaaatgcttggagtcagtttagtgacatgtacctatagtctcagctatttgggaggctgagaaggaaggatcgcttgagcccagtgagggtttgagaccagcttgagcaacatggcaaggccctatctctaaaaattaaaaaaaaaaaaaaagtatttttaatgaaatcttttggttgcctttttgtttgcaaaatctttctccttgaggcttctggcaccctattcccactccttctttatttatttcctagtcaattacctgctttatcaaatgctgtgaaacctggcttacagtttcctctctccacaaggttctgttaccagcctggtgaacttcacttaccattctaccctgagctatataattatttgactttttctactgtaaggattgtcaccactcagccgcttaatcttaagataaaaccttggaccatgccaccaacctacattaatttctccctagaatttgactccattatctcactttctggtgacatccttcagtctagcctctcatgtccctattgcctttgcatctacttggatcttccctcttctccttatgtatggctactttcctttgccttccccaccaggtcctgtgctctgatgtttaccctgtcagttctagctgtcttagctgcctgtatggccatcatctccgagttaatgtcatcaatccaactgcttgccttttcttctatatatgggccactcagtaatactgaagagtaaaacatagctgctgctataaatctgtggtctataatcttggttggggagcttttcttcgtgtaacctttccacccaatatcagcagttaaagaatttcagtgctgtgtttgtgctgtcctccttatgcctcctgtcttcccatgggcagaagcccctgtctcccttgggcaggagcccttgtctccctcatgcctgagagccctgcagtgagcctgtcggagtctggcttcctccagtgcccttgtccattcacagccaagttttgcttcagtgccagaccctctctaactgtccctagcccactgyagctgccgatgccagaggcagcctcctacagaccaagtgcagagsatgtgcctcagtgttagtctcttccctgctctggtgcctgggtgctccttactttcctcctgtctctttgactcctcttgtgtggctttagtttcttgtctactctgtctggtttagatttttctcaagattttttcctgatactctttcctcagtccaggcagtcaaaatggcttagtttattttaggttagcattactcagatttttagtattactgttcatgtttattttgtttagaaatgcattcaaaggcttttctcctttttatatctggttttgttttattgagatgccgtttcttctcttctggtgaatgaatcttttgattttagaatggagcttcarcagtaaacttattagaaaatggtgttagagtgaatttgctgaaaagccttttcctttctatatctactttcctgtaggcgttttatgaccaaacagatgtctgagagaaagtgggcagttttaaaatcaccttaaagaaaaatctgctgttggatatttactttgtgagatttcarctctcacgtaactatgtggggataacatttaggttgtcataaagaaaaaggtctattgatttgtttttaaacagggtttaccttttcattagactcccctttgaaaatatacatactaagaagaccccgaaggatacagaaaaatacctgatgtataaaatgcattttggtattagataggaaattacggttgatttgttattcataatgtgactttgttaaagatcttttagaaaatggtgaattaaaaaaaaacattttgatatatattttcatttttttctgtgcagaagggttttttttacgtagttgtcatctactagtatatgatttgcatctattttttaataattcattgagcagatggatatttttaaagattgtgatatatagtgccaaatttcttgtcaaaagaataacatcagtttgtgctgccatgaaaaatgcattattattcatttttagcattttgcctttcccatcttccttctctcctttctttcttccttttaaaaaatttcagtggtgagttccatgaggctgaagagtaaacatttgtctgtcttgttgtatcactagtgctaacatacttcatggcacatagcagggackcagtaaatgcttgtttactgattttatttaattggtcataataatgccttatctaagtattcatgtttttggttactagtgagtgtgcttttcaaatagtctttggtattatctctcatttttataaagtaaacttttggttgaactataacataaatactgaaaagtgcatggatcatgaatataggaccttagtgagtttttacaaagtgaatatgaccatccacccagcacccagatcaagattagtagcttccaagaacccccttcggacccctttccagtcgctgctgagaccctcaagggtaaccgctattctgacttgaaacaccatgtattagttttacctgtttttgaactataaaaactagaattttatattctgttttgcttctgtcttttgtttaatgtatttcagaatcatatcctgttgcacttaactgtagttggctcattctcactactatatagtattatatgggatgactaaattaaaataaacctatctatgattaatggacatttgagtattttcagtatatatatatatatatatatatatatatatatatatatatatatatactgacattgccaatagaaaaacgggcaaaagacttgaatgagcactttaaaaaaaacactatctaggtacctaataaatatatgaaatagtgctccattttattagtcattaggagaatgcaaattaaaatcacaatgtgatacttctgaacacacatcagaatggctaaattgacaaagaaaaaataaatgccaagtggtgagaatgtgaaataacttgaattttcatacactgttaatgagaaggtaaaacagtacagtcactttggagaactgaaagtgtctacaaagcttaatatacacacagccagaattccacctggtatggtatatatgtaacagaaaaatatgtatatatgctcactaaacaacacgtacatgtctttggtgaacgtacatatgctattcaaatatacagatacagatatatagtgaatatatgttatatatagtgaatatagaacatgaatataaatgtcatgaatatatatatatctaataccttctctgtagattgctttttgatcttcttgatgatttttgttgaatagaaattcttaatttttatgtagtccaatttatagatatatattcctttatgattagagctttttgtatcatatttatgaaattttcgcctaccctaaagtcaagatactcacttatattttcttcacttttagagctgtaatcagtcttgaatttgttttcacaattcgtatgagatatgggtcaaaactcagtattttcaacgtgggtatccaattgacccagcaccatttattgaaaagaacaatttctttctttagaaaattgaagtgttgcttttgcttttgattgagttgactctgtgtgtatgtgtgtgtatacaaacaatacaaaagtatgtaaagtaaaaacagtgaacacttccttctgaacatgtgaaaatgggtaaatgctgtaaatggcttgatttgtattgttttaactgctttaaggagaattatgctttttttcttcaagtggaataacaatatgttacacaacttccttttttttttaaactcagatacttcaggcattctctgtactgtaaatgctttgcttcattctttgatgcatacttagcattttatagtatggatggacattaatttgtttataattcctatggtgacaaatattctggagttctccattgtttccccattttgtataaatgcttcagaaatagtctgtgtctatcctgttgcatttgtttgtttctgtaaggtagagttctagtagtgaaattatgtgttaagatagtatgtacattttaaattcagaatgatgttggccaagttttctctagaaaggacataccaatttgtagttctgaccaacagtactctttctgaccaacagaaagtactctttttctatacacctgccaatactggatgttactagtcttttttttgagacagagtctcactcttctcacccagggtggagtgcggtggtgccatctcggctcactgcaacctctgcctcccgggttcaagcgattctcttgcctcagcctcccaagttgctgagattacagggacctgccaccatgcctggctaatttttgtatttttagtagagacaggggtttgccatgttggtcaggctggtctcgaactcctgacctcaggtctgcccgcctcagcctcctaaagtgctaggattaaaggcgtgagccatcacacctggccaggatgttactagtcttttacagtttagtccaagcttgtccaacccacagcccatgggccacatatggcccaggacggctttgaatgtggcccatcacaaattcgtaaactttcgtaaaacattttgagttttttttggatttttctttttaatctcatcagctgtcgttagtgtcagtgtattttatgtgtggcccaagacaattcttccactgtggcccagggaagctgaaagattggacattcctggtttagtccatctgataagcgaaaagtctgatgttactatttgcatgtttcttgaacttctttgagaatgagtaactttccgcatttttcaggtattttatggttttctcattctgacttgctttttgtttatgtcagtttattataatatctaactgaaaattcaagttttataagtcatcatcatatttctctaattcttcagtttatcccttttgaagatagctgtcccagttgctttatacaactttacccaaaagtaagcttgatagtttaaaccaaggattattcaatgttgaccagtttaccagaaaccaaatcatagagcaatcagtttattgagatttaaaattttttctcaaatttttgtttctttcctatcccactctctacctttggtcgcaaaatagttgatatgaactagactgagtataaggttttattctgagtgtaactggggcaaaggtaggtcgtgattcaagatagtgagatcacacttaggggaaagcctactcattgcttatattactgccctagtaaagcattgcaaatcctgaatcagttttgcaaattgactgtctagaaaattgattctttgaaattgccccatctggagcagtagttctcaggtgtggctggcagggggccaggaggtgggagagtattgcaaaatttccaggaggcaagtgtagtttgcaaaaccatctattagtaccacaacttaatatacatttggaaaatttagaaaagacttgttaatacgtattttagaaaataagattattaggatgtctcagcaggaatatccagaagacacagaaacgcagtcatacagttactgtcagtgtagagaaaggggataatatttttgtatttcttaaagttgagtactaacagttgagaaatactcttataagcagccatattcttaatacagattctctaacaaattaccccctccccaaataaccatataaataatcaagcaatataaactgagagaattgggtctctaagaaacagtttataaagtctgtcagttcattaatgactgtccagattcattccctgaaacacaaactccagttcttcccgaataatgagctgttgtcacagttccagtcccagagttggcggaattcctgctaaccttagcttacccgctctcatttctcatttatatcatgtcctatttatttcagccaacaagataaaaattacttcctagccctcagtgacatggctccataaatccccaacataaacaagtggcaaggcagacaaaccaaaagagccaattcattaacattagtgaattcatggcagcctgagtgcgagtggccaagttattagtctgctttagaaagtcattccacaaatgtttatggagtgtctttttgccaggctgggtgtgagagatatagcccatgccctgtgggctctggcaggagtctctaatttatggatctcctcttacctttccatggaaatcgagccccaaaaccagacagggagcagagtctcaatcccccttccttgagatacctttcacctcaggttatctgccctgagtttctacttttttacagtggtaaataaaatctctttaaggtttagttgccatttaaaatatttagcagatttcaacatggatttgtggtttctccttcagtgttgttaactttgcacctgatgtgtgtatatgtatatttttaattatgtcttgtttctatgctgctatgtgactcgcttctgcctcatcattagcgttgtacctaaataagaaggtggataactggcattcttataagcaccttgtgatcttctttctttctttctttgatagagagtctcaccctgtcacccaggctagagtgcagtggcacagnnnnnnnnnnnnnnnnnnnnnnnnnnnnnnnnnnnnnnnnnnnnnnnnnnnnnnnnnnnnnnnnnnnnnnnnnnnnnnnnnnnnnnnnnnnnnnnnnnnnnnnnnnnnnnnnnnnnnnnnnnnnnnnnnnnnnnnnnnnnnnnnnnnnnnnnnnnnnnnnnnnnnnnnnnnnnnnnnnnnnnnnnnnnnnnnnnnnnnnnnnnnnnnnnnnnnnnnnnnnnnnnnnnnnnnnaactcctgacctcaggtgatccacccaccttggcctcccaaagtgctgggattacaggcgtgagctaccccacccggccaatggccttatttcttaatctagttgtgcctttcctaaattggacagtatctatactaatcattttctacagaaatgaagcctttaagtgagtcttggtttgtagtcttaagtattcctctctcccactagctcttttaaaagtcttttcacattaaatttgctctccccagtccatttcccttttatctgaagtgccatggagtcaggcagctgtaaatgtatgtgtggagattgtagtgctgttttatatacctggacctgtgtatatttactccctccgtcatcctcctctccctccatgaaaatatgaatcttttttctaattcttacacaaagcaacattctgctccttcttacggtattttagacccctattgtgtccttaaagtccctggtactcttaagtaatctcaccaagtataggcattataagccaaaaactattttcttctttccttagttcctagtgaacctagttagtgtggcagttctttccaaggttctctaggtttcctttattcctgctgttctgtgtgtatgcatgtgaagtgtatagacaacgtattctggcattagaattttctcatccacctgttcacctcagtccccttagaaaattggtgattatcatggactcagactgagagacaggtattgtgggtttgctgggctccttagcaaagagaggaacattactgattgaggaacacatgtcacaagcaggtggattggaatgtgtttttattattttattttattttttgagacagggtcttactttgttctccaggttggagtgaagtggcacagttacrgctcactgcagcctcaaccttcagggctcaggtgatcctcccacctcagcctcctgagcagctgggaccaccagtgtgtaccaccatgcctggctaatttttgtatttttttgtagagaggggttttgccatgctgcccaggctagccttgaactcctgagctcaagcagtctgctcaccttggcccctcaaagtgctgggattacaggcgtgagccaccatgcccaggtggaaatgtgttttgagactgacttggagaaatatgcccctagctatgtgtcttcgattgaactgtactaacaaaaacattatagattggtggcttagacaacaaacacttatttctcacagtcctggaggctggtagtctgagatcagggcatcatcgtggttgggttgttgatgaaggtcctcttactgtttcacagccagccatcttcttatatcctcacctggtggataaaagagagaggaagcaagctctttcatgtttcttgtaagggcactaatcccatttatgagggctctaccttcatgaccttattacctctgaaggccccacctcctaatatcatcatactgggggttaagattttaatatatggctgggtgccgtggctcacactgtaatcccagcactttgggaggctaaggtgggagggccatttgatcccaggaattggagaacagcctgggcaacataattagaccctgtctctacaaaaaaattaaaaaagtagccaggcctggtggcacaagcctgtagtcccagctacttgggatgctgagatgggaggattgcctgagcccaggaggttgaggctgcgatgagccgtgatggcatcactgcactccagcctggatgacagagaccctgaatcaaaaagaaaaaagaaaaaaaaaggactttaatatatgaaatttgggggaacacaaacattgagtccataacactatggaagttagcttattactgatgacttttgcatttaaggcagttgctttgtaatgaggcataaaaaaaagtcactgctacgaattagtagatataacatatcttaatgtgggttgatgtattttgtgactttgtcacttcttggacaatcattattattttttagaagcacagtgtctttagaactttgattaaaagaactttattttctgagtgttatctacaaagattcatttaggaaccattgtgatcaatcattattagcctatgtgcttcctgagcgcctagagcttgtggcatttttttccctagtgatactgacatgggaccactcacagtgcatggcacatatggcgaaaaacatgctcccatctcagagtcaactccagagctcttaatgagcggtaaagctttgtaagatctgacttccctgctgcctctctcacattcttctgacttcacaccatccacagtggcctctttgcagttcctaggcacaacagttccactccaccttagggcatttgctctttcttctcctcttccagactgctgcatggtagcctcccttgctcctttcaagttttgcctacgtgaaacctcttagaagattcctttcttatccatccttttagatacaactctagttccttgtcctgtttgattcttctttgtagcactcacctcagcctgatcttttatgtagctcttttatattgtctctttctactgcagtagaagcttcaggaaggcaaggctttggctgtttccatcattgctgtgttctcagggcctagaacggtggctgttacataaaaggcactcaataaatatttgttgaatgaatgaatatttggatgaatgagtgaatgcatgcctacatatatattggctgtagaacagcaatgtggtctagttccagagtaacatctcagatggaggaacacagctcacacagaaatgttgatattttctctcttttctctcagacatgcagtcttgtttaagttcttagcccacagcaattcacattaaacttgyttagtgcmccagactcaaactgggtgccactaattcctctgaccaaggaggacactctcttttgtgccatcccattgctgccatcttgtgctcttkgtccctttctttctccctgaagtgtttggtcctgtactactgttcatagcctatctcataacctgggagagggtaatgattgtcctcttcagggctcttgtcctttgtttggttgggtgtaggcaaagaaaagagatataaaatggttgcccatgttggtccagaagttaagtccaaagagaaggcagaagcctgtggaccccacattaatgcccaaatgaagtggatgtctttagttcatcaaatactagattaattggctttttccaaggtacttgaatgatgccctttgttatttttatcccctgtacttggtgctatatgcttctgtaggcctcagagcacttggttttttttccatgtactaactccataatgatcttccatgatattagcacaggctctttagctctgttcatcatggcaggtgcagcacattagcaccaaaaaattagaccataatgcaacaacagcttattgaagacatccataaatatctcacaaaagcttagaatttccttaagacagtaacatcacttctaaagagctttcatctgttacctcagaaagaatgataaaatatttaagacctaacatggttctgtatattataaactatggttatttatgctaggtggctttaaatttatttagataggcaccttttttatattcatacctcacaaatggagccttttatcatttataatgttgttgttgccaatttagtaaatgagatggtttatgagcactgttcatcaatgaaacaaatggctttcatattatttggcacctggttaaacagtgtaaattttacattacctttttgtatgtgctctttttcctccattgtcttgtttttttccttattcagttgttgatttgctgtaagttgagtagccttatttttccccttctctccactcccattcccacccaagatggaggaaaggaagtgctgtccatgcaccagattctcctgtacttgttaaggtgcagcaaagccctggtgcctgaggaggagattgccaatatgcttcagtgggaggagctggagtggcagaaatatgcagaagaatgcaaaggcatgattgttaccaaccctgggacggtatgttctggtgtctgtatattcagaggctggaggaccttcttttccagatstgaatgtttcatgaaaacagtaacagcacwttttaaaagttttaggtagtcactgctcttgtccttggataatttttcctttaaatatttagtaaataagaaaatattacaatttaggcatatttggtcgtaaattcacctaatttagtaaatttattctacctgaagataggtacatttttaaggcttttgaygcatgttgcagattgctttccagaagggctgtaaaatttgtactctgggagcatatgagagcaaccatatcttcatgctggttatactaagggaatttgatgagagttggggggcgggaaatgtcttagttcagttttgtatttattttgatttctaaatgtttattgcccattcatgttttcttttgttaattgcttgttaatatcctttgatcttttttgtagccttcttttttattgatcctcygccataattattataaatattttamatttctttgggtgctacttaagttttttgttttaaaattagcttttaatattcaattttagaagtaaaaaatgcaaacattaaaaggatataattaaaagaaaactagttcttatataaagacataacattttctttatatcaatttttttcttctaaattagtgttactgtttcataaaatagttatatgttggcatcttataaggataaaattttatagaaatgaagaattaaaatatttccgtgaaaataaatggaataatctacttaacaaagctgttgttttccaaaaagctgccaattgcttaatagctttgattcataaactaaaaactctggatctactttttgtagcatgacagtaacatctgcacaaacaaaatgttgctatttgcaaataaaacattctggctagtatggattcttttaaacaaatccagaaagtaaaattgtttaataaaaatatgtttaaacataaaacatgtttaaaaccagaaaatcgtataatttttactgttatactgttaagccacataattattaaagtaactttaaaagaaatatgtaagtaataacactctcagagtaagactgtgaattctatttttattcttaaaacagttgcatatattgatattccctctgtcacttttcatgctgagtcagaggatggggcggtggtggtggcagatgtccagtttcagctgggtggttccacttggagagttccatgttctgtggtagacacggggggagcacgttcaccctggacttccttccatggtatagttacgttttcctgaaatctagaatcagctggagagtttaaaaaaaaacttaaggataccctggcttaaggatatagctaccttatatactccaggcagtgaggcccagttttctgtagttaaaaaaaaatcctcaaacgtttgattttctcactgcttgtttttgagccagtggcatagatgaagtttatgatcaccatgatcatcattcaactaatttgtcaagggactactatatgagccaggtgctagtgaagttatatgttaggctggcacaaaagtagttgcgggggtctgccataccgcaactatttttgcaccaaactaatgtatgatgcttgcccaggtgaaaacccaaagaccactaacatatgaaaggagtctttgatgaatggttgagccaatggatgcatcaggaaagcctctcattttaggagctatcactgggataggcttgccaggggtgcttcctaaacagtaagatctctgaggaattgagaaattgtagaaattattggcatgattaactgtgcatccttgagatgctgtaaagccagtattaacaacatgaagtcagacctagtcagtatgaaagatttttattggaagtttcagtgtcaggcttaggaatgtgttgaagttaattcttttatactgtttatctgaagatatgcttaaaggaggaaaaaaatcttgagaattcagtattatgaaaacatcctactgagaagtgtgcaagttactcatacgacaaggtagacaccacactacatttcatcctctgtaggacttgctttgaaagattgcaaaatggcaagaatattgggaaatttattaaaaatttcaagccattatggtcactttaaatactatattgctgcagaacttaaaagaattaatcttccaaggaatacttttgtcattagtgacttttgtcattttttattcttaaacaaagatggcataataaatgttatagggtgtagccaaagtctagaatatatttcatttcctgctccctcaacccctgccataaatttagagahactatagatattttaaatcactgtttcctgtgttggtaccatggcatggtgtttaaaatcacagaaacatgaataattcaatagcattctattccacagttcgcattctaaaaatgtatcctgctgttttgttgtacaaaataatgaaagtaattctttgaccttaaatagcacgttgctactgttgatgggcatttaaataattttataatggattacatgtgaacaaaatattttccattttcaaattttgagagcagagaccaacttttcaagaagctagtgacattttgtttgttaaatgacacttaaaaagtttgaggggttttttttttgttttgttttgttttttgagacagagtctcactctgttgcccaggctggagcacagtggtgcgatctcagctcactacaacctccgcctcccgggttcaagtgattctcctgcctcagccccctgagtagctgggactacaggtgtgcgccaccacgcccggctaatttttgtatttttagtagagatggggtttcactatgttggccaggctggtctcgaactcctgacctcgtgatccacccgccttggcctcccaaaggtttgagtgttttaagtaatgtgggtgaattcacccaagtttatcccttttgtcacctcattgaatatttgtcagatggctggctggtatcacagttgtaggtagagtgaccagtttgtcccagttgctgagagatttcctggttttagcattgaaattcctctgtcccagggaaaccaggcagccaaccagactctaattgttgggcattgttgtgggacagaatgaagattattggcctctgtgtgaatcagttttaacagccttagcctccaaagcaactgagccgcagactctacagtgtgctagtgaaaactgaatctctaattgagactgtcctgagaggtgattataaggaaggaggttgctgaaacctgttctctgtgattttaccatcttttcataaatttaagctttcaagatgaaagccatttcacaaatgatccagaaggaatgagccattcacttcttcctttattagacatgaagaaaaaaatatgaggctctctgttaaaatacacaaatgtcctacatggacataataaaagaagcttaactatttggcctttgcaccactatactttctaacttaaagatgtagaattaaaggaatacataagatccactgagaacaagtgagggaaaaaacttaaatagaggcatctgtgcattctgaaatgtgaaattaaagcagaagaggctctgcctgtgatgtggaatccttcccctgtgccttcagagaggttaaggaaaagttatatctgactaggtgtccttttaaaagtttaatttttaaaggtttctatgtggactgcaaaaaaggacaaaatcattgttcattatgccaaatggcataggctcatttacaaggatgacattatagtttttagatagtatagctgctgtaattaaagggttttaaatgaccttttccctttggggacaaggctttcctggaaaaaagtccgatttattccttccctacttaggttaaagtcaatacataaagacttcttatgggaataaatggctttgatttttctctctagaaaccaagctctgtccgtatcgatcaactggatcgtgaacagttcaaccccgatgtgattacttttccgattatcgtccactttgggatacgccctgcacagttgagttatgcaggagacccacagtaagatatttctcagtgtttgtcttagccaatttcaccttctactaacagccaaattagcagagaaataccctttagtggatgtttcctttttaaaaattaagacctgaaatgagccatacttccaatttagattacccaaatgaaacaattgtggtagctcctgaagaattattttctgtacatatttgagtgcaagaaactattattcaatagaatatttttggcaaacttggtcaacataagtccttgtatgtttttaaactttaaggaactttttctttattcatccttataataataatwattattttttattttttcagtgccctctagaggaaagtagcacatattggttcctagcactgccgaatttatgcagagttctctttttgggggcatcttaagagttcaagatcacatgcaaagtcaaggttgtgttggaagtaggagccgtgacttctgactcttaggattgatgtaactttccacgttttgatttttccaactggcatgttagtgttttctgggagaagatttaggatgtgtgggaatggagatagtaccattagattcttcgggactgtttggatttcctaccttgctaaacacacaaacagcttcctgacttwtttttttttttttaaaaaggattcatagtgggagaaaagggcatgggagattttcaattcataaatacagttctggctgacatatattagaagaggctaaagggttttgttcttttttttccccctttggataaaagtatgaagcagtgaaccaggcactgtgtaagtacttctttctttcctccattctcttaaaaaaaaaaaaaaagttttcaaaaaaggagaggcccagctaaggccaagaaaggaacagttttaatgtgacagaaaatctttggaaaatcccttcttgtcagaaaaatgttagtagaatgtgatgaggctctcgtggactctcagatggcaggactgtgaattgataaaggactgcatattcgcttcatttccaggacgctttgacagtatcctttagactggtctaggttatcacttatttggctgcaacaaatatgcttatattgtcatggtaaatacaaattggtatacaccattagtcttttatcctctccagtggacaaatggatacagctatgtagcttgggttttggcacaaatggggttctctattctaatactcttcaacttatatttggtataagtagttcagcaactgacagtctccctaaggaaggggtctttctttcaacaaatatcagaaagtgtatatttaaataaaatctgttattttcaagaggtaacagtgagaaacaggatgattcctttggttgaggtgtttttgtgtctttggaattctttccagagattcattcatatagtcacacctcatttccaactgaaataagcaataatcaacttaatcaccaggttccagttgactcttgtccatcctgactctcagcctcaaagtcatagccttccttagaatgatggctttctgccattaagaataatcaaaagaatgtaatgtatgatttgaagaggcctcttaaaataactggttttgttgcattttaggtttacctcctctttacctgagatgtttgcctgtccttttccttaggtaccaaaaactgtggaagagttatgtgaaacttcgccacctcctagcaaatagtcccaaagtcaaacaaactgacaaacagaagctggcacagagggaggtctgtatcaaactccattccttggtgattaacgatgatgtgcttcaggtttatttcgtgattgttgtatcacactatacttctggtacaagatggaaaaatatttttttaaaaaaatcatactttaccctcctccccccattattatacgaattgattttaaaaaatcttttaatatttaagagagcctttttatccctgtattagtctgttttgcattcctctaaaggaatacctgagactgggtaatttataaagaaaagaggtttatttggtgcacgtttctgcaggctgtacaagaagcatggcaccagcatctgcttggcttttggggaggcctcaggatgcttttaatcatggtagaaggtggatggggagcaggcacgtcatatgacagaagagggaggaagagagggaggagggaggtcccagactctctttaacaagcagatctcacatgaactcattactgtggggaaggcaccaagctattcttgagggatccacccatgacscaaaaacctcccaccaggccccatctctcacattgggtatcatatttcaatgtgaaatttggaggggccaaaacatcctaactgtatcaatccctaaaatgccagtttcttaatggattattaccactgggaatcaaacatatcttttatagatattaaagcttaaatttgttgaatcagccttttatctttaatttggttgcacattatacaacattgggccktactcagatttcttggtcttaaagttggaaaagattgtcttccattggtctgccagtttagtatggtaaacttattttgtaaggtttcatatcccaaattccatatttccttactaatgggtagtattatccctgtaatccaggataacttacgttttagttttaattataagaataaacggtttcagtatcaacatagattattgtctcagggaggttttattctgctggggttgtgtaagagcaaggctttgaagctggaaaaagtgtttgaattctggctttgtcacttactgtgatttaggccaatcagcctgtttataaaggagggaactaaggttgagaggctgactgaagtgttcctccgttggtgcactcaaggaaaaaggtagttccatgaacttctgaaataygccatttaatgggcctcttgtgctatttggcctgtaaaaggaacttaatcaatagtgggggtgggggtggttcctgttattaygaattcctatgagattttgattcagttgcatgcatgcaaatatacaattatttttacaattatttgaagggccgtgaaagggaagagttagttcctaatcatgtctcacaggtgatattttggatcatagtctttttttatataaagtatgccattgtagcaagagtttttataagggtttgcaagttagaaggcaactattagaattatgtgggtcgcaggttaatttgctttctttcttagaggtaaatacttaacatgaggcttgataaaaattttacatgctcatttcaaatcccaaaccacattttgcttcctttatcaatgaaagggcatattttgttcaaaaataccagaatggtagatttggtttagagtttttcttatctagttgccaagaaaggctgggctgtgttataccccaagctttgagcattccagcctccattttaaagaaaatattgtaattttgtatgaagaggtttgagtatctgaatgtaggggtaatattaaatgaatccaacttattttctaatgcttgatgtttggcttactattgctttatagcagttgtgttactcatcataatgaattcttttctaggaagccctccaaaaaatacggcagaagaatacaatgagacgagaagtaacggtggagctaagtagccaaggattctggaaaactggcatccgttytgatgtctgtcaggtggggagacttctgaggacacagttatgcccatacttttcttcctttaaaacaaatctggtactgagggtttcttaattgagaatgttctttagaaaatactaccttgagactaaatggaatatcaactataaattgttttctattatttggattttgtttttgttgtctgttttgatgctggtgtgtgtgtgtatgttgtatttgtgggtgctggggcagggagaagcttacttagtagtgttcagttcagtgtcttctctttggataaaggtaagtctgtcctcatgcatctgctcatgcatctgcctgtttgcagcacatgtataggtgcttatacaaaagagataatccagcagccatacaagcagactcgtaaagtgtatgttttctagactgatgactcaaatttacattgcaatttatattgcagagaactgaaggcattaatgaacagaatcagtgtatacttcatatttgaaccaaatgataatatattttccctgggtgaacgcaatagagtaacatttctgctatatgtaactgactgactaataagcatttttgtttttcctatgggtggaatttatatgtgattaaagatcccctaaaccaacatattctgttttttcacttgattcttttgtcacaattgatattggatgaagtccatgagaattacagtaaaggaaatgagtactcaggctatggttaggtaatgcagtttgctgtgttcagccttttggaagaatacttccaggcttccatttatctgtttcgatggtagcatgtgtygcagtaagttcaagcagcttactcttagctcttcttagtgttcatttcatcataatgaattttttaaaaaatcagtgttggcttttaattattatattgactagcagggtttaaaagtattgctacacaatttatttactaagtgacgtccaaagctaactatttttgcattaagatgaactgctattggtgtaatattgccctattttcagggtaatcatctacagtggtagccagctattttcaccaagtctacaattattttaccgattgacaaatatcttatgactgtcagtactttcagatgaatattttacttccattgattctctctcagggccatttgaagccgtatcacctggtttttctgtttgtcagtgtttccccaaaaccaatgtaatgtcatccaaaggtggacatcatcagaccagtgagcagaatcctagacagtttgctccaaatctgatgatctcagtgataagtcagagttgattgtctaagagatcataaaactgttgagcattaagaactagaaggcgccttccagaccttctagttagtagttttgaayttgtgtttttggttaacttcaaagtatttttttttcatacaaaacccttctagagccattatttgtaaaaagataaagaataactgcctgattgactagtgggagatgggagtggagacagtatcctgttttacttgatttctcccccacctcctgtagcagtccctaaggccactgaatacagtatcttttttttttttttctgaagcattgagccttttttttttctttttgtgaagcaaacaagagtgctgaattatctgttccagtacagtttygtattcttcagctatatcacaaatgtccttcctctaccctcagctagttgagaagcagctggaggagtaagtgatcttgtctcttgctgtgtgatatgctatattctgtttcgaggttggtaggcaaaaggactcactcagtttccttgcctaactggtggaagaaaagggatcccgattaaactcctgcaaaggtgaatgctttatgatctaataaccgttcctccctctgtagaactctcactcttccagagagaactgccatctgtttagaagccatkcttccattctctggtcctctgaatggaagtctttttaagattttgataaaattactcatatgtaaatgacttgataaagcatgtaaattgttgcctatgagttcatatactgaatacagaaggaattgctttatggtttgtaaagaaatgtctgcatataaatgaatgaaaatgagccagcaagctacctgagaagtccatagaagcggaagagaaggaaatgccacttacacagtggcaacatgggggctgagagtgaactattaaaaccaaaaaaccctgtactttggtgaaatagtaccttacacaccaaaatcaaattatcctggatgcattatttagctgtcaaggttagatgaacagatgaagtatctgtttattttgacatattaaatattwtttcaccatcagtgaatattcttggggttgtgaaagtaaattgttaaccttcattgaacttaaaacatcaacatatggaaatttggaggtgttcatcaactcattcatgacacgggagcaacctagttcaaacttaaaaaaaaaaaaaaccttacagtaaggtttaggggaatatgatttaggggaaaacggcaaaagtaaactagtgtagttgactttgggctcaaaataagtatttttgcaacaaatattttcattatgtttatgtatacctttccttgttccagaatgaactggaactggtaactgtttgaagtggtaactgtttttatgaatgtgggaataaataaaccactgactatgcaagccatgggctagtcatttgaaactcccttgactcttctcactgagctttctcttagtctgtcctattgcatattaatggtcagaaagtcttcctttctacagatacatcttacagaaaatctttgacaagtagagaacttctgggtacattttaactaagagtttttgccacagttgatacgttagctcttcctggaatttttatgttttaaaattctcaggtattttacatgcatcacacaaaggttctgaacagttgcccttaaattatcgatgtttgccatatattttgtttgaatttttttaaccttgaaattccttcagtggcagcaaagccattccctctagttttgttgtaaagaaatcagataaaatgttttatcatgtagcattaatgaccaaacatctatgaatatattttggaagctgttttggtcgtatttttaggatarggtagtctttttacgtccttaataaatgtttagtccagtgcaggtttgtctagtcacaagtcgtatatgctaacattttttattgtttatttggcctttactttgttcttaacataaagattttaatgaatgtttaataaaacctgtaattttttkagaaagggaccaacagtgtttttgttgttgttttttgccagtagaattggctgtggcttacaatgatatttaatttcttatattagaataaatgttttcttttgtgttttcctcacataagctggtggcatatcataatgcagtttaaaacctccaaaataaaagcatttagtatttttggtaatgaagaataaaaatctaattgactgggaaatagcagttaagtgaatttatacactgaatactttgaataattttatgattattcaaagtctttgaacagataggctcataatttttacaagaaaggatttatttaaaatccttggtagtttttcctctgtgtttggtagttcattgatatagaacctactgtttttyagtaataattgctagtaggttgctagtgaaagccttgagatgctatctggtttctgcaggagaygaaaccattgygttaaatctgagatggagtgacctcagtaccagcatctccctctggaagtacattttccccaaccagagaagytaccaaggattgttaggagattagaaaattctacctggtgccccagccaatgttaagaggattgaaaacctaggggtgggtgctataacttgtaattatrtgtgaaccgaatgtggacctgtcactatgtttgtagataaattgttgaagaattttttctgtgttgctgcttgttagagtgaattctgggtaatatggaagaaaaaggaatcaaaacctgaatctgagtctaaaaaattcagcataatgactcagaagaggaagaaaagcaacatgctgcagtaagacctgtattttttaagaatagggtttcacacactgaggttaaattggtatcttctgtagagggaggcacctggaccctatgctatactgagaaggtggtccatggaaatcaataaactgactcagaagacatgaaaaaaggagcaaagaatttgcaccatcacagtcgcatcaccagtaggagactcatgccaaatgcggagacattgtaacttcttaaggaaaaaaaaaggaagcacaggtgcctggagaactgttggcctttgaggaaagctgagttgtggtggttggtatttgtattgagtggacagagagctgtatttggactaattaatgaatatgctgtcttcctagagtggccatctggaatgggatggaaggctgccatgcattatcaaactatctgattctcttgctcaatgatttgtcaaggaatgactcaacagtgaaaagtaacatctctagagattcagagactttggacagcaagttgaaggatgtattttctaaattagatcttgtagcgggggaaggaggaatgtctgggagggcaatggcttcatagttattgttaacaaaggaattttgatttttagtctgtatgagatacttgattttttaattggagcgtagtgctgcttgtgaagaaaggaaagatttgtttaaaggctaactgacctgagagagattttttttttttttttttttttaagacatgggagtcttgctgtgttgcccaggctggaatccagtggctatttgcaggtgcaataatagtgcactctggcctttttgcmttggactcctgggcttaagcaaccctcctgcttcagcctcctatagctggaactacaggtgcatgtcacctcatctggctagtattatattttattaggaataatttaaaacatacaagatgcaagagaaaagtataatgaactctgaactatcacttagcttcaactgttttcagaagcatttctgtaatatcatcaaatacctagtcaatgtttacatttttctcattgtctgttaaatttattttagtctgtttgaatttggatccatgtgaaatctatacattgtgattagttgatgttgtttaagtctctttaatctgtaggttctcactccatttctcctttttttcccttgcaaacatttgttgttgaagaaattggattatgtgtcctgtagagttcctacagtgtagtctgagttttgctgattgcaactttctggtgtcatttaccaggtacttctgccccttgtgtttcctataaattggtagttagatctaaaactgcactgcccagtatcactggttgcatgtggctatttaaatttaaattaattaaatgaaattaaaaattctgcctctcagttgccctcaccacactttgagtgctcagtagacacatgtggctactgcccattacaacagcacagataataggatatttccatcatcatagagtgttctgttgaatagcactgaccagatttaagttcagtttttttgcaagatattttcatagctggtggtgaggactctctttatttgtacgtgacattattggtcactgatggatcgttatgtagacccagggtctgccaaaatgatattcaaattctgtctttcttcatttattacttaaaatacttttggaaaaggatcttttcctcatcaactatttgattaccctgagatgaagatcctgtgggacagcaccaaaaattactcatttgatttattccataacatacaacaagtagtcccagattagcaatttaacagcaccaccaccaatatggtgatggaaaatagttgcttgtttgtttgggagtacagatggtctttgacttacaatggggttacatcccagtaaacccgtaaacccagagtaggttgaaaatatcataagatcataagttgaattttcagtttatgataggtttattgggacacagcatatcatcagtcaagaagcatactgaattaatattgtttacatgtcattgtaaagtcaaaaaatcgtaagtcttaccattgtaagttggggactgtctgtgttcatttttgtctttgattatctatagctgtatctcactggggatttacactcaattttctgtatccygtggttatgccacaaactggatacacagaattcatttgtttcattttacttttgattttaagagttccattgactgactgacagattgattgagtcagggtcttgctgtgtcacctaggctggagtacagtgacactgcgatcatggctcactacagccttgaacttctaggcccaacacatcctcccacctcagcctcccaagtagctgggaccacaggcatgtgccaccatgcctggctaatttttcaattttttgtagagatggggtctagttttgttgcccaggctcgtctcaaactcctaggttcaagtgatcctcttgcctcrgccacccagagtgctgggattacagacatgagccactgtgcctggcctaggttccttttaaaaatgaaagattgttttataattatgtaaaatgtttacatgactctgyaatcagatttacagggtcaagtgtactttttttaagtctaacttctatctctgttgcttgtatccttttcttgccacccaccccggacaggtaactatcttttaaaaatggcttgacctggctacgcacgcagtggctcacgcctgtaatcccagcattttgggaggccgaggtgggcagatcacctgaggtcagtagttcgagaccagcctggccaacatggtgaaacgctgtctctactaaaaatacaaaaaattagccgggagtggtggtgtgtgcctgtagtcccagctacctgggaggctgaggcaggagaatagcttgaacccaagaggcagaggttgcaatgagccgagatcacgccactgaactccagcctgggaaacagagtaagactccataaaaaaaaaaaaaaaaaaaaaaggcttaatttcctatttttatgaaagcaaatatatatgtgtttttctttgttttcctctttcttgtatgaatggtggtatcttacacttttctctactgagattttgttcacttaacaatgtgtctggaccaggtgtgatggctcagaccttaaattccagtgctttggaaggtcaaggcaggaggattgcaaacttagccaggtgtggtggtgcacacctgttgtcctagccactaaggaggctgatgtggaaggatcacttgagcccaggagtttggggctgcagtgagctatgattgtactactgtactccagcatgggcgacagagtgaaaccctgtctctaaaaaacaaaaccaaaccacaacaacaacaaaaccatgtgtctgggagatcactctgtagtaatatatagagcttattgatatgtttggctttctgtctgtcaaacagttttatgttagtggttactatgaaatccattatattggctttgttttttcctcttcatatcctttgtattcgggaaggcttgtatttttattctaatgattacctttatactgacaactttatagtataattacatttctcccttacttctcttcctctctctgtgtgtgtgtgtckgtgtgtgtgtgtgtgtgtgtgtgtgtgtgtgtatcttgttgtcttttagtaaaaatagcttctctctgcttcttcccataatcctctctctcacctggcacctaatttgaagtgatatccttttgttgcaagttaataaggcagacagcaacctcatcctactctttatgtatttcttattctccccttgttttctgatggttgtactaatcaatgttagaatgtttaattatttcttatattgactcacttgtgattatctaccaataaaaatatatttgcaagtaatcatcagatcatgtcattatcaatctcccacctccccttttttgtttgtctgaagctcattttctaaaacattcctcaagaagggcttatagaaacagtggtccttgagtttctgcatgttcctcacagtttgcctgtggcctttgttttaacggtcagtttggctggatataaaatctgtggatcccattttctttctttaatattttaaatacattctcattgttttctggcataaaacattgctgtcaaaagtataacaatatggtcaggtacaggtactcacaactgtaatcccagcactttgggaggccaaggcaagtgcatcacctgagctcaggagttcgagaccagcctgggcaacatggcgaaaccctgtctctacaaaaaatacaaaaaattagctgggtgtggtggtgcacacctgtggtcccagctacttgggaggctgaggtgggaggatcacttgagcctgggagatggaggttgcagtgagccgagatagtgccactgcactccaaactgggtaacagagtgagaccccgtctcaaaaaaaaaaaaaaaaagtgtgataacaatatgagtttaagtgacttggtccttttatctgagtgcccaaaggattttttctttttctttagaaaccaatagtttactagaatatgtctcagctcttgtctcagctcttttcagttaattttttcaggtatgctgtatatactttcagtatatactttcaagttgtcttttatctcaggaaattttctttttcttgtattacacgtttcattattttctattattttgatttttaaagtactccacttatatgcatcttgtattttctttgcttctcttctggatctatcatgttctctcgaattcttcattcaagaagtagtaattacttcttgcatcttatatcttcttataagatatatgcatcttatatcttttttgcttctcttctggatctgtcattttctcttgaagtcttcatttctatttttcaaaagcactattcattgggctgatatgattttgtgttccttcttgtttaatcttgaaatgcttatctccttttatgtttctttttcctgagttttgtcacttcttttcaaatcttcctttcctctaatctcatttctgaatttatgtaatatttatttgtaatttttgttaatccttctattgttttagtaatttcttttcttatttcgaaggttattggtatgtttctctggaatttttttttttttttttttttgagacagagtctctctctgtcgcccaggctggagtgcagtggcacgatctcggctcactgcaagctccgcctcctgggttcacgccattctcctgcctcagcctcccgagtagcagggactacaggcgcccatcaccacacccggctaattttttgtgtttttagtagagacggggtctcaccatgttagccaggatgatctcgatctcctgacctcgtgatccaactgtctcggcctcccacagtgctgggattacaggtgtgaaccactgtgccgggcctctggaatgtttttattatcagcaaggatgttattctactcctcttcttagaaaaatctttgaatgggatttgatcgtgattcttttctgttgctgtttaagaaacttaaaaattaaataaaccaaatgaaatagtttcctgtacttttagaaaggaggtataagccaggatagtttttcatggttctggagctcctcctcctgttatttttgcagtgataaaagaaataatatggcttcacactaaaatctgccccctctgcttttgtctggrcctcctctcttttgcctttcgtttccctctcttgcgaaatgtggctttcactcccaacactttctcctggttgtagggcttctaccttgcagggagcttcagtttttgtttttttgtgttttcagtgtttgtaggtcccaggtgtcttaagcatagttaaactgtcctcccgtattcactcagtgaattagattcggcagagctctctccagtttgggttatttgcggtgaacatgtgttgttaattttgagtttcttccattatcagggcctgtgcctctcttctctcacacagatgctgagacatagctctttctcctcatacactcttatttagggactcaagagggtgccttgtcatttagtttttatgtagataatattcattggtctttcattttgctagtctagttgctctatttttatgggagaatttgagggtttttttttttttttaattaaagcagttggcagacataaagatgccagacataaagatgattgtatttttatattgcaaagattgatacttttaaaaactgagttagaaatttaaagtcttgtaggtaacattgagacttgatgtctgggattcaagatggacacgggtcatctatacccttccaaggtactcacgaaaggkttatttggaaggagaaacaggctttgtttggagcaggtttagaggaagtggttaagggattcaaagctgttttacatgagaaaaggttaaaggaagcaaggaagtaaagtgtaggttagctaaaacaagatgtggaaagcctgccattaaatgcattttgtttctgagtagaactaggattaaagggataaaacttccaaagatacagatttgggcttaaagttaatagtaattttcgggcctggcgcagtggctcacacctatgtaatcttagcactttgggaggctgagacaggctgatcccttgagcccaggagtttaagaccaacctgggcaacatggcgaaacctcatttttacaaaaaaacacagatattagcagagtgtggtgctgcatgcctgtagtcccagctactggggtttggtggctgaggtgggaggatctcttgagcctggaaggtcgaggctgcagtgagttgtgattgtgtcactgcactctagcctgggtgacagagtgagaccctgtctcaaaaataaaggtaattttttaataatcagcaaactctaaagagggttttattttcctgacaggcagcgattcatctctcataggaaatattaaaaaagtaaacaattcaccaggttgagttcatgctttagaaaggcakttgcactgaatagtcttcatgtcctaacccatgtcctatccaccttgagtttttagcatcaactcttgagcttcctgcagtttaaatgtctggaaaactattagactttggttgtgcatgttgtttccatattgttgtgtttatcagcacagcacttataaaagcaaagtggataaagtgccrataattcaaatcctaatggcatatttctagctttaatggcaaaaacaatgtctttaccttttctrtcttccacacatattgtaaggccttacacgtggaggtgctcaattatatacttactgaattgaactggcaagaaagatttttttgttgattagagatcctatttggtagaatgaatctttctttataagttaataacataactaatttctatagtttcaagcaaatccattttcatgtatttttaaacaataccagcttaaaacacttcaaagactgaaataatataaagcatatgtcaatcattctgtgggctgggtccatcctccaggttctgatgaataagaatgactccttacattctcttgtgttcttgsgaaatagtattaaggaaaagaaaaagatatgacttccatgaaattatctcccaataaggaatttatagccaaatgaaaagggattgaaggaaaaatttaaattctgtgtccttgggtaccttaactatactggtggctttataaaaattgtcttcagaatgttagatcattaaatgtcaaacttagggtggcatatctggttgagaagctcttcaaggatagtcgtgggctttaggggtttgtgaacccattaaacttgtgtacaacttttgcatgtttgtgcacagggacatttttctggggaaagagtcattttccttggattcccaaaaatatcttgaccctaaaaaagtttcagaatgaatgaatcctaatccattcccttttaattaaagatagacaaggaggcacagaaatgcatgtgacttactcgaagctaccctgctgaatactgatagaaccagggctattcctaatggaatgagggctaacaggccttgttctaagaagatttttgtatttcctcttttaatccttttagctatcctcggaagtaggtatatttattattctcattgtgcgggtgaggaaactgaggcagagaggtaagataacttgccccaggtcacacagtgaatgagtggcagagcaggatttagacccaggcattctgattctagagactatatactcttaacagctacagtctctcacagaggattctccagaatgccatgcagccaataagctgtttcaggacttagtgagatggaatttggaatgtgaaaatggttctggcttgttgtaaaataaatgaagtgactttataagtttttataaagttaaacatattgaattttttttttcctagcatgcaatgatgctacctgttctgacccatcatatccgctaccaccaatgcctaatgcatttggacaagttgataggatatactttccaagatcgttgtctgttgcaggtaagaattattctcctgtaaactcacataataacaagataggagtaattcatcttgcaggtcacaaatggtacattgggttctctatcctgggatgtgacaaggattgttagaaacatagttctctccattgctctaccctggttgcctctgctgctttccagcccattctcttacatttatgtgagaccgtccctaaagaaattgactaaaactaaaatttgtcaactctgagtaccttattccgacttttcctcctttatggctctcctttccaggtgctgagtattctaacttctctgaaagatgtagattttttttttcttttctggtacagagtttcgctcttgtttcccaggctggagtgcaatggcgtgatctcggcccactgcaacctccgcctcctgggttcaagcgattctcctgcctcaggctcctgagtagctggaattacaggcgcccgccaccatgcctggctaattttggtatttttagtagagacgggcttttgccatgttggccaggctggtctcgaacttctgacctcaggtgatgtgcctgccttggcctcccaaaatgctgggattacaggtgtgagccaccacgcccagcctaaagatgtggatttttatgtttgtttgcagaagagggcttgcgtcagagatctggaaattcgttttttgtttgttttggccactttaaaatttttttcaatagatttaggggtacaagtggtttttgactacatggatgaattgtatagtggtgaagtctgggcttacctgtcacctgagtagtgtacattacacctaataggtagtttttcatccctcacccccctcccaacactccccatctgagtctccagtgtccgttataccactctgtatgcccctgggtacccatagcttagcttccacttgtgagtgagaatatgcggtatttggttttctgtttctgagttaattaacttaggataatggcctgtagttccaactgagttgctgcaaaatacattatttcattctttttattgctgggtagtattccatggtatatgtataccacgttttctttatccactcatccgttgataggcacttaggttgattccatatctttgcaattgtgaattgtgctgcaataagcatagaagtgcaggtgtctttttgatataatgacttctttttctttgggtagatacacagtagtgggaggaccgaatcaagtgttagatccacttttagtttcttgagaaatctccatactgtttttcctagaggttatactaatttatgtagtttatataaagttcagtgtattataagccttcccttttcactgcatcacaccaacacctgctgttttttgattttttaataatggccattctctctggggtaaagtggtaagtggtatctccttgtggttttaatttgcatttccctaatgattagtgatgttgaacattctttcatgtttgttggccatttgtatatcttcttttgaaaaatgtttgttcatgtcatttgcccactttttaatgggattattattgttattattttttcttgctgatttgttttagttccttgtagattctggatattagtcctttgttggatatatagtatgcaagtattttctgccattctgaargttgtctgtttacagatacttggggagataagatggaaagatcagggcttagaattcaactggatagacagctccctttcctgcttaatttgggatgatacaaagatggtgctcccatgctgagtttttgttttgtttttgttttttgagacagggtctccctctgtcatccaggctagagtgcagtggcatgatcatagctcactgcagcctcgacctcctgggctcaagtgatcctcccacctcagcctcttgagtagctgggactccagtcaggtgccaccacaccagcctaattttttattttttgtagagatggcgtctcactgtgttgcccaggctagtcttgatctcctgggctaaagtggtccctccaccttaggattacaggcgtgagccactgcacccagtttatgctgttttaaagactgaacttatttcattgaaattttagctggccatgactcatccaagtcatcatttaaattttggaatgaatcctgatcatgccaggaattcattatctaactgtggaattcggcagcccaaatacggagacagaaaagttcatcacatgcacatgcggaagaaaggtatgtctggatgattttaagatgtgaatctcctattttggcctgtgttttctgttgtaaattatttcgcctctaggaatggttccctgggtgactctttcaccgtctcatattctagtgcttactgactctttttttttttttttgagacagggtctcactctgtcacccaggctggagtgcagtggcacgatctcagctcactgcaaactttgcctcctgggttcaagtgattctcctgtgttagcctcccaaatagctgggattacaggcatgtgccaccatacttggctagtttttttgtatttttattagagacagggttttgccatgttggccaggctggtcttgaactcctgacctcaagtgatctatccgcctctgcctcccaaagtgctgaagttacagacctgagccactgtgcctggccccacagactcttttataatacttactttgagcaagaactataataagggttgatgagttttttagagaaatttctttttcctatccagtgttttaaataattgtttatcacacttttagacaggtagattccaaaccttttaaaatcacattgagatgagataatttttttctactgtaatatgatggtcctataattcttctatccgtatttacttgtgtatttgttttttattttaaatagggattaacaccttgataaatatcatgtcacgccttggccaagatgacccaactccctcgaggtaaagttgatttttaataaacaacctgattgatatataattcacgtactatacagtttactcatttaaagcatacaattcagtggtttttagtatgttcacaaaattgtgtatccatggccatcatctaattttgcaacattgacattaccccaaagagaaaccctgtactcattagtaatctcttcccatgttccttagcctgcccaatcctaggcaaccaccaatttattttcaacctctatggatttgtctcttctgaacattttatatgaaaggcatcatataaatcagttctttgtgattgtcttcttttacttagcatgttttcaggatttgtccatagtatagtatgtgtcaatacttcattgtttttattgctaaataatattccatgatatgggcatatcatattttatgtatctgttcatcagttaatgggcacatggattgtttccactttttggctggtgaataatgctgctttgaatatttgtgtacagattttgtttggacatatattttgattttgcttgggtatatacttaggagtagaattgctgggtcatatggtaactctgtttaaccttttaaggaactgccagactgttttctgaagtggctgtaccattttatattcccagcagcaatatagcagggatccaatgtcttcacatttttgtcaacacttgttattgtctgtcttttttattctagcccttctattctagtgaatatgaagtattatctcattatggttttgatttgcctttccctcagggctcatgaaattgagcatcttttcatgtgcttattgactatttgttcatcttcttcrgagaaatatctattcagatccttttcccatttttaattgggttattctaaattattgagttatagtagtttttaaatatattctcagatacaaattccttatcagatttgcaaaaatttttttcattctgtgaattgtcttttctctctcttgatgacgtcctttgcagtactaaacttttgatgaagttttagctattctgagtttattgcatttccacacgaatttttggattagcttgtcaatttctgcaaakaagtcagtggggattttgataggcattatgttgattctgtagatcaatttgggaatcattaccatctttttaaaaaatgtttatttaaagtgcagtttgttacataggtaaacttgtgtcatgggggtttgttgtacagattttttatcacccaagtattaagcctaatagctattagttattattccttatcctctccctccttttgttctccaccttccgaaaggccctagtgtgtgttgttctcctctatgtgtccatgtaacctgtggtatttggttttctsttcctgtgttagtttgctaaggataatggcctccagctctatccatgtccctgcaaaggacatgatctcattcgcttttatggctgcatagtattccatggtgtgtaagtaccacattttttttttcgagacagtatctcattctgctgcccaggctgcggtgcagtggcatgatctcagctcactgcaacctccgcctcctgggttcaagcgattctcacgcctcagacacctgagtagctgggattacaggtgtgcgccagcatgcctggctaatttttatatttttggtagagacgaggtttcgccatgttggccaggctggtctccaactcctggcctcaagttatccatctgccttgggctcccaaagtgctgggattacaggcctgagtcaccgtgcctggccccacattttctttatgtagtctatcactgaagggcatttaggttgatgattaccatcttaaccttttttttttttttttttaaatagagacagggctcttgctatgttgcccaggcttaccatcttaatcttaagttttctgattcataaacttggatgtctttccatttatctgtctttttaaattttttcaataatgttttatagttttcagagtatacattttacacatcttttgcaaaatttattctgaagtatgttattcttttttgtgctgttataaatggaatcttttttttttttttttttttgagacagagtctcgctctgtcgcccaggctggagtgcagtggtacgatctcggctcactgcaaactctrcctcccgggttcacgccattctcccgcctcagcctaccgagtagctgggactacaggcgcccgccaccacacccggctaatttttttgtatttttagtagagacagggtctcactgtgttaaccagggtggtcttgatgtcctgaccttgtgatccgcccgccttggcctcccaaagtgctgggattacaggcgtgagccaccacgcccggcctggaattattttctgaatttcattttcaggttgttcattgcaagtgtttggaaatacagtcaatttttgtgtattggttttatgacctccaaccttgttgctcctgttcattaggtctaatagtcttttagtggattccttaggattttgttatttttgaaataatatcatctacaaatagcagtagttttacttcttcccgtgtaatccttttaatttcattttcttaacttagttcccctagctagagcctccagtacaatactgaatagaagtattgagagcagatctttgtcttcctaayctcagtaggaagcattcagtctttcactattgaggawgatgttagctgttgggtttttatagatgctttttatcagagtaaagaaggtctcttctaatcttagtttgctgagtgtttttatcatgaaatggtgttgaattttgtcacatgctttttctgtagctattaacataatcatgtcattttattcttttattctaattgatttggggtgataagccaacctggctttcctgggatgcctcccacttgattgtggtgtctcattcttctcatgtgctgctgtattcagtttggtagtattttgcttaagatttgtgtgtctgtattcacaagagatacttgtttgtagttttcttttcccgtgatgttttgtctagtttcattataatggtaatactggcctcatataacgagttggaaagttttgtacgttagcttttcttattgaatttcctggttttatgagataccttcccatattgatattctcatttatgtgtggtcttgaggcctttgaagaatctgggaatggaatggcctaggtctgtataaactcattaacacagtttgacaactgaatggaagcaaatgcttaatggctgatgaggctctggggttgcttgcaaggaggattatctttgtgtgtgaggtacagcaggttctatttggaaagccagtagaggaaactgcttgagggtggctttgtttttaagatggggagttggaaagtggaatagctatgcttatcattctggggatccagactgagattgattaaaggtgggcagagttgggctggaagtgacagaaaatcgaggcaattacttcagctgcccactggcctccacaaaaattgccagcaatggctgacacggcttccttttccaatatctccttcatatatcaggtttttaaaaaattgacttgccttgagttgttctcttttgaggttatcagaaaccaaacctcttcaatcaagaggtaaaaagaaaagcaggacagagctttaaaattcttgtttgaaaatgatcatatgcccatatacctcactatgatgttctgtgagagtctaagatcagaaaagaatgaattaaaacagcccttaatcacaccctcggggatggtgtgaccatggttttattttaccctgctacattgtaaagtctgtattttaataagtagaattctatatacccatagccctctaacatggctgcatgaacaccatagacatgtacttttcaatgatgaaaatctgggtttaaatcatctttgtctcatcttcccctaccgcagttgttggtatgtaaattgtcttttgataatgtcatttgaaccccatgatttatgttttcttttgctctgttacaaagtagtggctttcttaccrtggcagaagggatgatacctgagaaactgtgtgatgtttgaatttaccattttgaaaatgatattattgacagagaataaacaaataatctctcttgtcctttgacatttggcctttgctgcttgtgttgagagcctcttkccttgaatatgatctttttgctgatgcagagttgaccccaagtgtctgttcagaaagagcctcttggccttgactgccaggatctgctgctagttgactgctatcagctatcagtccacagctgggcacagcttctcacagggactgacccaagtaagacagagctacttacctgggttgtcaaacataccctgtcccttccccgtgtgctgatygtcattgtaaaacttcctctgtcgtgcccatgtaaccttgtaatatcctgctcaaatcctgctggtatttgttttatggaacgtattcttgttcttatgtgcacccataattgtgttatggggctatttttctttactggactgtaagattttgaagggctatggtcctacccatgttttttctccctgttctttgtaactagtgcctttcacagaacaggtactcagtaaataagtattaaaggaaggaatgccattcgtcacactacttttatcccaggctatttacttattgactagaaatagggcagyggggggatcaagaagggttacggtcagcagtttaaatggctgggtagtatctttcttaatctcagttgggatgggctagggtttacaaaaaaggcatgaagccttaaaattaataaataattcttgatagcctggctgcccatgaaaactacaaaataattaacttttatgatgctgttatctcaagcaaatatgccacccataatttttaaaatgtcactgtttaaccacctaaatctgagctgaatagttatatttaattcattcatgcaaattgtgatgaactgttagcacaaaaagggtgtctgaaggattaggcatttggtggattcaagtaatcgacgtattatcagtaagacccttgggaaggagggaccagaagagtagcaatggaacaaaggggaaaaccaagctgccttggtttgatttgattttttttttcttttggagagtcattgctacatataatgcataaaaatctcagccaggtgtggtggctcacacctgtaatcccagcactttgggaggccgaggtgggtggatcacctgaggtcaggagttcaagtccagcctggccaacatgatgaaaccctctctactaaaaacacaaaaatcagcgagacatggtggtggcctcctgtaatcccagctactcgggtggctgaggcaggagaatcacttgaacccaggaggtggaggttgcagtgagccaagatcatgcgacagagtgagactctgtctcaaaaaaaaaaaaaaatctatcggaccaacagagacacatatggactatttgttaatgtctctatatttaaggaaatggcagttgcaagtatattttgcattaaaagcacaataatatatattaaatatatgtaaattccatcaccctaaatgcttcaagttaaattcccaagtccagtagatctgagatctactggatctcagatctcctgggtctgtggcctgtcctccctacaagtgtccaggcagatgcagtgaggtgaaggaatcctaagttgggtagaagttcccactgacctccaaggcaccctctagccctactctgtgagtcactgcttgaggcttgggatgccagagtgcgaaagattctgtgtaccctcactggatttggcctatcccaagatggctttccttggagtgaatggcaccttacagtacttactgttacagggagacggttgtgttttataaagtgcattgaattcctcagacaaaatgtgctgtataaatgttacagttaatctagatttcataatgcctctgttgattcacttcttaaaaacaaatggagtgtttactgctcagtaaacatctcatcttggatcctgctagtatttataaagagggtgattaaagaaagtctaaacaatgaaagaaggaacaaaagatttgctactgctgtgaggactagcagcccactcttcccatttttccagataaaccgttggcttaggaattgtagagtataataataaactaaagtggtatttaatccccattcttatttatggcttattgccagagtttagtcataatgtagatacagaaaaacatatgttggatttgggcaaattatttaataaatggcagactctctgttgaataaatctgtttagaaccatgaccttgtatttcaacaaaatgaataataatccaactttgtggttattaaaaccttagatgtagtttttgtctccatgaaagtttataaaagaaattaaggtaaaacttatgccaatatgacttcagttaaaatagtatatgacttcaagcatatactaaatatgacttattgtcatgtttgactaaatgtcttattattctttaaaaatgcattagacatccaaatatggtttgtccccagctcctttgtccccagtttcttgctttccatgtgaagatttttctgtatagtactttgcactattaggaagaagataaagcctgtgccacagaaaatgcatttttattttactggctcatgaaaaagaatttatttcttaaaactcactatttctttcttatttctatccttaccaggacagcagcttaataggtttcttgaaattgcaggaggacttaggagttaacattgtcttaccattaaatcatgcctctattccttgatgttttctccaagaatgatggcagatgcttttgaagttctggtgtatttgacagaaagcaaaatctcagtattgaaaagttttgaaaattttttttgttaatataatgtgtcatactccactgtggaacttttgagtcactcttggctagtggagtagcgacaaaaaaaagtcctttaaagtctagcatatatttggtaaaaataagaaaagtttgtcttaggacctactactttttttttgagacatggtctcccactgtcatccaggctggagtgcaatggtacaatcataactcaccgcagctttgacctcccaggctcaagtgatcctcctacctcagcctccagagtagctgagactacaggcacgtgccaccacacccagctcatttttaaaattttttgtacagacaaggtcttactttgttgcctaggctggtcttgaacgtctggcctaagctgtctcccacctcagtctcccaaaggattacaggcatgagccacacctggcctgccctttttttttttttaaactaaattatgagattatgaatttgtcagctagacatgaatgtattttctctttctctctctctttttttcatttcccattattggctattacagttgagtatcctttatctgaaatgcttgggaccagcagtgtttcagattatttttggattttggaatatttgcatatagtgagatatcttggggataggacccaattctaactgaaattcatttatatttcatatatatctcatacataagaartatatataagatggccttgaaatcgccttgaaaaccagatgggtttagactcacatagcctgaaggtaattttatacaatattattaatacttttgtatagacaaagttatgattgcaagctgtcacataaggtcaggtgtggaactttccacttgtgccatcatattgacactgaagagtttcaaattttrgaacactttggattttgggttatggttgcttaacctgtaattgctttccagagtgatgttttcacataaattaaaggccataaattgaaaggagggttcagaatcacttattcattgttcacaacctagcagatttttcctattaccttttatttcctgtaaaattccaaaatgtggaggaatagtagggtagaagaataaacttactaatgcgataagtgaaatgatagcagttgtgcttaaatttctaagtagatgattttgtagctaagaataatttacaaatattttaaattttctactatatatggaaactatagggatactttaaatatggaaattaaactggcacacatgaaacagaataatacagatatgatctaattttgttgtaaaygaagtgataagtgttgaagttttatggaaatgagggtgggatggtgggagttagcccgcacccctggcagctccagtacttagggtcggcctcccagttgactgtaggaatgagtgcagtttgggagaggtagcagggaagggagaggggatggtgtgtgcatggtacagttgtgcaggttgatcaacatggacttgaaagttgctagttgataaaagaggggtgggtatgatgaaactagataaagaatggccttgaaagccagatgggttgagactcgacaggcagctgttgaattatttggggagatgtgggttggtgtcagagagatttaagaaagcccctgtagttagtgaggccagcttctgctcatgcccaagcctgtcctttgctgtctttgctcagsscccatgggctctgcgtgtcctccttccctcctcagtgcatccctttggtttttctccccttgtacatccccaaactcatattttctctttcagcagccagccttgaaatagacattaaggttcttttcatatttagtcatccctccccatccttccaacacctctagtgagtgcataaaaccaaagatagtacataaccctttatgtactatgttttttcctacacatacgtacctattatgaagtttaagttataagttacacacagtaagagattaacagcaacaataatagaatagttataacaacatgctgtctgtacaccaaaccccatgatatgcagcttacctatgtaacaaacctgcacaggtacccctgaacctaaaataaaagtaaaaagtaaataaataacagtatgccagcatcatgactcttgtgctttgcgaccattattaagtaaaataaggatgacttgaacataggcactgagatactatgacaatcgatctggtagcccacatggctactaagtgacagcatagagatactagaaaaagggattatcccaggtggaatagggtgggacagcacaggattttaccatatgttgaagaacagcatgcaatttaaaacttatgacttgtttatttctgaaattttccacttaatatttttagattgtggttggccaggggtaactgaaacagtggaaggtgaaaccatgggtatgggagggctgttgtacaattccatacaacttatcatttctccagcctactgtactcccatgcaggtttgtctccaccacttcacagatagcctatcaagggcctcagtgacttcacaggactgaattagtggtctgttctcatctgacttgaatctaagcaacattgggcatggcttaccacttctctcttgaaacacattcttccctatggctggaggataccatgctgtccttgaggacagcatactggcttcgttttcctcctacctccctggccaggtcttcttttctggcttccctcctgcttgacttctcaacttcggcactccctgggttcgttcctgggaactttttttccctctggctgcatcctctcaagtggtgtcatataattcatcacctgaaattctgtctaacattgactaaccctaaagattcattagcaactgtgtcctagcccatgagcagtaggttaatatgtagcactctactggatctctccatttggatatttgatgggcactttgaagttaacatgtccaaaatgcacctcttgcttttccccaaaacctgctttccttttggtcctcccctccacagtaaacggcaccactcctcacaagctacttaagctaaagcctagccattgaccttcattcttttctttcacttagcttccaaatcccagcgccagctatcaatacttattttcagctgtgtctccaaaatgcatcccaaatgtgactgtttccctcctctccactgtgacctccccagcctaagcctcccatgcaggaaagtctccttgcatctgctgcagcctctccwcagtgcttctctgtcctgcactcagtgtctacacagcagccagtgtggcctgttgaaaacctaaatcacttcatgtcatgtctgtgctcaaccaacggggcagtgagagaagcacattagtactgagagagggtgctccattggcttcactgagacacaggaggaggttttccgtgggccaccttcttggtcatttcagccttgtatgtgaacatgagaaaataacagcctgtgggatatgacttcatcatataattaaagtctaaataaagtgtgatctgtgcactgagggagaagtattaattttgatgaggggcatcgggcagggcttcataaagaagataacatttttgctaggccttgaggggtgagtagattttcagtgtggctcattgtatgcgagagagtggaaggctctagggtggcagggagcttggcctgaagaggcacactgagtgtcttaagtgatgcctctttcagagagtgccaggcagttttggagcagggcccaatgagtagataggatagggtaggagtgggtaatgagactgaaaacgtagattacacttattttgaaggacttcagatgctgggttgagtttagagttggagtgatggggaactgtctttaggacattgtatcaaaatagatttttcagtggtcagaaaatccactgaaggcattcttctttatgtcttctacctgatagtagtatggaaatactcacgattgttagtgagatatcaccttgaaggctgtggttcccaggggaaggaagccccctggtagaaagcctgaccccygtgatatgaaggaatgcacccctccttcccattaggcaggtgccagatgcctctaggctaagatggtggtctgtgctcttaattatgaggaatagggaaggtggtttgattactaaaggagctaaccctcatgtgttcttttcttgcgggggtgggtgrrtgggggggagtgttaatatgctgtattaagtaacctttttaattcctattgtaggattaaccacaatgaacggttggaattcctgggtgatgctgttgttgaatttctgaccaggtaattaggcttttttgttttttacaattcctcaataattacattttataggtaacatacttattacattgctttctttgtaattagccaaataaggcattgatacaccgtgtattttatctcttttgtagagcttagaagccacatgtctgtggcycttgccctgataactggcactcactgatgctgtaatgagtgagattacaagatgaaaggctggtgtctctgtcctgtcaagtatatgttaaagttgcttacagccacaagagatcagcttgccttggtctagatgcttcagagcttatrttcaatttgtaaagaaagggatgatattttaaaatgtcatttcatcttctaggatttgtctttgatccctttcttactctttctgatctcaagggaagtaaagcttacaagtaattttaatgaccagattttctagtgtgtgtgtgtgtgtgtgtgtgtgtgtgtgtgtgtgtgtgtgtgtgtgtgtgtgtttctctccagaagtgttttaggatccttaatttgaaagtacgggtaggacgctaggcgcggtggctcacgcmtggaatcccagcactttgggaggccaaggcggrtggatcacctgaggtcaggagttcaagaccagcctggccaacatggcgaaaccacatctctactaaaaattcaaaaattagccaggtgtgatggtgcatgcctgtagtcccagctacctgggagtctgaggcaggagaatcacttgaacctgggaggtggaggttgcattgagctgagattatgccacaacactttagcctgggtgacagagtgagactctgtctcaaaaaaaaaaaaaaaaaggaataggggcaggaaagtgttttgcttttctatactgacacaatttctcttttaaagggagacaatacatgcttctcttggaactctcttgagctgtttttattctctttaggttatttcttttcacaagatggacataatcaggagaagggactcctctctccaggggccacacgtaacacagcccaaggaaaagcatttgtttcactcccaatttttagtattaatgtgtttgctcttagagtgtgtaactgattattctgctctttgttgtcatcagatttcagagaaatcttttaacagaaataaatgtgaaaatacaagtgaatggtgctgtctgggttttagcacattcagatatactgttcttaccatttaactttcaaagactttaatcagatcctttagtttgattcacctgatatccattgcacagctactgtgtgccagccctgtttctgtgactcagagccacagacagaatgtcgtgatgcatatttattcatgtacttctttttttttttgtagcgtccatttgtactatttgtttcctagtctggaagaaggaggattagcaacctatcggactgccattgttcagaatcagcaccttgccatgctagcaaaggtatagaagacatctgcagcatttgtagttacgtctgacatgctcttctgcggtccatgcataattttgcatttgaataagtaactcgttaggatatattaggagtgttaatattttacagaccaggaagtattttttgttgggttttaaggatccagtcttattagttctgttacctttgtgagtttcaccagcagctaatgaactccacagtgaggtaacttgagaacagatgaagaaaaatktgacagatgtgcatgaacagagttaaacatttggggaaaaggaacatgggaacaaagcaaaagaaatgaaatatactgtcttttccctttgtgtagtatttctgtagtacatttgtttttaatttacattaacaagccaaatgatagctttgaacagaatattacagaccattttttatccactaggggtactttctacacctttgagaatcccccaaatcacaaatcctattaagatttagggtttaggctgttcccctagcctcattgacttagctcagtgactaacagaaccttttcataattcagataaatgtgatctgatttgatgtttccatctccatattatgtcttattataataaatcatggctgataagaacattccagtccacactcctcctcttacaaacaggtggccatggacaaattgacaaattgttgttctcttctccaagcctctgctttctcgtctgtaaaatggaaatgacattagcccttggcacacagcctggttgtgagaattaaatgagattatgagttttaatgatgtcatttataaagtgctaygcataatacttgtttatagtaattacacaaagatgttaataattttgtaggggctgtttttattgatgctacccatgttcttgtgataaatccttacatttttatagacttctgggtttatttaatagtaggcagaatggtggctcttaaatccccaagcactgaggatccactggcaaaacttttgtgggttttgcctaaagtaatttgtatcttttcttcattttgatatgaaagtttgattttgatagaaagagtagataaagcccatcctagctttatgactgktttcttaatttgatcttgccaaggcattaattatattcaaaatgtggttaattttagcttatgtgttagcaataacacattgttttattttatgtgataacatcatcattgtagctacagtgrtaggctttgaactggttttagtggcatttgagaaagtaaatattgatgtcttaatgaaaacctgtaagcaaccaggtaagccaacttggttttagcaggctcacaatgaatgaaatttcacaactctatgtaaaactgcttaagtgtttggttgatttaattgtcacaatgcttcctgatcattcacataaatgccactggaaatacatattaataagtaggtagtcactccattccttattgtttttagttttggatgtaatggaatggcataattatttttcaaacacttgtagggaggatatttacaaagtgtggggaattgccgtagcatgaaaacagaagctattatataacccattgggtgctgtacaaagccatgactaatgacagaggtggctagtttctcccttcagggatttctatgtggtcttcttccaccaagcccaaggcttgccattcccatagtactcaacacccattggctgcagcagaaggctgtggcagtcccacctttcttctgtatagaccagtagtccttaaccatttggaagggaagggaattgatggagaattgttgacccctttgagaatctaatgaaagctctaggtcaccttccagactaatgaacattttaaaacataaacagtagcacaccactctatcctttttaaaagttgtactaataccgggcgtggtggcttatgcctgtaatcccagcatgattacaggaggtaagccgaggcaggcagatcacgaggtcaggagatcaagaccatcctggctaacatggtgaaaccccatctctactaaaaaatacaaaaaaattagccaggcgtggtggcaggcgcctgtagtcccggctactcgggaggctgaggcaggagaatggcgtgaaccctggaggcagagcttgcagtgagcctagattgtgccactgcactccagcctgggcaacagagcaagactccttctcaaagaaaaaaaaaagaagttgtrctaatgcgtgcatggaaaaataagaatatagagtagagactagaagaagtcaggaaattcacatcacagcactccagaatacagtagatgtttataagataaaatatggcttgcggtctgcttgcaagcagggctccagagatagcaaacaattaaattttcccagtgaagttgtgaaacagatgaaatttacatattctagtataaactcttgcactttgggatcaatttttaaaaagagatattttctgctattgcatttgcggtagtcaaaactcatttgagtatattttataatcacaaatttcaaacagtataaaatactacagcatatatgtcttatttttattgtctttgtstttttccaatatgaataaatatggatatttaagatacatactgagacacacagaatctatgtcttttgtctgaggactggtggaactcatattgtcctaggctgttcattgacttgtgatttgttccatgttatgtggcatgttattgcttagtatttattgaattgaattacatggtaatggaaatggatttattgcatatttatgcaatgtttgtarctttcttttttatggaaagaattatgatttccatttattcaatctcaggagttgcataaaaaatattctttcacattgtgtctagttctaaaaggctggaattgatttgtatgttgtaatgccatgggataagaaataagcagccacagagatcaaagtaaaggaaaactatgagtaagatagtgaaatgaatccagaggtaaagttagtatacactgacgtattcatcagccctacacctacaactgggctacaaatttggctctaaactcttctgaggccaaatcagaaaaggaaacacaattcactacaaatgctattttcagagcccttaagatcaatccaattcattgcttagaaggtctcagtgaacccacagagagatgagtatggaaacctcatgagggggacacaagtgcagaggggtccccaaatcgtcacaacaaataaaaataaagatttagaagtgtaaggcattttgaagtcttctgagggtcctcacttactctaccacataaaaatctattttgggccaggcgtggtggctcacacctgtaatcccagcactttgggaggctgaggtggctggatcacctaaggtcaggagtttgagaccagcctggccaacmtggtgaaaccccatctctactaaaaatacagaaattagctgggtgtggtggcaggtgcctgtagtcccatctactcgggtgggtgaggcaggagaatcgcttgaacccaagagttggaggttgcagtaagccaagatcataccactgcactccagcctgggcgacagagccagattccgtctcaaaaaaaaaaaaaaatctgttttgtatggtgctgacattgtcagtaccacatgacttgagtcaaagacgtaaaattgactttcagaagtttgtgttaggtttgtaattctctccctaggcatattggatgaacccaggggcttgtagcagagtcttattccagcctgggctagtgcttgatctgaacttggaattggaaagttcagatctgatcaattctgaaccctacttgaactattggagtttgtagaagcctgtttgggaaagaattgagttagtgaaaactgagctgtatgtataggacttctaatgaatgttaaactaaactctctcttaatatattcatggatttgtaaccattacgctgcccccatctcgtctccgcaccaactctctgcaagagatgctgagttactatagttaagattttggcaaactctttcttacgttttgtcattgtgaattttgtagaaacttgaactggatcgatttatgctgtatgctcacgggcctgacctttgtagagaatcggaccttcgacatgcaatggccaattgttttgaagcgttaataggtaatttctctcttcttcaagaagtctactttcttgcatgtctaaacagtctggagagcacataaaatttagtgtggaaacttgggacagaattacttgttcccaaagcacatgaggttcctaggangacacctaccaccttatattatagttatttcagttccttcagagcagtgaacatgcctytttttttttttttttttttttttgcattctactgcctgaattggtgtctggtgtctgatgtcatgtagatgsttagtatttaatgaattgaaatgaggtgagttaatatggagatggattactttccagatttgattcaggatcacatacataaacaaacagattaggttgctgagagactccagtgttgcttttgattaaactatttgtaagatttctgttttaaacatcttgagaacaccacatcttttaagccccacccagggtttgagtctgtrtaactgttattgattcayttgaagcaagactgatgttgacatttcactcctcactcaggcactttacttccttggcttctttttgactgtaaccagaatacaattagccattggtacaggaaagttatgaagagttaattagctggcgactgcaagtttgtatgctttacaatgaaatgttacagtagattgacaacttgatttttttttaaagtaaatgatcaagtacattttagctttcaaagggctttgttcttaccatttttgccctcttcctttgaaaatgaatataaaagcttcccattgtagtttcatgctgatgatagtgggaagagartgtttaataattatccacagtcttttcacagctatgtctgtttttcacaaatatgtctattttcaaagaatttgtcacatggaattactttgctctgtacacataatatttttgacagttggtgttaccattgcctccagaaccagccagacatgattcaatttcctgttccatcatttatcagatctgtgtctttggcaagctacctaatctctttgatcctcagtttcctcatctgtgagcctgtgagatggagatagtatcacttaccttgcagagttgtcataatgatcttaatatctgattctggcagcatccaatccagagcaaagctctacttccttaagctgtccccccaaatcaactaatatgagcctaaatcctgtaagtcttttctaacatcctcctactgaggtaccccatgaaagtgaagataagaatgtggaaatgctttgcatggtacccaggacataagtgtttcccaaaccacaacagctgctaccactgttactctgactatcattgttacaattatcaataaataatgaatgtctttagttgtcaaaagccctggtaactaagtgccttaacattttacatggaaaagtagcctttctgaagacaagtgtaaacatttgatttcaagaaaatatgagtactccattgtaattgatacccagttaaaatgttaccatagtacttcctggttatgattcattaatgtgtttgcctaatgcttaattattccaaattaaaggtaaagcttcccctgatattttgtttgcagatgccttcattgatctagactcgggttttgtctatcaggtttttttttccttaggtatctatatacatttgatctgaaacgtatactataaatgcataaaataaaacagaacatttgctttactaaagtcaagtatttgtgcattgctcccttagtaaggtttatacctttacccttcataatagttgatatttggcctcttttacttacaatattagatttagatgttagtaaattgaatttcatattatttcagtctaatttgtaatgcaaaggatagcaaaaaggggaaatgtcacctttaagacaattgcttctgaacatgttgatttgttttctgtgagtagtttttggcttgcgtttttgctttattatagagatatgtcattttctttgactgttgatggagactctcttttggcatkctctgtttttcatctaggagctgtttacttggagggaagcctggaggaagccaagcagttatttggacgcttgctctttaatgatccggtatttctatggaatcatttgattttttttgttatatattattacagaatattttatttcagctggtctttgtaatttgaagagaatataggagaaacaaaatagtcagatctaccatagatgggacatttcaatacaccaaaatggcttattcaactcttgcagatggaaagttccatggacctttacacaaggagtttttctttggcctgaacctgtctttcctcatggtcacttataaattaaatatgaatacaaatataataggacttcgcttcattttgaagtgtcttgaagctaattatgattttatattttagaatcattgggtatctaccccatgcaggcttagttgaagtgatagccttttggcttttctgtgtatgatttgtttttatgtaaattatgtagactagataaatgtttatttatttttaaatgtcagttcatagggagtttctgatagggctatggataaagagtatgaaagtacttttttaaaagcaaattgtagtttaagaaaaaatgatagattctaaaatagtttctgttgttacttaaatattaagctattaatattgccagagacacctttttaatcctgcatgtaatagagtacactggatgctttctgcaccaaaacaagtcaatttaacatttaaagggggaagcaactctgtattccaaattgaaatgtcattataattgaatgaaatagccctcatggagcaataaagaacacgggaagccagttttaagcctctgtgaaaccttcagcttaaatggctgtcagacgttattactgtattactttgggtagtttttttaaaaaaggatcaatagttttggaaaatatgacctggacaatgttcatatctgagaatttgatttttgtatttgtttttctagagatatgtgatgatttttatggatgaatttcctccttatgggaagattatctacagatgytctgtgtcccccatttttgtcctgcacatataaacacatgtgcatcttgatttgcatctgtatcagatggtgtgtgttttaagaccttttctcaaatcttaaattttctttgttctggccttcaccttttgtgggtcatttcagcaacctctttgctctctttccttcctgcagtcttgtctgtgtgtcccccagcaccctttagactccttcccccayccccacctcctccctgtcctcttctcccatcttacctgcatcccccaatccactgtgttctgttgttctgttttgctgcagttttctacttgtcttctttaattgcatcagtctgtgtttagattcttttctctttaaactgcctctctcccagttgtctacttagtgagcttatcttgtgtttccagtacctagtgcaatgctggcatgtgcagcgtttaatacagatttgttagaagagtgaagtgaataaatgactggattaaaagcagagtgtgaacattatcttacaaacagggtggttgagattcagaatttgttttagtgtgtcttttgtgaaactgcataaggctcacaatgtatggrttttcctctttagcattttgaagtacacaaacttggacactgactcatttgacatctccatattggtttccacctattagttgtagcatgtgagagatgttagtgaaccaatgtacttcttttttgaataaggcatcatgaaagcctaattagccaaagacagccagggacaaacctgtaggcaacaaagtcaggttgattggctgtgttgtgggggtggagagagacatcctttgtgaggcctgggctggtgctgaataattcttaggaggttcttggctgtggccagtttaggagcagcaagagattactttgggattgggtgccgtcccaaggcaagggcagcttggcgattaagtatctgcggtgatccttagtcagagggtcataatggcattttacagcagctgcaagaccttgaggaaaacattgtttcctgttcactttgctgctggctttatctgtgtctgtcttctcagccctgtaaacagcagggctgtttttttctttttcaccctcaactgagttttactctttcagccccagttttgctggttttgtattttggtctttgtgtaacccttcawgtttgacccagtacattcagatccattgtttcattttgattatgttaatggcccgcttagaaagctagagtggtgttaatgtgatttttcctatgcccctgctttccacaccttttctctttacacagctgtcccagtacctctgactcaggccttttctctggagctgcagaaactggaaaaagtgtcttttcaagttgcctctgggcacctcacaggtgtttcacagatacctcatttcaacatgtgtaacattgaacccatcacttttaacccccaaatgtgttcctccttccttatttttatcttctaaaccagaaaccttaggatttatttttgtccctaagctttcttctcctcttatctgatcgattgcaagagtctatcaattctgaccctaatatttcttgaattgctaccctactgctttcatttttgtcctcctcatttctcacttgaactctaaccggctgccatcccccaccgctccagtccatcattcataccacatttcttcttttcaatatgcagatttggttagggcctttcttgcttaaaatctttggttacagcctcccaagctctatatactacataacgtagcatttaatagttttcataatctgtcagccgtttttttaatccctctttgtgccattcactaggaatcacctttttgtgcctatgtactttaagacttattatttgtatgtttctggtgccccgtttttgattctcactctctactgatttgccaaaatcttcatattctcaggacacatctgaagaatcatctcctctttgaagctttatctgacacctccaggcagttttcctaacacttatatgtatatatctcattattatgagacttaccacaatgtattaaagtgcacttatttaccttcattctttctcactaggcctctttaggacagagttaggtattcagtaaaaacatgttgcatgaacaaatgacctgatcagaatattttccagaagagccagctaaaggtagagaccttgcctaaggtccttgagctaataaatggtagcactggggttccagtctagatcttttcagtatatttcccctgacaccaaggtgcagcagaaccctatctcggtgtctatggggtagatgaaaggaaatggacaggtgcattagtctggtcatggggtgttatgctattacaccaagatgggtggcagcagacatgaaaggaggaatcacagtcttgtttcggtataagacatgaaggtgatagaagaaaggtgaatcaagatccctgggaattttgagccttggagactggggttggttggaagaaatagctctttatcattgttgttgttgtcatcattattaatagtagtactttctatgggccagctctgggtttaatactttgagtgcattgctcagggtgtttgtcagagaacagcttgagtaggtcctacaattatctttgtcttaagcttgaggacatggaagcttaggttaagtcacttgccaagatggaatcaggattggacccaggcagcctgactcctaagcctgccgtcttctgtaacagatgctctagtttaaggagaaaggtgaaaagttatcatttgatcatgttccatatggagtaataggtgcccatgtgmtatttagagttatggactgggagcttaggtaagaggtcagtgctgcagcagaagtgaatgagtaatccaaactgaagtagtaaagcactggaaatagtggaattctccagtggaaatggtaatgaataggtcaggcaagggcccgaagtttgataaatgtccacttagggtgaaaggaggaagaaaaaaagcattgagagaaagttgtaagaaggtaagaacaatcaatataatttgcactaccgagatttcaaaggaaagatttctgaattggttaagagaagtcctttaaagtgccccaaagaaagtttgatgtttaaatgcttttaaaaaatattatttaaaaaaccctgagtgtattttattaagatatcagttgtgcaagaaatattaggtattttacttttattaccctgtgtgttacaagtggtactaaattttcctatacttcttcccctctaaaaaaaaacttaaatattttttcctcttaaggaattttttttgttatttatttcagaaatctaatatcaaggtcgggaagtaaattcagtcagaggctccctagagtctgaaactaaaggaaaaacactttagtcctgaggaagttctcattataacctctagatttaagtcagtggataaagtaatatactaggggtttccataaaattcactcattccagtagttcaagtgaacatttgtaatgacccactgtaaaagcatgatctcataaacataagatcttatgaagacgacatggggcgttttccactccatcttaaaatagctcatatgataatgaattagtgcctaaaatgaaggacatttgaaatgagttttaattacaaaaggcacagctgatgcacatttctggacaatggtaagaaaaaaatatgattaaaagagcagcttagtgcagtgtattaagttaaccaaatatgtaacttagttttaaaaggtgtctgacttctgsgactagaggaggctcttttcccccgtagcttaataggctaattagagtcactacaggcggtttgagtggtgaatacacttaaaaaaaaaattagtttgccagcactgttgaatttgccataagtggagtcagtgtctgaaatagttccgtatttcaaataatgacattttatttagtactctagagtgcgttaaatggctcccttgagcattaaaggcatcactccattttccaggacctgcgcgaagtctggctcaattatcctctccacccactccaagtaagtatgacctccctgtctgcagtgagctttataactccagctattcatgttactttcctttgcctttttttccttccccacttttatcttttgattctcttcggtggcattgtgcctttaagctgaggtgtcagacctggaaaactttggaacaataggagaatgaacccatgcattgtgtttatgtggtctggaatagggtagggggagcattgggagtcatcttccctcagtgaggaaggaagagctactgtgtagttatggatgccccaccaccaccaaaaggtgatattgaaagcataaaatgttgactccagtatatctacacacttgcttttgcagggaaagtgttaatagtatggaagcgagtctgagcatactaaaaaagtagaacaaatactaaattaacattgttaacgtatgatctaatctggatcttagaaattgaaagcttcaattcagagtgtataaaacctgtaaattaaaaaattagtatagtgtgatagcttttcactcaagattttggaatttaaaagctctacatatggtggtggcacctatttccccagatggtttaagaattcttactattctttgcctttatttctgttttactttgggatatatgcatatatgtaaacatcatatgtatcctcatatacttatttttatatatgtatataaaataaatgtaagaagtggttgaactctcataagaggctttacagtaagaaatgacattaattcagagtactttaaaaatattttattaatacatgagtgcccaaagttgttgcaaatgttcattttaatcacacttttcatatttgctctctrccagttgttaaaggctcattgttggagcaccacctgtctagtggtataataatctccaatgtacattgaactctgttttaatgatgctcattgccaaaataagttggtccctagaaaacacagtagtaaattactttaatgcagtagtttttaaagggcagacccagaccagcagcatctgcatcacctgggaacatgtcaggaagacggattcccagtcttgattccagacataggaaatcagtaatcttgggggcaggacccagctgactgctgcgtttaacatgcatgctggagtttgagaaccattgttttactagatatatatattttctaccagctgttcttcagctcgaatctccttggagagttagtataatacttgggattttgaactatctgtgtacagtacttggccttgaaatttgatagaagattggaaaatattatttgaaccttctttaaatattagatttgtttgccattcaaagaaatgagaaacgagcttccatgctttattggcatttcagaaatttctgctcatgggagaaggaattttacaaaacactgtcctagaattgatcattgcacttacaaccaaaaatgaaaaaatgatttttatttatttctattttcctgtagctacaagagccaaatactgatcgacaacttattgaaacttctccrgttctacaaaaacttactgagtttgaagaagcaattggagtaatttttactcatgttcgacttctggcaagggcattcacattgagaactgtgggatttaaccatctgaccctgtgagttaaaagttctcatgtagtcccaatgtgaccatttagatgaggcagtcccagacctttggagcatgcccttcgaaggaattgggatttcaaatatatttccaggaaagtcacattgtgagatgggtgagcagacagacctcagtgtggacctggggttatgctccaatccaatgttgttggttccattgtcakgcatcttggtttctctgttaagttttaggagaagtgtgaaggaagtataaactttttcccagcaggacagatactaaatattttaggttttgtgggccatgtggcctgtgtgcagtgattcgactctgccatagtagcatcaaagcagccatcgatgaaatgcaaatgagtgaacatggctgtgttccagtaaaactttattcttagaaacagtccgtgggctggatttggctctctgacccctgctctagatgaatgatttgaaggtgagctagtgaaacaattaagaaaataagcaaaattttacttctttggggttgttttttgttcatttttttactcccctcttccaaaccaaatatttccaactctctttaacctgtaaagatgaaagattcttatcatagatttttttttgttttaaaatttggattccagctttgaataatggagtatgttatttctttttctttttctttctttctttcttttttttttctgacagatctcactctgttgcgaaggctggaatgcagtggcatgattacggctcactgcagcccttgaccttcagggctcaagcactcttcctgcctcagcctcctgagtagctggggactataggcgtgtgctaccatgcctggctaatttatatacacacacacacacacgsmyamwttttatatatatatattttttttttttttttttttttttgtagagatggggtttcttcatgttgccaggctggtctcaaactcctgggctcaagtgatccacctgcctcagcctcacaaagcactgggattagaggcatgagccactgcagccggccagagtatatatttcaataaatttagcaaagaaaagtcttggacctgtttgctttctttcaagattgttgtttgtattatgcttgatttttcaatttatgctcttcagcttctgaccaggsagtgtttaccagtctttattttggcaatcgtttaatccttagataatattcactttattcttctttaaaactcagcctatattaactcagatctcttctcaatcgaggggccttagggaattgtatttggttttgtgctttaaaacaaaatgaacacattgtctttttaagtcattccttttttaaaattctgggtgtttttttggaaatccataaatggttattgatttctttactttgatgtttctttttccagaggccacaatcagagaatggaattcctaggtgactccataatgcaactggtagccacagagtacttattcattcatttcccagatcatcatgaaggacacttaactgtgagttggttaaatcacttcctccaataagattgctgtaaagcagagtgaagattagaggggtcaaatatatatctatgtaattaatttcttactcttagtgactttagcttatcattggctttgttcatttcattgtgcaaattgtatacaaagcacatatgcaatgagagctcattttatactcctttatttactgactgcctactctgtgcaaaatattgagctaggcctcatggaaggaacaaagataagttgacaccaagtctgtttacaaggagcttaaaaattattagaggagattaaagcttaaataaataaccacaaaataaacactgtatatatatcatgagtttatacatgtagatacacactatagaaagcttaagttactataactaaatgcaaggtagaacatgttaaatattataaagaagcctaggtaaattgctgtacttgtgcagtttaggaaaatacgaggtttcttctatctgtggagttcaaagaaggcttcatgggtataatgatgtttgagcctttaaagatagttaggatttagccattgggatttggtgggaagaaatgtctatgcaagggcagtacacacactgggactgcagaacgaaaaggcatggcataaaaaaaatgagaagactgagaggcagtagggacttagtttggttagaccatggcagagttgaaagggagytacagagacaggtttgatttataaacaaagtgaaatggtccctatgcctcttattttggtttcattttataaaacttttgtgagcttttttatttgttgcgtactgtttttactctgtgaaaccaatcaataatatcctgaaatggtgaacaaaacatccagaaggaggtcatgatgatctcttaaggcacaatgagtaacctttgagaagtcccttgaggactggacattgagaaagcaaatactttattgggcaaagaaaaatactggtacactgcaagatacttagtgcagtctgtctttagtatgttgaagcaaataacaagtctttcaaactttgcatctctacagtttttatgtgtgttctgctttgaatagaattggattttatctttgtaaccgtgagtgagccctggaaatagtttatgtgagacataaatattggaactagagagaatatggtgacttggctgtttagatgtcatttttcagtggaatttctaagcctagcattcactcactcgatgagtatctcttgagttccatcataagtgctgaggaatcagcagtactctttttttatattaagtttgattaccatttaaagttaacagtttttaggtggacaagaaagtgtctttttcatgacttaatattaaattcataaactataaacatttttgagaaatgaactatagtatcttactgttcattagaaaaacaataaattgcatgttcaatatcctctgacacttcatacgtgtcagagtatctggttggcccgagaaatggccaaaccaactaaatagtttgaaatagtaattcatcttagggccctatagaggccacttttgaaaatgtttgctttaaatacacacatttcccctggtattcctacaaaattaattgtgaacgctaggatcttatagagatgggaagtttattgtttcccacctgctcaccgtgtacattttccctcccaccccactcccccacccccagcattgaacagtacggaaaccaaaactcagaaaggcatgagtcctgtccatgatctagagaaaggtaaaactaggactagatgagagactctagttctgtgttctttccaaagtcacttcaatgccagaagtgtagttttatccaaaatgtatttaacagccctgctgtcttaatattagaaagtttttgactagcttattacagtgatgttgacaaatgataaaattatgtgaaggctttttgaattatattcacagaacgctttggtagaaattagcaggaccagcagatctgcgggcaagacaaagacaaagaataagctaaatgcagattctaacagataccaactcccattagcattaacatggctgctccctcctccttcttgaaacacaagctttgttggcttctgtcacggtgcactttcctgggtttcctcttacctctttagctactctttctcagcctactttgcagacacatcttagtctcacagctaataaacagtccatgtctaaaatgctcactcttaggccatgttctctttttaatagagtctctcctaccagtcttttcaatgtgtgtcatcagtttcatcttaccggcagatgacttctaaactgatctcttcagtcctgtctcccttctgagttccagccctagctgccttctcaacatctcaacatgtgtaagactgaatttgtagtctcctgcctgggtcctcgtccagtattccctgagtaattgaatggcagcaccacccattcagtgttgcatgtcagaaacctaggagacatcttgaatgcctctctctatctcccttttctgtatcccagtccattcacaagccctgacagtgttattcctcaagtatttcttgaatttatcctcttccttatgagcttttttctgtcacccacatcctccctagctgccttactcacctggaccactgcagtttaatttctgcataactattgatacgttacaagggccaggtatggtggttcatgcctgtaatcccagcactttgggaggccaacctgggaggattgcttgagcccaggagtttaagaccagcctgtgcaacataatgagactccatctctacaataaaataaaaaactagcttggtagagtggcatgcatttgtagccccagttacttgggaggctgaagtgggaggatcgcttgagcccaggagctgtggttgcaccactgcactccaggctgggcaacagagcaagactctcctctctctgtctctctctctctctgtgtctctctctctctgtctcccyctctctctctctctctgtgacacacacacacacacacacaccacacacacatagagttacagtgtgattgatagagacccagttgaaagaagtgatgtttattaaattgcaaaggataggaatctgaaggttgtgttcatgcaaaacataaggcaatgcagcatcttcccgtgagaggagtgggctgctggagtccccaggtgtctcctggatgtatcctaatatttgaaaagcctgcctttgctgttcttacgggcatttttgaactctgagagatggacagcctctcaggcagaaatccttcaagaggcccagatctcaggcctttgtgaagtcatttttgcagcttcctaccctggtcttcctatgtcaactcatgcccctgcccaatccattttacatgctgtagtcaaaggagtctcttcacaacaaatctacgctggcctttcatctacagtgactacactgtgacgacaccagccattcatcttcagtcccatttggttgtttctcttcctctctccacctcttaacattggagtggcccagttctcagtcgtcagacctcctctctgtcaacttctgctccgtaagtgatctcattctgtctcatggctttgaatacatctttacactacttcctaatttgtgtctttggccttttccctttcctttttcttgtacatttgtttaagttctgtgtagattctgaccacttttatggttatcacccggtctgagccactgcagtccagattattagctataacctcccaagtgattcataccccgcgccccmgtcaattttcagcacatctagagggatcatttttaaagagaagccggattacattcctcttctgcacaaaacctcccaaaccttcccatctcaagagtaaaagacaatgttgttacagtcaccttatatgaactggctccctgtctctgtttttcataagactcttcacattggcctgtatgccagttcctgcaggacactaagcaagcccttgcctcagggcctttgcagtgcattttatctggctgcagtattgttctcctggtaatctatacggccaaatcgctcacctccttcaggtctctgttcagatgtcatcttatcaataaggccttccttaacctaccctgaataaataggcaaccacttccccttgtccctagcacacctcctcagcctggaacctctcatgcctttctcctccttagcatatagtatgtaatgtacttgtttactatctgtcttctccaatcagagtgtaaactccatgaaggccagggtttttgtttgttttctccattcctgattccttggtccctgggaagtacctggcatatcagtgctcagcaagtatgctttgactgaatgatcatcctatcccagcttaactctctacagttgctcttcagatagtttctaaagaacaggcaaagccctgggtggtctggccttgcccgcctgcccagcctcgtaccacaggctcttgttctcactctgcacctctgcactgagctgctatttgcatttctccaggcctcctcctgccagcaggcctttgtgtatgctcttcctctccctggaagctgttctgttctagcccttacttttatgtgcctggtatcttctactcttcctttagatgtcctttctggtgtgacttctggatgcgggaaactttccctgaccacccttacccatcccgcccccgcatcaaaattctgtgttgttttccttcctggcctttacctcagtttgcctaccccaatggactagaagttctttgagagcatgtttttgttcatcactgtatgctcagcagtgcctggcatatgataggccctcagtatatctttgctaaataaatagaagagtgacaactgtgcagtcagctaagtcaagagggaagaggcagtggcactggagggaagtggactgttgctttatatataagggaagaagcggaaggcttacttatgagtgtctaaggattaaaattaatttaaaatttggagaggattacttattgcagttgcattggttgggggatggcaaatgattcattattgtgattaaagagcacacagctacagtaattcacaytgggaggcattaattagctttgagccattcccttgcacacttaaagggaataaggacaattgagcaaatgtaatatggctttcaagttttgaatgctgatggggaaaaacattctgttctgtaagttggctattcaaaaggcctactcgggaaggagtgttaggcttatccaattgttctaggataaccgagtttgcattgggctatagagggaagttctgtttcatatgctgaagtttttagtttttaggttggtgtatgcagtagggtcaaggtataaattgtgagaacacctcaaattaagtgtttacacaggccrggatgcctgtaatgtaacccttggaaatcttaagccataggagttttctcctctgtatcattcttctttcttagcctttactctttgctaaaaatagttgctaatctccgtgcctgctgtgttcaaggcactgtacccaatggtggcatgcactatagcggtgatgaacctacagtttttgtttgtttttaatgatttgggataatgggaaagagagcaaggattacagataaaaagctcaagaaccagtgatctaatcctgccctgatgcttccacacagcactgagcataaatcattcagacaaacaggtattttatctawmagatctcgttgagaagatagattacacagcctcctgtatgaggatttctgtcactgacataatttggctctttgtatctgacctgtatttgcctgctagcatttatgtaccttttctttagttatcacaggaaatggagaccatctggcgaccactcttgttataatagagctgtgtggcatattattgtcactttcaatagtatattctgctttcaccccgtgttcttatattaagccctcaaaataataaatcacagtctgcttaatttacactaggtgtccctctttggtagctcatcccccagctgtggtttttcccttcagattcaagagtgaaattgggaacttgaaggaagattgtcaatatgtatgttttatttaaacgaataaatctttttmttatgaaagtttaaagtaatgatgaaagactgctatgctggcataatagaaaacatcctggattctcaataccagagtttgagatctgggatatttacattggtctctgacattgcaccaggaattcagcagtcctttcctcaggtttacagagagctttaattatagtcttcttagtcatttctggtgatttcaaattaaactttgtctttttggaagtattttttttaaagttgttgatgacaggttagcacctggtaaaatggggaattttgaggacagtgagtggacaggacgggtatccaaaacattttacaytgaaaacaaattcagaggaattcttagaattttctagaaccttttcccataactgaagagcaaacatattttgtcgaattatgatgatgctgttgtgaataacacagcaacagctaacatttctgttgtgtttatcatatgccagtcattgtagttagattatatgtcatccactctaattctcaaaacaatcgtgagagctaggtactacattctccattttatagatgaggaaactgaggctcagagatatttaataacttagacaggttcacttaactaggaagtgccagagccacaatttgaacccaggtaacttggtgctaaatcttttgctttttgctatctctaacacgaggcattgtttgcaaaatagtctgataactgtcttctgctcaattgggtgcttaatgtttattttctagatttccactaaaatatataaatagatatttcccctttgtaaaatagtaatttataacatcaccatctacaggcttttcaacttcatgtcttgatgtcatttaaatccttccgccaaaacaatctttctaaaataaaaaaaaaattacctcacaactgcccccatttgatatcttttgggattccccttcccctacaggaaagtgcagtcttcttcacatcacctgccagcctcactgcatcagctctcctcccttggctctgatttcccctccaggtccacccagtggtcaccttgctgtgtaatggccccttgcatttgccatagctgctctctcttccttggaaaccctttcccacccttctctcactggctgactcagtctttttcacttctgattctgtgttcatcagaatccacctacatcaatcttttcaaaagttagatctctagaaatgttgattcgttggttcttgaaagaagcctgggcaccagcttttcagaagcaccttatgattctggtgttacagccaggtaaatgaggccctgaaatgcttttactcaaatgtcagccctcctccaggaggcctccctggaaagctgaggtctagaggagcacctgcatgtatctgcagtctctgtgctggcactgcagccaccacagtgcattgcaacagccggtctgcacgtggcttcygaggagggtgtcagttcctgagggcagcagcagcacgttgctcctctcaggatcttcagctgtcagcacggggcctggcatgtaattggtctgcacccactggtgcactgaactgccataacctcaggttttctttcttgctgatacccctgggtcatgttctttggcaaataacatgattcattatgaagtagagttcagcaaaggacaaggatgaaagttgtcatttagagaactgccattcagactttcttgtctaggtaaagagcaaggtcttctctcttttcaactcattttctaaatttaaactgacgatgagaatatggatgatgtgtagcttccttctcccccactgatttttggttcaggctctgggtttttggcaagaacttacagatctcacttattattggccacccttctgctttaagacctgtcagggcttgtctgaaataaaactggaagcacttctgattccatcctcactgctttcctccttcaccgtcagacagcattactgtatagcactgagtgaggggccctgacactggaaggtggcaggtggggcctggccgccagtgaggtatcatcatttgtgtgtgctcatgtgtgcgtygggcttgttgtatctgaggcatgaacattccatatacacggcttaaagagttttcttcccataccgaaagcatatattcggagaggacccaacttattcagcatagccttgttcccatagtagccatcctattcccccacagcctctactttaggaaagctccccgtccccatatgaaatccaaaccaaaaaagatatatcactttcagctcaattattccataattacaagatattaggctagtgggctctttattggttgggtcttatattaatgktatatgctagccttgtaattttgagctcctctatggatgttaattttagtgaaactctatattgaagaaaagatgggactaagggggagacaggaggaggaaagaaagcagagacaggcaaagaatcatagcctgaaattcaacagcaagcatggcttatgaagatcaagttatatttttgcttcatgaatcattrtcagacaaattaagaacatattgtttcttatttatctattgtcaaggattcactatcagacactaagaataaatcttgattttcataagctctgttgacaccatggagccacagagcataaaacttgcatctaataaagaaagtgcaacatggaacagcagggagtggaataccagcacaactcacagctgcttcctgttcctcgtccctgttttcaggaatgtttcttagcaggaagttttttaatagaccgagaatttgttatatgtattctaagaaaagttgtagttgtagatgcattactctcccaaatcttagagatcagggatgattatgttccatttttgtttggtgagttcccatctttgtatgtacctccttgctcccggctgtcctcctctcctcttccctagtgagtggttaatgagtgttaatgcctaaaccatacttgttttatggacacttctataatggattcgttgcataattttcatgcagtgtatagtgttactagttggaaattcttggaggactcttagctgtctgatgaaattcctagtagaaatttttgttttgaattcctaaagttgaaatatgaaaattatattttaatttgattagagacaaaggataccagtatgggctgggcgcagtggctcacgcctgtaatcccaacactttgaaaggtcaaggtgggtggatcacttgagctctggagttcgagaccagcctaggcaacatggtgaaaccctgtctctacaaaaaatacaaaaattagctgggcatgttggcaggygcctatagtcacagctactcgggaggctgaggtgggaggatagcttgagtccagaaggtggaggttgcagtgagccaagatggtgcaccactgcactccagcctaggcaacagagcaagagcctgtctcaaaaaaaaggatatcagtatgaaaaactgagactcaagctagataccataaatctttaaaataataataaaataaaaatgtaaataaataatttaaatcttttcatagtatttacttaaacctcacttaagtcctataatatcaaaattagcatcagtgccgtgaaacttgaagcttattttagacttaaaaaaaaatcctttaaaattaatgtacagtgacaaaaagcaggccgtttgcctggtcaggggttgggaaggattcactgcatggagatgctgggaatttgtttggagtgataaaaatgtacatgtttttcaaaactcatctaactgtgcactgaaaatgggtgcattttattgaatgtaagttacactttaataaaattgattttaacactcttaatgcttccttattttgtagcattaaacttattagaaactatgaccttaaatcttattatacatcccccctcccccaccacagccctgccccaatgctcctaaagaagtaaatgagccatttatgtcagtaaggtaaaaatccaggatagtagagtggagtacgttattaaggagaaggtaaatgggcatggagcatatcactgtcatctgggtgatggttgaggccatagacctcacttattttggtgtccctgtcagtgacagcctctcaggctagttgggtccaacccaggaataagagaggtcaaaagtgaaatgtgttctcaatgtaccgccattccttttgggcagttgttgcgaagctctttggtgaataatagaactcaggccaaggtagcggaggagctgggcatgcaggagtacgccataaccaacgacaagaccaagaggcctgtggcgcttcgcaccaagaccttggcggaccttttggaatgtgagtgccacacacttttctctcaacctccaggttcagagtttaagtccaagtaaccgtatttgtcctcctcctcattattattatgttctggctaaagaaaccttgtttgctattttaattttttatgctttttaccaaagcttttctgaaggaaaataatttgaaactaasacatgtgaataatgaatttttatgttcaatctatgttcagtggtacccccracacatacccctccatcctracactcagctaccacatccctttgtgtgaaacagtaatagaatatgaagatcagttgttgtaaatcagagcctttttgccacccagcagccttcatataggggcacagaagaaagaagggtaatttattcactaaayactgaaactattattcattgttttgaatgagtgcaaagctctgcggacaaatgtcgtcttttgcagtttccgatatggtctggcagcattgtaaataatcctattatagttaacgaaaggattatacacatagttgtattgtttgtattacttcaaaataagtgrgccattcactgagccttagaactttttttttaatgttacggtatttttgacaatgggaattatattcaagtatcaaagtctaccatgcaaaactagcttatttacaaagtgcaaaggcattctgactaaggaacttaaaagaacttctttttcaatgaaagaaaagtaatttaaagatgaaaatcacataaaaattaaacagagagatcattcttttttttttttttagctcaatgaaagctatttttattccttcttttgaaaatgcaccatttgtttgctttgtcaaggtacctttaaatgaagtcatcctagggggtcaccatttattaatgcaaaatttgacatattgttgtcattaagatcagtattaagtttttctctttttgggcagattgaatctataaattaccccatttctgttcattaaatttaacatagaatccttaaaaacaggggatctcaggattggtgttgaaaatggcaagacccaagaatgtgcgtattctggcatcatatctaatcttcaagtaatattttgacttatttgatgtgaacagggttgggtgctcagcattttttccctgatatacagcggcattctgtgtaccttttaagctattcctttagcccttagctaaatgcagtttggtgtttgtactctatgatttgcatcttacacatctcttgctgcttctgatattaatgataaaaagtgggggaagatgaaatggtagcactgaaaaataaagagggcctggaagttgaaactattactaaaattttgcttaaaggtctaggtctcttactctttctgatagatggcagtgattgtggtttattttaaagtattcttttttccccagcatttattgcagcgctgtacattgataaggatttggaatatgttcatactttcatgaatgtctgcttctttccacgattgaaagtaagctcatataaagtttgaattagtggtctgctttatgtttggtgattccagaacccattactaaatagttttgggggacttccacaggagttcattttgaaycaggattggaatgaccccaaatcccagcttcagcagtgttgcttgacacttaggacagaaggaaaagagccagacattcctctgtacaagtaagtacttgttgcctgcaggccattggttggatccagcatgcctaraattgactttccatgtgccttgaagaatgagtcattgtggggtgatcatgacaggagcccaggattgagacttcttggctgttagtgtgactttgggccccacagggaaactcactggggctctcactcttagctgtaataagtgggtcccactccattatctcaatgttctctcccatttctaaaaatctctgtgaactactgcctgggagggagaccaactaagattatgagattaaaaagaaaatttggattcagtggtttttatatacatttttatatttgtcttcttgcttgtaacttctgctgggctgtgcatccagatgagaagatcatgtatgattatttgtagcgatatttgggtacctctctgcactttccctgaacccctattggcttcavcttggaacttttcttctcagaatgtgtgtcaaaagccatcaygtactttgaatatctttatcctttgagtggtagccaaaagtcattaaaaaggaatgtaggtgagtaatgggtcactacaccacttaatacccgttttgatgaaaacaggaggttcagctctgaagtagagtaattatcttgagacacacataggttgattaagaagatgctttcaaagtggaattayaaaatgaaaggattattgaaataggtgggttgcatctcaaggtattgtctgggtacatgattttaaggatgtttaaagattgtttcaaaactgtttcaccccatgtggatgcatacacggttgcaagcacacacatctgtgtgtgtgttctgtatggagtaaaagctcccctttggactttctcaaatttcaaaatacacaaggaaaaacattagactggcagttgggaattttcaatcctttcgcatgtttttatttaacagtcacaacactttataggcctttttgctaaagagaaactaaggccagaagaagaggttgagtcaccccacagcaagctactataaattacaccaagaagttgtcactgctaaaccatatttcctttatttattgggggaaaaaagccccaaatgtttagaaatagcactttattatgtgcctaataagcataatgaatatccaaactrtattctatgaaaggctcatagcatttcctcatcagagtkataattaaggttcaataaataaaatgaggatgctaaactttccatagcamaggcatgattactgtaatagtactaccttcaagaagccactcgtgcacattcatcccatggagcgtacgaacacaaaggaaattgctatgctcccttctcataaatcccccaaatgaaagtacaagatgagtttgctcattttatcaagatcatggggttgttttacatggttytttttaagattactatgttcattccattatctttgttggctacttttaatttcccttttccatgaagttattagttttactgcatttgaaatctgcaccatgtcattaaaatcccaagtacctggagctttgtttttttggcgattgtgttgtgtacttggcattatagcgtacctttcaagtgatctcagatgtttcagaaattaaatacattttctgatcttttagataagatacagacattagaaagaatccataaaggatgtgaaagcattcagatgtggcttgaagtgtattaccccaatatttattgttttaggctgtgattagcactgaaaaccaatagacaggagctcttaacttttcatgataaaagtttgtgaatatgcacacttagaaattctttgaaaatattttacacttcactgttagccttttgatgttatttatattactttgggaagaaatattaaaatacaatgcagaatttttaaaaatttctatttcaaatgctctcgatatttgtcggattagcaaatcaaaaacttaactctttttacctttctgccattttcacatttcctgttattttacttaactctgtctaggcastaagtacatggttttcctcatagttacatagtaaccatgacaaataacactttaccataataaatgttctttcctttccctttcaggactctgcagacagtgggcccatcccatgcccgaacctacactgtggctgtttatttcaagggagaaagaataggctgtgggaaaggaccaaggtatgagaagagaatacctggaattgctttgaatgaacatcctgtgtgtctaattccctagctgctatctccaaactcagtcatctgtcttttttaactcagagaataaaatgttcaagagtagtagcaaagtgaattccaggaattaatgtccccacattaattgtctcaaagccgagccctggaccatgggaataccattgtgtaagggggctttagctatcttgagaaaaccatattacctggcaagaaggtctgcctagttttagttacccagagcacactttgatgcaagctgtgtgtgtaagatgtgtcatgtcgcacatgacacgaccattagacttttatttatttttttttttggagacagagtctcactttgtcacctagtctggggtacagtggcatgatctccattcactgcaacctctaattgtgccttggctactcgagaagctagtattacaggcatgtgccaccatgcctgctaatttttgtgtttttagtagagacagggttttaccatgttggccaagctggtctcgaacttctgacctcaagtggtcccaaccccccctcagcctcccaaagtgctgggattttaggtatgagttcactgtgtccagctctgttagacattcgatttactactactcacctgagctgtatggaaaygctagcatctttaggtgaaaagaattatgtatattatcacctttctttgaactctccagtctgtatcttaaactgagaaatgatttgaaacctgtctgtatttttttttattcttttcctctttaaactttacagtgagggtattcaaacttaagtatgaaatacttcagacctaacataaatggaaggcattttattgcagtattaaagtgtggagtgaataacttaagtaggctttgtgcaaatcaatgacatttctgcatgctcttgtgtatattcctatctgtgcaattcagtgtgtgayactgtaagtaatcagaggagattttatgcactgaacgtgaaaatcagcctgaaagatttgtagccataccttgcattttttgaaaaaaaaaaaaaaaaaaaaaaaagaatcttgaaattaaagtatgtcttactttattttatttaatagtattcagcaagcggaaatgggagcagcaatggatgcgcttgaaaaatgtaagcctgtttttttttctataattatgttcrtaatgtaatgagtgttttatggaaaggaaatgaggaaggagaaaaatggtaagtattgataaaatgtgatcttgttttcttcagaattattctttacacagagaatatagtagaatgtgagacattctaaaatgggcttatatttaaaaataaaagtattcctgagtgctttttgatttgcagtttccttttttgcttagagtcctaatctcagcgcgggtgacctgtgtgaactgcctgctgtgttttctttcttttttttttttttgagatggagtttcgctgttgttgcccaggctggagtgcagtggcacaatcttggctcactgcaacctctgcctccccggtccaggtgtcaggtgattctcctgcctcagcctccccagtagctgggattacaggtgcctcctaccacacccagctaaatttttgtatttttagtagagatggggtttcaccatattggcccggctggtctggaactcctaacctcagatgatccacccacctsggcctccaaaagtgctgggattacaggcatgagccactgcacccggcctgtgttttctttcatacatttctctattctctaaaatcttgtaacagaaaagtatacgtgtgaaggttttctgttttttgttttggccattgttttattaaatgggctgttattacatacttctctgtacctttttttgctcaataatgtatcatgagcagccctgcagattatagaaaacagctccaattcattcttagtggctgcataatatttcctgctgtaggtgtgcaatattttattcagcctttttattattggtggacatttttttttaaatcattatcaccaataaatgttatatattggtgctttttagttctgtggaataggttcccaggagtgggatgcgtgggttgaagaaacttcaattacatgattgaccttgtaggaaactgcatagtcttttgtaaactgaaggcttaagtgcaagggatttttcttctgaggtctgttgtgctgcacagcagaacctgtgggcgcaacatgacagtgcaattctattatgcttcaagtaccctgctaaatgaggtaggagacagcaaaatgcgggaagctaaaagtgaagaggcccagaatcctcaggcatgggagagattccaggaaaggcaagcaggccaacagccaagtggaaatcagcaaagtttcctgttcaggggcagggagtttagtgggagcagacgctgatgctgccagggtccagcatccatggattcttcactgagagttttaagctggctattaggaacttcatccattgtacatataaatttgcaatcagagtgaaataaaagtgagattccattttttgtttgttttcaactataaaacagtactggagagatcacctattctgagacaggcctgcatatccatactggtaggagtgagttgtttaaactactggaaagcaatttggcagtatgtagcagttccttaaagaagttcatacccttggtaggccaagttggaagacaaaaaattaaaaaaaaaaaaaaaattagccaggcttggtggcatgcacttatagtgctagctacttggaaggctgaggccagaggatcacttgagcccaggggttcgaggctgcagtgagctatggtcatgccactgcactccagcctgtctcttcccctccccgccaaaaaaagtttataccatgagaatcatgacaacttgatttatagtagcagataaaaaaaacctatgtgttttagagtaggaaaatgtttaataaattgtggtatatcccaggggttaggaaacatttgctgtaaagggccggatagtaggcattttagacttcccagaccatataatctctgtcgcaattctccaactctgccattgcagcccactggcctggatagtgtgcaaactaatggatgtgtctatttaatgggtgtgtctgtctgccaataaaaatttataaaaacagatagatagctgtatttggcctgtggatagtagtttaccaacccttgctatacccaaatgttgtatgcattacagtaatggttttaaaaactaatgatatgggaaaatgcttatactagaataagtgaaaaaaagtatacccatgaatacatacctatattgtactttcycaatgagtaatgattttaaatgttcaagtgtctaggtgtatgtgtgtgtgtgtatatatatgtatatatgtatgtatatacacatttacattgcatatatatgtagtacaacttcataggaaaagggctataaggatatatttttaaagttttatcaatagttaaatgtgaattttgtttttcaaatgcaaatttgattttacagtagagtttattccggaaatagagttcattttgtagaaacttgctttacagcttagtggggtttgtttatttttgaaaaaagtagttatatttgaaacctacataaggaatcaatttgatcagttcaggaataggattttattactgttttatttccaaaatacagatgtcatgttctttttttgtttaaaatcaatctctgggccgggcatggtggctcatgcctttaatcccagcactttgggaggccgaggcaggaggccaggagtttgagaccagcctggccagcatggcgaaaccccatctcgactaaaaatacaaaaattagccggttgtggtggcacacgcctgtaatcccagctacttgggaggcagaggcagagaattgcttgaacctgggaggtggaggctgcagtgagctgagggactgcgctccagcgagattccatctctaaataaataaataaataataaataaataaaatcaatctctgacccccagacataccaggtctttgctgattccccacctgtctttcagatgcttttcctaccaccctgtcccttcttcaacctggtgtaaggatggtatactatataattaagagggaaaaaagaatttaggatctattatatggtcatctccccttatccatgggggtacctgaccccagtggatgcctaaagctgcagataaaactgaacattatatagactatattttttcctacacatgcaaaatttaattgaaagaggaaatttaatttacaaatcaggcacagaaaaagattaacaataattaaataaaattgaacaataatatactataatgaaagttgtgtgaatgtactcttgattgtatgctgtgccttctctctctgtctttcagaatgttattgtacattactcgcmtatttttggcccatggttgatcatgtgtaaatgaaaccatggagagcgagatcactgatgaggggcctgctgtatatgtagatccacttcactacgcattgtccttaaagcaaacaaatgaacttgcccccaagcatgccatgctcgcccacatcttggattcttcatgtgtttgaaacatgaggttatgtgtccgctttaacccaataagttttctacttgagttacttttgcaaatacagctttgggcctgtcatcataaacctaaaaattaattatcagacataatgacttggaacgtggcccctttttgtccacctgatctttctttgctcttttctgaatctttaattcttggtaaataatggtgtgataatatcatttgtttgaagtttttagtttgagcttttcaaaaactgtgactccattttactgtatcctttcatctctcccagaaagtcacctgttgctaggagagtgatgctaaagcacctgcttggtaacattcccaagccacacrtctgtgttttggcatttctgtatgttcggtgcctgctatacccaagttcacatcagatactgaaatttacaatcaggggcactcatccagacttccattatgtttttgagtgatgaaagaataagggaagaaaacagttttctatcttgtgccttataaaatacaattatacacatttcatatgcacgtatatttgtatgtgtatatgtttagttgcattattctttgcactagattattaaatataattttattaaatataaaatatatttccttgtgtcagataattttccccagatggcccatcagaagcggttcatcgaacggaagtacagacaagagttaaaagaaatgaggtgggaaagagagcatcaagagagagagccagatgagactgaagacatcaagaaataaaggagggcatgcaagtgtggagtatttacttgctcagtaactgtgactgttgtctattgagacctagcctagttttcctgcagacaatgaaygaagtgtgctcattgaaataaaatacagagtcaaatcgctattgttgttttaatgatctgtttttagctggatggtctttattacaaagtattagatttttcttctatttaacggaaaacttgactttggtgaatgtgcattacttccttttattttgctctttaaataataaaattcaagaagcatattctatgtggaatagatcctgtttttccatctgtgtcccagattgtgaccctagactttcaattgacaagtaaaaaattgactttactagacattttgactgtgctctagtaacatctatcctttttcaaatctctggatttttaagtagattgttcagctttcatccggtggctgttcatcaagttatcagctgcaaatattgaacttacctctctctaagcagtgagtgttttgtagaaggaatccgtttaacrattaattggctaatgggagaaggggaaagactgatattcaagtcatacagattctttgaatcattagaataggagagaaatcatgattctaagccaggccacactttaaaccaagtgctctcaccctggggttagtggaacctttaagaagttaatgaacagacttcaaggaagtcaaaaacctcccaatactatattcaattttctgtgtgtgtttgagatttgagagggcatggggagcaggaaggaggagggtttatagcttttatcagcctctctaagtgggccctgcagtaaaaggctaacatgacattcaaagacataacattttaaaaaaagttattccaaactaaacatcactggtttcttattaataaaggcaaaacttctttgtaaaacaaatctgtttcattcatcatttcagcaaatatatagtgagtgcttcctatgtatcagacactgttctagcctttggggctatagcagtgaacagaacaaacaaaacccctggtccttgaggagcttgggtgctagtgcaggtatacccacaacagaccaagagcccaatggcaagaaataaagcaggaacttgtgggtgcagttttcaatgaggtgtttgaggagttctccctaaaagggtattatttaagatgggaaagaggagaggaagtgaacgcttcaggtatctgggagtgtttcttatataaatattaaatattacatatgtattatcaaacatttgaaaaatgggccaggcacggtggcttatgcctgtaatcccagccctttgggaggctgaggcaggcagatcactttaggtcaggagttcgagaccagcctggccagcatggtggaaccccatctctactaaaagtacaaaaattacccaggcatggtggcgggygcctgtaatcccagctactctgggggctgaggcatgagaatcgcttgaacctgggaggcagaggttgcagtgagccaagatcgcgccactgcactccagcctgggtgatagagcaagactcagtctcaaaaaaataaaaatcaaaataaaaattgaaaaacacattacttttattagcaggagaaagaaacaaatgttgcttagaaactattatggaaaaagtagaaagcataagcagaaagataaataaatcactcatgattccatcacccagataatttttatgtcctgttggactgtctttgtacttaaatacacacatgcattcatgtgttttaacaacaggataccatacatatggtttccatagcctttctaactttttaaaatatgaatatctttgagcgacaaattcacatttacataatatagttgttgatggctacatagtaatgcacatcttatataccaatggtagatatatatattaaccaatctcatcaaagatgtgtaggttgtaagcaatttattgtcatagtgctgccacatacctttttgagggtgtgtatacacacacaaacacacacacacacacacacacacacacacacacacacatgcacattggagagagatacttctccaggatgtcttcatttgctaatcataaaaatgtaaggtggtgcctttaaaaaaaaacttgtcctgatgcccttcctccccaccagtgatgccaggagacaagtgaggagggagaagagagcttatttctttttgtttttttttttttttgagacagagtcttggtttgtcacccagtctggagtgcagtggcgtgatctcagctcactgcaatgttcacctcctgggttcaagcgattcttctgcctcagcctcccaagtagctgggattataggtgtgcaccaccacgcctggctaatttttgtatttttagtggagatggggtttcaccatgttggccaggctggtctcaaactgttggaaaaaagctgattgttgggagggaaactgaggcagggcttgcataatgtcctctggaatgtgtctagacttgctggctccttgcttctagccctcctaggctcctattcccattatttcaagtagcagaacatattctatataaatgctaaaccatcacagctgtaaatcatatgcttaatgcaacgtgtccttttgaccgccacattctcaccacctgtttctttgtttgattaccaataaataccgtgggctcccaaagctcaggaccttcgcagcctccacaatagcgatggcctctctgctatcccacctttctctcttaaactttttctcaatcctttgactccgctgaacttcatcgcccccacaacctggtgttgggtctgatcaccccaatattcctggctgctcaacgtggggcgacaaagaccgcgggtgaaggaacgaatgccagaatgtgtgaaagtagagaacgtctaaaagaagctcggcaggaaagctgagaactcagaagaaccagggtaacaatgggacaaagtgaaagcagacattctgcttatttaaatttcttaaggcatttattacgaagagggggagtgaaagatagtactcagaatttatcactcactccttagtgcagtaaagcggttttgcctgtggttcccggaacaagggactatgcagttggaggaatggaagagaattggcagagatttaaaaaaacgtataaagatggagcaaaaattccagtctcggtttggtcaatgtgggcgccaataaaagcagctcttgagccatttcaaacagatgaggcagattcagataaggaagaggacgagtgtaaaaaactacagattctgaatgtgaggaacaggaaacaggaaattaaagggaaactggaaaaagtatgttttactagcccttcggctccacctgctgaattaagtgaaggccacctcctctctctccccttaatgggcaagaagatgacttagctacaaaacttactgctcctgtagttgcagcactaaaacctggagcaattggtggtgctatacaaaattctattcaaaaggctagagccaagggagaccctgaagcatggcaatttcccataactataatccagcaagggaggagagcaaacgtccctccgctgtgtttctaaaatccatctacaaaggagaaagacagacatatacaagtagttaaagaaaaaagtgtaccctattcctttaaaagccagggtaaatttaaaacgtataattgaaggtcttctccgtgaccctataacactccaatactaccttgttgtcagtgtaaacaagagcatagcctaaaagcactgaaaccactgacaacccgtagccttcctatcaaaaatccttaactcagtaacctgcggatggcccaaatgcattccattggtagcggcaactgcttggctagcagaagatagaaaaataacctttagaggaaacctcattgtgagcacacctcaccagttcagagctatactatatatatatatatatatatataagcaaaaaggtagcttactcaaaaatcttaaatttttgagtaatttggggctattctgttagaaaaaggtgatttaacattaaccactgaaaattcccttaacccagcaggtttcctaccgagggatttaaatcttaattaccatacaaaggtccgaccagacctaggaagaactcccttcaggacaggacgatagatggttcctcctgggtgactgaaaaaacaaaaaacccacaatgggtattcagtaattgatagggaagctcttgtagaagcagagttaggaaaattgcctaataattggtccgctcaaacatgcgagctgtttgcactcagccaagacttaaaatacttacagaatcaaaaaactatctcaatcctgactcaaaaggttacttacaccctctgaaacgaatttgcgtaagaactgttgtttatgggaatgcatcttgatggggcagccgggttgttatgaaatactcaggaacccagcccagctgtagaactcacctctgagcgcaaaggcaatgttgggcacgctggtaaaggaccactagaatccagcagcctggacccctttctttgtggtcaagaaaggtgggaaaacaggtgcaggactgctacagtggtgagcgtaactaatccaataagcagaggcccatgggtggttatacaccctggcaaggaaaaagcattaggaccatagaggatgcattaggactaatgctcatcggaaaatgactaggggtgctggcgtccctgtgttctttttttcagatgggaaacatcccccccaaggcaaaaatgcccctaagatgtattctggagaattcggcccagtcagagtgcatgtacctttttccctctcagacctgaagcaaattaaaatagacctaggtaaattctcagataaccctgatggttatattgatgttttacaagggttaggacaatcctttgatctgacatggagatataatgttactgctaaattagacactaaccccaaatgagagaagtgctaccataactgcagcccgagagtttggcgatctctggtatctcagtcaggtcaatgataggatgacaacagaagaaagagaacaattccccacaggccagcaggcagttcccagtgtagaccctcattgagacgtagaatcagaacatggagattggtgccacagacatttgctaacttgcatgctagaaggactaaggaaaactaggaagactataaattattcaatgatgtccgctataacacagggaaaggaagaaaatcctactgcctttctggagagactaagggaggcattgaggaagcatacctttctgtcacctgaatctatttgaaggccaactaatcttaaaggataagtttatcactcagtcagctgcagacrttagaaaaaacttcaaaagtccgccttaggcccagagtaaaacttagaaaccctactgaacttggcaacctaggttttttataatagagatcaggaggagcaggtggaacgggacaaacgggattaaaaaaaaaaagccacctctttagtcatggccctcaggcaagcagactttggaggctctggaaaagggaaaggctgggcaaactgaatacctaatagggcttgcttccagtgcggtctacaacgacactttaaaaaaagattgtccgaatagaaacaagccaccccctcctccatgccccttatgtcaagggaatcactgaaaggcccactgccccaggggacgaaggtcctctgagtcagaagccactaaccagatgatacagcagcaggactgagggtgccgggggcaagcgccagcccatgccatcaccctcacagagccccgggtatgcttgaccattgagggccaggaggttaaccatctgctggacactggcgcagccttctcagtcttactcttctgtcccggaaaactgtcctccagatctgtcactatccgacgggtcctaggacagccagtcactggatacttctcccagccactaagttgtgactggggaagtttactcttttcacatgcctttctaactatgcctgaaagccccactcctttgttagggagagacatcctaacaaaagcaggggccattatacactagaattgggagaaggaaaaagggtaaatatatatacagacctaagtatgcttacctagtcctccatgcccacgcagcaatatggagagaaaaggaattcctaacttccgagggaacacctatcaaacatcaggaagccgttaggccccaaaattctccttacctctgagtctacttcctccgatccctgcctaaagataattttacggggaagatttgcttgtgtctctccaggtgatgatcaggtgcctaygtgcgtgcccaccaaatatctgaagatctattgtgagccaccgcatctagtggacccacctgtacggtgcaaattgaaggtttaaggattgcttttaagcctcaatttactttccctgtgacttctgttagaaggggcctgtttctcattatcagtgacctcccggctatagccacaagagtttttgcttctgtttcagtagatttactaatgggggtgggggtgtgtgtgagggtatacttgtgtttttgcaggagatgaatgaaccttgtggatgccctcaagatgtgtacgaccatggaacaggagactggagggacccatgaatcccaaccatggaccgggttccccagtacgagccatgagccagttgaatctgaatgcgaagatggagtgaagaccgaccagagtcacgatgcttaacggaccaatgctttctgactcagctcctctctaccccgaatataagagaccctaatagttaggcaggaatatcatcacccctattcagcatgaagaagttacagaagatggaccttcatccttctgcaacccctaggatt

SEQ ID NO: 94526 - DNA, 13614 bp, Homo sapiens
acttgtaagtcagggaccttctgggcaccgccacagggagtccaaagacaaaacttccttttggatttagtagagctttaagagcacctgttgtctgtcggcatctgcagcttccttgcaggacaagaccagcaaggctctctactctctgagagcttctgtcctagtgggtgggagagatacactaagtaaactaataaaggagaccaggtggggtggctcacgccttaaatcccagcagtttaggaggctgaccaaggtgggtggatcgcttgagcccaggagtctgagatcagcctgagcaacatagtgagatcccatctctacaaaaaataaataaaaatgatagaagaattagtcaggcgtagtggcacgcacctgtaatcccagctactcgggaggctgagggaggagaatcgattgaacccaggaggcggaggttgtggtgagccgagattgcaccactgcactccagcctgggcaacagagtgagactccgtctcaaaaataaataaataagtaaataaaaatgagctgggtgtgatggtgtgcacctgtggtcccagctacttgagaggctgagacaggaggatcacttgagcctgggagttggaggctacagtgagccatgattgcaccactgcactccagcctgggtggcagctcagaacctggcttttaaaaacaaaacaaaacaaaagacaaacggaagaacaaggtaatgccagtttgtgacaaatgttgtatatataacaaagcaaggtgaagcggtagcaagggacaaggggttccttgaagaccgctttgaggaagggacctgtgagaaaggttgtctctcctttggagtgactcttcctgtcttccttccttccttccttccttctttccttccttcctttcttctttctttccttctttgtttcatggagttttgctgttgttgcccaggccggagtgcaatggcgtgatcgctgctcaccgcaacctccgcctccggggttcaagcaattcccagcctcagcctcccgagtagctgggattacaggcatgcgccaccactcggctaattttgtatttttggtagagatggagtttctccacgttggtcaggctggtctcgaactcccgacctcaggtgatctgcctgtctcggcctcccaaagtgctgggattacaggcgtgagccatcgcacctggccttctttttctttctttatttttttgagatggagtccttgcccaggctgcagtgcaatggcacgatctgggctcactgcaaccttcgcctcctgggttcaagcaattttcctaactcagcctccagagtggctgggattacaggcgcccaccactgtgcctggctaatttttgtatttttagtagagacagggttttgccatgctggccaggctggtgttgaactcctgcctcagcctcccaaagtgttgtgattacaggtgtgagtcactgcactaggccttcgccttcgccttctcctcctcctcctccccctccccctccccctcctcccctccccctccccatcttcctcctccctctcctcccccctcctcctctccccctccccatcttcctcctccctctcctcccccttcctcccctccccctccccatcttcctcctccctctcctccccctccccctcccatcttcctcctccccctcctccccctccccctcctcctccctctcctcctccttgccttccttctcctccccctcctcctccccctcctctctccttccttccttccttcctttcttttctttctttcctttcctttttctttgcccctcctcctcctccctctttcccctccttctcctcctccactttctgttctcctcctccttcttctccttctcctttcctcctcctccttcttcattcttcttttttttctccctctgttgcccaggctggcatgcagtggcatgatcctagctcactgcagccttgaactcctgggctcaggtgatcctcctgcctcaccctccctcccaagtagctaggtccacaggcatgcaccaccacatctgctgaattatttatttatttatttatttatttattttatagagacagagtcttactatgttgcccaggctggtctgaaactcctgggcccaagcagatcctaccgtcttggcctcccaaagtgctggggttacaggcatgaggcaccatgcctggcctacttcctgtcttctgagaggtttcttgggatctgtgccctggggatgtttgcaaccacatgctgaaataagcttttttttttttttttttgagagatggagtctcactctgtctcccaggctgaagtgcagtggtgcaatctcagctcactgcaacctcactgggttcaagtgagtctcccagcctgctgagtagctgggattacaggcacgtgccaccacacctggctaatttttgtatttttagtagagatggggttttgccatgttggccgggctggtctcaaactcctgacctcaggtgatccgcctgcctcggcctcccaaagtgctgggattacaggtgtgagccaccgcgcccggcctagcatcttttttattttattttttgagacagagtctagctctgttgcccaggctggagtgcagtggtgttagctcactgcaacctccgcctcccgggttcaagccattctcctgcctcagcctcctgagtagctgggattacagggtcgaggaaattgaagtatttctccaccagctcctgtctgtccctgcctaagggttgctccagagaagggaggtggagaggtgttaactctctggcacttctgagttccctgcccacagggactgtgagtgctcagggatatagacagggtggtatggtacctgctgtagatatagatgcacctgccgcaggtatagatgcacctgccgcaggtatagatgcacctgctgcaggtatagatgctgagtgggatggctgagtcatagcacaccaatactcaatcctttccaattatttatcagaaaggctgcccactttacattcccattgctactgtgtgagtctttccacatgataatatctagcttaaaaaaaatatgggccagtcacggtggctcatgcgtgtaatcccagcactttgggaggctgaggcaggaggatcgcttgagcccaggggtttgagaccagcctgggcaacagtgagacctgagaccccgtctctacaaaaaaaaaaaaaaaaaaaaagtagccgggcacagtggcgcatgcctgtggttccagctatttgggagactgaggtgggagaaatgcttaagcccaggaagttgaggctacagtgagctactattgcaccattgtactccttcctgagcaacagagtgaggcatcgtctctaagaaagaagacatattttttcaattggcttttaaggtttctcctgaaattaaaaggaaaaaagaaaaaaatttaaattttggtccaatataatataaaattggccagtttaatttttttttaattttggagatgaggtcttgctctgtcacccagactggtgtgcaatggtttcatcatagctcactgtagcctcgaacccttgggctcaggtgatcctccccacttcagcctcccaagtagctgggactacaggtgtgtgccaccgcacccagctattttttagattttttttttttttgtagagacggggtctcgatatattgcccaggctggtcctgaacttctggtctcggacgatcctctggccttagcctcccaaagtgctgggattacacgcatgagccactgtgcccagccattgtaaccatttctaagtgtgcacctccgtggcattaagcatattcacatggttgtacaaccatcaccaacatccatctcccgaactttctcatcttctcaaattgaaactctgtccccatgaaacactaactccccacctccctcccatagctgctggcacccaccattctactttctgtctcccatgaatctgactcctctagggacctcctacaagtggaatcacacaggatttgtccttttgtgtctggcttattcccctgagcatgatgtcctcatggttcatcgatgtcacagcatgcatcagaattttctgccttttcagggctgcataatattccattgcatggatgaaccacattttatctatttacccctctgctggtggacacttgggggttgcttccaccttttggttcttgcgaatactactgctatgaacacgagggtacaaatatttctttcttttctttctttcttttttttttttttgagatggaatcttactctgtcgccctggctggagtgcagtggtgtgatctcggctcattgcaacctccgcctcccgggttcaagtgattctcctgcctcagcctcccaagtagctgggattacaggcatgcaccaccacgcctagctaatttttctatttttagtagagacggggttttgtcatgttggccaggctggtcttgaactcctgagctcaagtgatcggcctgcctcagcctccctaagtgctgggattacaagcatgagctactgcactgggtttagctgtaccagtttacattcccatcaacaggacacctgtgttccaatttctccacatcgcccctcagtacttgttatttactatccagcttctaagattttggaatgtgagttagctattactttgtaacaaattacccaaaaatttactagctttaaaaaagtatgtattggctgggctgcagtggctcacgcctgtaatcccagcactttgggaggtcaaggtgggtggatcacttgaggccaggagttcaagaccagcctggccaacatggcgaaaccccgtctctactaaaaatacaaaattaggggctgggcgcggtggctcacgcctgtaataccaacactttgggaggctgaggcgggtggattacgtgaggtcaggagttcaagaccagcctggccaacagggtgaaaacttgtctctactaaaaatacaaaaaattagccgggcgtgatggtgggcacctgtaatcccagctactcaggaggctgaggcaggagaatcacttgaacccaggaggtggaggttgcagtgagctgagatcaaaccactgcactccagcctgggcaacagagcaggactccatccaaacaaacaaacgaacaaacaaaaccaaaaaacaaaacaaaacaaaacagcccctcactgtttaaaatatatatatagctgggcgcggtggctcacgcctgtaatcccagcactttgggaggctgaggtgggtgggtcacaaggtcaggagatcgagaccatcctggctaaaacggtgaaaccccatctctactaaaaatacaaaaaattagccgggcatggtggcgggcgcctgtagtcccagctactcaggaggctgaggcaggagaatggcgtgaacctgggaagcagcttgcagtgagccgagatcgcgccactgcactccagactgggtgatagagcgagactcagtctcaaaaaaaaaatatatgtatatttatatatattttatatttatatatatttatatatattttatatttatatataatatatttatatatattttatatttatatataatatatttatatatattttatatttatatataatatatttatatatattttatatttatatatataatatatttatatatattttatatttatatatataatatatttatatatatataatatattatatatatataatatattatatatatataaatatatttatatatattttatatttatagataatatatttatatatattttatatttatagataatatatttatatatattatatttatagataatatatttatatgtatattttatatttatatataatatatttatatatttttttatatttatatatataatatatttatatatacatatatatatatggagtgggggtggccgagggggaagagtgtgtgtctgcgggagaaagaggagaatcgcccaagcggcctcggaagccccagggagtggaggctcccgccgtggagccatgtggtgtatgtgtggtaacaccacgtctacgcccctctcactgatgctgccgcggtgtctggagctgagcgggaaacagccgcggttagttttttatatggacttggagacacagggcacagctgggctgacgccctctccaccgtccggctccctcacgtcaaktccatctgtccccatgtgcctaggatccctgtgactctcaacatgaagatggtgacaccttcctgatttgacctgatggggctgagtccagatgccccagaggacgaggctggcatcaagaaggcagcagagaacatcaaggccttgaytgagcatgaaatgaagaacgggatccctgccaatcgaatcgtcctgggaggcttttcacagggcggggccctgtccctctacacggccctcacctgcccccacccgctggctggtatcgtagcatcgagctgctggctgcctctgcaccgggccttcccccaggcagctaaaggcagtggcaagggcctgaccatcctccagtgccatggggagctggaccccatggtgcccgtacggtttgggaccctgacggctgttgtcacacctgccagggtccagttcaagacatactcgggtgtcatgcacagctgctgtcctcaggagatggcagctgtgaaggaatttcttgagaagttgctgccttctgtctaactagtcgctggccccagtgcggtgccccagctcatgggggactcagcaagcaagcgtggcaccatcttggatctgagccagtcgagcccctgtccccacccttcctggcctgtccttttcccacaggcctctggggcaggtggcaaggcctggccgggctttccttcctggcctcagccacctggctctgtctgcagcaggggcaggctgctttcttatcccatttccctggaggcaggcctccctggcagcagtattggaggggctacaggaagctagagaaaggggcccagctgctgacccactcactcaggacctcactcactagccccgctttggggcccctcctgtgacctcagggtttggcccatggggcccttccaggcccctgctctaactgattctgcccagataatcgtgtgtctcctgcctccactcagctacttctcagtcatgaaggtggccatggccctgaggtccccttgctgctgtgggctccctgtccctgggcaggagtgctggtgaggaggtggagccttttgaggggggccttccctcagctgtttccccaaactggggggctgggccctgcctccccattaccctccttccctgcaggcctggagcctgtagggctggactgaggttcaggtctcccccaagctgtctcactctgactttgtccccactctagagcagggaaggggtgggggaggagttgtgtctcatcttctgtctccatgtggtttttgggtgcttttcttgttgtgtcctggattctgataaaattaaagaaattgcttcctcaaaaaaaaaaaaaaaaaaaaatatatatatatatatatatatatatgyccaggtgcagtggctcacgcctgtaatcccagcactttgggaggccgaggtgggtggatcacctgaagtcaggagttcgagaccatcctgaacaacatggagaaaccccatccctactaaaactacaaaattagccgggcatggtggcgcatgcctgtaatcccagctactcaggaggctgaggcaggagaatcgcttgaacctgggaggcagaggttgcggtgagctgatatcgcaccattgcactccagcctgggcaacaagagtgaaactccgcctcaaaaataaattaattaattaaaaattagggccaagatcacgccattgcactccagcctgggtgacagagtgagactctgtctcaaaaaaaaaaaatatatatatatgtatatatgtatatatatgtatatatgcgtatacacgtatatatgtatatatgtatatatgcgtatacacgtatatatgtatatatgtatatatgcgtatacacgtatatatgtatatatgtatatatgcgtatatacgtatatatgtatatatgtatatatgcgtatatacgtatatatgtatatatgtatatatgcgtatatacgtatatatgtatatatgtatatatatgtatatatgtatatatatacacacacacatatacatatatatttgtgatttatttatttttcttttagagacggggtctccttatatttccctagctggcctcaaactcccggcctcaaggggatcctcctgtcttagcctccccagtagctgggactacagtcgcctggccctcacctgagagtcacatgcctaagagtggctacgctgggcagttcattcaatgtccctcccccacctgttccaagcaaccactgatgtgctgtctgtaactacagattagtcgcattttctggaatgttctataaatggaatcatacagtgcgtgttttttgtagcttcttttgttcggtgtgcttttgagattagtccctgttttgagagtagcatagtctgttcctttctgttgccaagtttcattccattgtaggggacactttgattcatgttactcatccctcttgttgatggaggttttgggagtgtttttataagagggcagagtccagatcccaattaattacagggtgggttttgtgtaccctggaggaacccttgcatcatagtcagaaggcaggtgaagctgagtgaggtggctcctgcctgtaatcccagcagttttggaggctgaggtgggagaatcacttgagcccaggagttcaagaccagcctgggtaacagcgagactctgtttctacaaaaaatttaaaaattagcctgatatggtggggtaggctttagtcccagctacttgtttttttgttgttgtttttgtttttgtttgtttttttgagatggagtcttgctctgtcgcccaggctggaatgcaatggcgtgatctcggctcactgcaccctctgcctcccaggttcaagcgattctcctacctcagcctcccgagtagttgggattacaggtgcatggccaccatgcccggctaatttgtgtatttttagtagagatgaggtttcaccatgttggccaggctggtctcgaactcctgacctcaagtgatctgggttttgttttttatttttattttttattttttattattttgagatggagtctctctgtcacccaggctggagtgcagtggcatgatctcggctcactgcaacttccgcctcctgggttcaagcgattctcgcgcctcagccttccaagtagctgggactataggcaccacacccagctaatttttttgtatttttagtagagacagagtttcaccctgttgactaggctggtcttgaactcttgtcttcaaattatccacccgcctcggctgatagtcccagctacttgggaggctgaggtgggaggatcactggagcctgggaggtcgaggctgcagtgagctgtgaagctgtgatgatcgtgccactgcacttcagcctgggtgacagagtgagatcctgtctcaaaaataaataaataggagggcagggatctgtgttggtggatgtgatttggaaggaggcactgggtgtgggtgggtagacagggaaccaggctggtgtcatgccacaaggggttcacacgggtgatcattgctagactgagggagaagataaggcctaggatgatccaatctggaggtcaaagcatggcattcagctctgtcatttttctctgccttccatttctgcaacctcaaatgggcgcaacgtccctaccccccaaccccagttcacccgatgccaagttgcattatctgtttcctgtgcatggaggccccctgatttccaggagggagtgaactgtgcatatgagcttgcgatggggttagcagtggggcacagggcgctggtttcctggaatggggtaaaaagtggctgtaagtctggagggatgcgacatccaggcggaaagctcatggaggccatatgaggaggggacttggccgacagaggtgacaaggccagactctttttttgtgcatgtgtgacagagtcttgcactgtcgcccaggctggaatacagtggcacgatttcggctcactgcaagctctgcctcctgggttcacgccattctcagccatactcaggccatactcagcctcccgagtagctgggactacaggcgcccaccaccacgcccgtttaattttttgtatttttagtagagacaaggtttcaccgtgttagccaggatggtctcgatctcctgactttgtgatccgcccacctcggcctcccaaagtactgggattacaggcctgagccaccatgcccggcccagactcttcttataaggagagggagctgaggaatggccatttccaccctcaggctcccaccctcttcatgccacagtcctggagcaccgctctccaccgaggcccctgccctggctgaagtcagcaacaggacacctcccactcgctccggctgggctgggacccttgtaaaggatcttctgcgtccttcatgaacttgtgtttttgtttttttgtttgtttttgtttttgagacagagtctcactctgtcgcccaggctgaagtgcagtggcgcaatctcggctcactgtaacctccgcctcccgggttcaagcgattctcctgcctcagcctctcgagtagctgggattacaggtgctcgccagcatgcccggctaatttttgtattttttggtagagacagggtttcgccatgttggccagactggtctcgaactcctgagctcaagtgatccgcccgcctcagcctcccaaagcagtgggattacaggtgtgagccaccgcgcccggccttatgcacttgttttgacacctgctaggtcgacagaaccttgtcccccggaagcccagctctgccaggaagtctgggctgacttgacatcccgttagctgggagggtgtggagggtgggcgtgctctaccctgcagacggctgggtcacctctcacagaatatactgtgtctcctgtcgctctccctcctattcctttctttatcttccccaaaatctggggtctaccttgcatcctgaaattcccagggcagcattctcttagcagtccctcgaccccccaaccagataaggggtttcctggcgtctggggaacaccttcgggtgtggggcggagggcggctgccccccagagaccctgggcggcctagctttcgcagacgcgaaggactggatagtgccagggccaccgagcggccggattggtgtgtgggccagaggcgcggtggtcccgcctcctggttgccagggcccagcctatccgcgtccaggcggtccttggtgccaggtggttgtggtgggggtcggggcaggtgtatgtgttgggaaggacagtggaggaccccagggatttgctcccccagtcccaaccgttgactatctgggttcctcaggcgcagctggggaaacaggcttcccccggaccgcagagaagccacccttctctccaaagcgcgcttctcccccatccccctcggcgcgcttccgccggccgcgctcccgggtccggatcgagcgcgcgcccccggctctcccgcccgcggccgaggggcgggaccggctcggctcccccggcgccgcagcccgcagccccctcccctcgcctcctcgccgctggcggccaccgcgtcgctccggcccgggccccaccccaggcgactctgtgaggagcggccggaggccggaggcggaggtgagcgcgacgcgagcaggtggagaggctgggcgcgggccaggcccggctgggggaggggtcgggcccgggacgcggctctttgtctcccggagcccgttcgcgggcagcggggccgctctgcctcccggcaggtgcaggcatccctcggggaggccaggggaggccgatgggggctggcggggagacccgggcgtgcgctccgggtctggagggatgcgacatcctgagcccgtggcagtcccccgctctcgaggctggcggtctgagtccctgaaggggcaaggggcaggggcgtggagatcggtcctgaattggagccgaggcgggggaggcggtgggctggggcgggcagggcctcttcgctttagggaaaagcggtggggggtgggacttggggacagcgaggagcagtggggctggcgagtgggtgtaggtgcgtgggagccgagcggatggaagccgaggccgaggtttgagtgtccatgggtggcgatgctgcgaaagggcagtgaggtagcagggtccaggtctctggaggcggcgtagctgtccagaacctgggatgcggaccggtttgtctcttcaggtgcaagatggacaacaagagagacaaggcgaaggcaggggccgccgcgcggacgccggctgctcgcgctcctggacttctgacccccaggcccccaggctctcctcgaccccctcccccagtaactcccgcagccctccgagttctgggagctgcgggagcagtggggcgaaagcctctggcagagcgagcggggggcatcggcggggccactattcccgagtctgctccccgagcgggaccaacgcggagtgctgggacaagttcccgaaaccctggtaccccagcctccttcctcagctccgcccccatcttccctcccccttccaatacctgtccagtctcacctccactgccacctctccggggcacctgtgactcggccttctccccgcagcctccaggcccccagcctctgggagaggggagagagctcctcctgccaagaacaccagcccaggccctgtttctagcccagggcgtgccagcgggaccaccaggtaacctgctccctctcccccagtctcctaagccagggttagcgtcacagagtctggaaccttttattttacacgagttggggcgcgggagcacttgcaggtcactgggcacaaattgggtgaaagccattattggtcctcagagagggcacatgcccatttcacagatgggaaaatagagacttgggaagccaaacaaagacctaggcctgagcgtggccccttctgtctccaggccaggccctcttggccagaagggactccggatctcagcggaggaaactgtggccagaggaaaagctacagaggctcccaaaaggagtgccctcagcgctggggcacggagaggtacgtgacctggagaagagtggggttcctgggcagcaaggggagccgcctcagaggtatcggtgacccttggccttctactttttctccagacacttccgggcctaccccaggaaccccgtccccggccatggcccgtcggtcccgggctgcgggcaccgaggtggggctcccccggccagctccgagtgcccggccacggcccccgacagagggcccccggaaatcagtgagcagcgc

SEQ ID NO: 94527 - DNA, 75260 bp, Homo sapiens
  misc_feature (1)...(75260): n = A,T,C or G
cccgcaggcctgtagggccctcgtgcagcccaccctgaccgccaggatgcttctgccatccaggggtgtagtgaggacccacggggagcctgggccccttccagccgtgggcaaaccctgaagacacccctgcccccctccagagagtgaggagggggcctgagactggacctgggtctgcctgacctcagaggtggctctcaggatgggtgacggggggcttgtgtctgtaaatagccatgatactaactttcttcccatctgtgcaacggggcccccccagggcagctaggaggtcctcccctctcctctccaccaccccgtgctgcccccctcccggggtggggtttgggggggtggagtggacttctgggagccggcccggggaaagcaccccctgccccatccctgcagattgggatgaagtgttcagacagccatagaggagtcgggggttgacacggcccctgcctctccccaccccaccccaccccaccgaaagccatgggagtagttcagggaaatgggggtgcagcccagccaccccccattcgggtactcaatctcaggtgtccacaagttctgcccacggtaggggctgcctggccccccagacctcgggggtagagccaggagtggggcagcgttaggatgcccggaggggctccaggtgttgcttctgagacctgggatggggagggaggggacctctgggttcttccaaagaacatttgactcagtggggtcgggagggaatcctggcttatttattttcctctgtcctcgggtgtgggggccctagctccccctctctgggtgggtgggtgagagaggctgcaggggaggctggcaccgggcttgggcctccagtccctgccttgctgactttggccgttgcggtatcacgtgacaatcaactctcccttaacgacgactgcggctgttgggctgcgctgccctccctggcctgcaggtggggccgtggagcccatgcccgccggggttgcaggctcttccgggcctgggctgcagcctggcccggccctgcttccctggcctcccctccttctcctgggtgcttggaagaggtgggtcctggcccgtggttgaggtcttgcctcgtggactggaagcagagggctggctgtgcagcctcctggggtagctcgttttttttgcaccgggtagaatattttttcaggcacggattcctttttttctgggcccccatgggtggtccggcatcctcagggggtgtgagtgtgtgtggggggtctctgagctgaacttgggtggggtggggacttgttcctcgggggccacctttgtgtccttgtcagcggtcgtcctgctgtggcctgggttgcatttcctcttggggggggtattgaggacccccagcctggaatgagaagggtccccggttccatgtcagacccagaaaggtggatccccccactgttggctgcaggaggtttttggtacccccttttgttccagaaccgtcctgcctctcgcttggggacaggggggctttggatggcactggtgtgcacctggacccagccccggcctggcaggatccagggatgggtgcctgggatcctggggggagggaggcaggggacgcccttctggagctgggctcggagggtcctgccccatccagccctcggctctctgtgttctctgtccctagcctcaaaccctcttctggcagcgctagtgagatgccttagtctgtgggggtgggtgggggactggggccccgttttcctttgtgagtcttggttggccccagccctggcaggggcctgtctggagcaggggtaggtagggctgtgggttccagaactctataactgggcccctctccagtgtccaggggcttggagagacctgcgcccacccctccactctcccaggagtcgctgatcactgggacctggttccagccgtttgcaggggaggcggctccgagaggcgtgtgctttccgtgggtggcgcccctcccccgccctgcctggcctcatccttgtatttaattaattaaacaagcccctttttaaaccctactccagcgtgtgtgtggtctctcccgtggcagtccccacctgtgggcacgctctgaatccctctgtcccacccaccagtgtggtcccaagttcatccacctcgtggggaaaccgaggcagcgggctagtgaagggggtcttggccaggcccctctggctgagacacaaaatgccctgcccctagccctaagccccgcggagggggctgcctgcagcagcgcgcgctgcgcccgccgggtgtcacccacgcctggcgcagctgcgccccccgcccagcttcccgcccgccccgttgcctggcaaccgaggcacagtgacacggcgcccgggggcgtccaccgcccgccccttccggtgccgcaggggatgggggagcctgcgcccccggggctgctcgccggcgcgggacaggctcctccacggagggtcccccggccgcctcccaggctcctgtgctcctgtattgagcgcctactgtatgccagctcccctagtgggaatagggaagagggggcggtgagagctttgaggccctccccaggaaaaaaccactgtggactccagcgctccccagagcctggaggccggcggggctgggatggggccgggcaggccactcctacacacctgctgagccctggggcttcgcctgctgcccgcccggggaagggggtggtcggcctctcgtatcgcgcggccggcgccggctcacgccagacccctccccaacctgggcggcaaattcccggctttactcgagggcagcctccctcgtgcacccccaatcctgcccgacccatcctcccatcctaccggacgccccacaaacatcactcccgggactctcgcacccctccagctcctgcctggttttctgcccctctggagcaaaatgtctagaatatggggtctacactcgcagcctcgcccctctctctgacggacacactcgcattaggcttttaaattacacgccccacccccagcacacacacgtgcccagaagcagcaccatccttttggtgcctttgggaccccgaccctcccgggcgtccctcccacccgcaggctgctcttgccatgccccctcctcggtcgagggcagttccatcctgcaaggccaaaatccttggggagtcaccctggaccccactgtgtgtctcaccacccacatctggcccatctgaaacctccttgggctctaccttcaaaatagatccaggatctggccgcctttccctgctgtaagggcttccaccgcgacggtctagcctcctcacgactcacctgaaccagtgcaatcaccttggccctggtctcctcacggtttgtcctccccacggccaccagagggtgtccgtgaacacctggggcaagtctggttcctcctctgcccgcaaccctccatggctcccactgccctcacagtcaaagcccaagtcctccctgaggcccatagggttctgcatgacctgccccgtcctctccctgctcttccctcccgcctctctccccctcctcaccctggtccagccacactggcctcctcgctgttcctccaacacaccaggcgcagtcctgcccatggcctgtgccctctgcccggaatgcttttcctccagaagcctgcttggctccctcatcatcttttatttatttatttatcttttattttttcgagacactgtctcactctgtcacccaggctggagtgcagtggtgcaatcttggctcactgcaacctccgcctcccaggttcaagggattctcctgcctcagcctcccgagtagctgggattacaggcatgggccaccacacccagctaatttttgtaattttagtagagatggggtttcaccatgttagtcaggctggtctcgaactcctgacctcaagtgatctgcctgcctcagcctcccaaagtgctgggattacaggcgagaggcaccatgcctggcccctaattttctgtaaaaccgcacaaatcccgccttccccatagaatcacccagaccagccctgtgcccagtccaggctcttctcctgtttctgttctcaaagcactttccacctggcttcaggctgtctcacttattgctgtgttcattgtcggcctccctgcctacaccatcacctccaccagagtggggttctctgctctgcttatggatgtttctagcattttgtggcacacagtaggtgctcagtaactatttgctgaatgaatgaccgacaccagccggcacggatggagcaatcgcataaatgagagttcatctctcacgcatcatcaggagccatgacagggagtctacgcctccactgcccatgataggacagctttgagattagatcaggtcctctgcagagtcgcccatgacccatcccaacccacgtcccctcatcattgcatcctgtcatttatttataattgtggtaaaatcacatgcacataacataaaatttgtcatcttaaccattgtattgttatttgagacggactgtcactstgtcacccaggctggagtgcagtggtgcaatcttggctcactgcaacctccgcttcccaggttcaagtgattctcctgcttcagcctcccaagtagttgggactacaggcgcccgccaccacgcccagctaatttttgtatttttaatagaggtggggtttcgccatcttggccaggctggtctcaaactcctgacctcggttgatcttccctcctcggcctcccaaagagctgggattacaggcgtgagccatcgcgcccagctaatttttgtatttttagtaggacagggttttgccatattggccaagctggtcttgaaatcctgggctcaagtgatccacccgcctcagcctcccagagtgttgggattacagacatgagccactgtgcccgacctaagactttgctttctattctttttgggtgtatacccaggaatagagttgctcatagggtaattctgtttaactttttccatctctacacaaaatacaaaaaattagccaggcatgatggtgcacacctgtggttttagctactcgggaggctgaggtgggagaatcacctgagccagggaagtcgaggctgcagtgagccgtgatcgcaccactgctctccagcctgggtgacagagcaagaccctgtctcttaaaaacaaactttttgggttttttgttttacatagcagtggcactattttacaatcccaccaaaatgcaccaggttaaacttcccattaagacgtgggcctactccaccagactacagagttgccccatcccagccttgttcctcgtttgtctgttaaaatgcaccctctagctggtatacagtaggcgctcaatatttgttgaacaaatgagtgaacgtggacctggtcattagactgatgacaagagtcgaggttggggagattaaggcgtttcttgagagccagctgtataccagggcgaggggatttttaaagactgtgaacggagtaattcaaccatgagtttcacctggcccaggtttaaggccacctccccgcagaactctcctcgtccagcagagggcgccttaaggtgatatgctaacgaaaggaaataatatgcaaatgagtaatagcgggccccgcggggcttttttggtcaggcgcgccgtggacagccctggcgccgcaggggcctggggctcaagatggcgccgctacagccgccgaaggtcgggcggcggcgctggcgaggctcccggagaccgcaggcagggcagcccctgccctccttacttcctcccgcggccgtctgtcccggcccaggggtccgtcaccagccttggtcgcgcaggagcaggcgtttctgagcaggcgcgctgcgggcagcccctcccggggtcccttgcggcggcgtcccgagggcctccgggggcctcggagcaagatggcggcggcggggtccgtgaggcgcgggcggcggcgaccgcggcgccagtgagggggccctggggcccgggcggctccgggccggggccccgccgcgggacggaccatgctacgctccactggcttcttccgggccattgactgcccctattggtctggggcgcccggggggccctgccggcggccctactgccacttccggcaccgcggggcccggggccccggcgcgcccggtgacggcggagaggcgccccccgcagcaggtaatgcccgcccgcctgcttgccttgggctcggctcccctgcccgggtctggaccccaccccggtcccgcccggggtccccgttctcggcccagcctcctccccacacgttcgcgggcgacggttttcccagtcgggaccggaaccacccaccctgggacccggtgcaaagcactagatgtccctaagccttcgtcttcacgagtgtgaaatgtcaactaggaggacgcgtcctgccagggctgtctagagggcggagtgcgagcgcatgttgagtaccgggcaccgggcctgacacgagggggctcgggagacgggcgcggccggcgctaggcaggtcctggactcctcctgcccctgattggcgcccgccgcttcccggaccccatgtgcttgtggccgcccttgtttatttccatgacgtttcctccggccgcgcctctggcagcggccacctyagtctccagtcgttgagttaggatggtccgaggatcgtctcttgkgtttgtcgagccctgtgtccagcatgactggcagggaggaagtcaaagcttactcgagtgggctccgaggaattccatgcttttggtcgggcagaggacgttggtggactccacctcacagcgtcatggtggttttcatcgtcatggcagcgtttcttggaggagatgtgggatttggattggagaaaaagagggacatcgcaaggaaagtcgtggagggagggttatcgagtgtgatgtcattcagactcccctgttacctctgtcccttgatagtggctctctgcttcmcccagcccctgacttccttcgtcccagatttcctcattgggcgtgagtttcaagcactgtttttactttaaccatgaaacagtctcagctcagaaccttttcctgcaaaagagaaacatcttctctaggatttaagaataggtttattttcctgttttgccagaaaaggtagcatttttttctgatttccctgataagtgtgcttggsacacctgcacctgtgggcggttgtttgcaggtggacagatgcaagcaatcacttgtcagctccccacagcccagcgtcttcgctgtgtttgaggcgggggattcagagctgcgtacgatgccggctgtgctctcagggacctgccgacagctgtgcctacagatcccgtagcataggtcgtgatgtcctgggagcacgcagccggctttggcgggggctgggagttggtgaagaaggcaacgcgtgggagaggcttctcggaggctgtgacaccagactcacgatgctcattttaaccctatttttagagacagggtctcactctatagtccaggctggagtgcagtggtgcgatcacagctctttgaggcctcgacctcctgggctcaagggatcctcctgcctgaacctcctgagtagctgggactatgggcggcgggtgccaccaagcctggctaactttgtatgttttcgtggagatagggtctcgctatgttgtccaggcttgtctcaaaactcctggcctcgagccgacctcctgcttcggcctcccaaagtgctggggttacaggtgtgagctactgcacccggcgcaagtcaggcttatgatatctgtctgcatcccaaatggctcatttgtttcccaaaggcttatttttgagggtccctttggtgatgtcgtcttcctgtctgccccccgttcctatgggaaaaaggcagctgcctgcctcttaccatggcgtgtctgcatttcccttttgctggtgagaatgaactccttttcccatctctggtggggtggtagggcttcttgttactgtctggtagaagactgcctccccccgcagaaggcaggatccatcttccttgcggtgaggtttctctgaccctctgtttccgcctccgtgacatgttcatcaggctgccctctgaggacagggggggatgcatgtcccatgtccacacctccagatttacacacacccagtttcctatgagatttgaagaggctggcgtgatctagcctttgccatgtcttctcaaggggattttagggtgcacagggcagcggcctccagagaggagatagacaggaacgctggcctcccaggattgagagtggacagaggttcaggtgaaaagccctcagctagccctggagcacctgtggggccatgctctgtgctggacacgcgctgcatggtgaccctgtgagctatttgctgccggtggggaaacggaggcttatcgaggaacgtgttttgcccatactaccacctggccagggcagggctggagcctccagggcctctgggagaaggagagggcatctgatgagggcaccaaggcaggcagggttgggaggcttggcggagctgcgacgggaacaggaaggtggctggtgctcctgggccctgggtcacaggctcagcgggtcattggcgaccttgagcagcactgctgaaggactcaggtttccttctgggctcttatccctggacctgctcagccattttatttaatgaattaatttttgagacagggtctcactttatcacccaggctggagtgcagtggtgcgatcacagcttactgcagcctcgacctcctggactcaagggatccacctggctcagcctcctgactagctgagaccacaggcatgtgacatcacacctcgctaatgtttaaaatttttgccgagacggggtctcactttgttgcccatgctggtcttgagctcctggactcaagcgatcctctctcctcagcctcctgaagtgctgggatgacaggcgtgaagcaccgcgctgggctgcacagccatttcagagccggctggacctgcccagggtggcttggagggatggtccagcagcccttacggcgggcaccgtgtagccctgggacgcagggatgtgcatccccggcctagaggggcackttctatcccagccttgtgagttgggaatgagcgttactatccccccagtggccgctctctgctgcctgggccttggctgcagcctggtggtaggtgaggggcctcggttgtctatgtggagtgggcagggctagatcccaccttcctcccatctgacctcagaacccaggcctctgcccactgccccgcactccctgtggtgtctcagggagtctgtgtcctactgagaggcaggacactgtcttccaggagagggaacccttccggggaggattgcaggaaagtccagggctctccagaggtgcggtgggccccagctcagggcttcacagctccggcaggaacgtgctcccagatgatgcttctcctgagggaggcagaggctgagggcaccacgttgaggggatgctagtgctgcgccacaggctgactcargccccagcaggacagtcccaggcctggggaaggggccatcctatactgcaaagtgagcggcagacgtgtgtgcggggcgcacagctcctgccctcggggatcccgcagtcgggttcaggatctggcagcccggtgccagtggttctgggtggggctgttggcggcgtcccagctggggctccaggcsactctccagaactgcatctgtagagggcaggagtcctggggtagaggcgctcagggagcagccccaggtacatggggagccctgaagcccacccactgtgtacccagtatctactgaagcccacccaccgtgtacccaatatctcctgaagcccagccaccatgtacccagtatctcctgagccttctagcagagtcgggtcaggcaggggtcctcctccttctggctcttcagatgtggcccctcacatgggctctggggtccctacctcttgacttggccactaccacagcagtactgggcggactctgcctgtgacccccaaacagcagtgggagtggctcttcccagtttacagatgaggaaactgaggcccagcgccgggaggctgctcacctgtgtacgcgtggctggtaactggcagtgctgggttggatgtgggtgggccggggccctgcctgcctcctctgccgtttttgctgccagcctctgtgggctgggcacagaagggaacttgaaaccttccaaggatgggcctgaagcaggcctggctctccggtgtcggtgacagcctcccatacccctgctaggcaggtgagccctgggatcctactgatctgttagggcttgccagctctcctcggaaactctgaggccccgagtcaggcgagaagggagaaggaggccaagaatggcgcctcgctgcagaggatggcttgccttcatttcctctggcctctcaggagggtcaggagctcccgctggctgcgtcctgtgctgcctcctcctggtggatgggagacagccggctttccgtggggcagtgaaggcaccgtctgaccacctgtgtcaccttcagagacgtgacagtgtgtgctctcctcggtccgacttttcatcctcagtgagccgcgtccaggaaggaatggactctaggggagaacccccgcagccagcagtattgtcttttggttccccaggcctgaccagggcgtatgaggacccrggggtgattttaccagcgggtggcaggtgggcaatcgggccaccggggccgcctgcctgcctggcctggagtggcagctatggagcttgctggagggacggttggtgctagggacactgggggccagattgtygtctggtgggctgtcctttgcgttgtaggatgttgagcagcgtccctgggcttccctgaccccagtggtgacaaccagcggtggtgctgaggccgtttctttttcagccctcgccggcgagcctgcgagtccagctgcggctctgggccctggggagctgggaccctccgggcggggggttgaagctttgcccagctgtggctctgggccctggggagctgggaccctccgggcggggggttgaagctttgcccagctgcgrctctgggcccggggagctgggaccctccgggctgggggttgaagcttcgcccagctgcggctctgggcccggggagctgggaccctccgggcggggggttgaagctttgccctggcctcgaggaggaggagccctcccccacactcctaccacagagtgggtggctctgctgccccgtgactcttgatgttcctgtgtggagggggttagaggaaaggggcctggggtttccagagcagccgccttcttgcagatgctggcaggattgtgctggcagctctcccccaggtggatggcgatgggaaaagcgcygggttcccagggcctgggggcctgtccgtgttgcyacgggtctctgggtgctttacttttgaaggtactattttctggcctggggaaatgtttgttttagaaacatcagagaatacggaagagccagaggagaagtgtggcttcctttgccgagtccggcaccaggccgcttgccgggcctcctccagactccacaccagaggtcccgggcttgctgtgcttgagccatggctgggaccctgcctcacagatgaggttggattctgtttttttgggggggcttttcccaaggttctgaggtcctcacctgacttccggagcgcctgggcagctttgaaaacctggctgctgggcccggagctgcctccaggcgtgggccgtgccagtcgaggctggttttggtattcatattttaggattctttgcttaggtcttcagtagagcagtgactgatcccgacagggcggttctgcaccttgggaatgttaggagatgtctggagatgttttggttgccagtttgggggtgcaggcacagagagggcagaggccaggggcactgctcagcacccttcagtgctggggacaaccccacagacagagatctagcttggggcagtagtcctgaggatgaggatgccggtctggcggccccgcctgctgtttttgtgttttctttgctgctgctgctttttttttttttttttgcaacggaatctggctctgtcgtctaggctgttggagtgcagtggctccatcttagcttcctgtaacctccgcctcctggattcaagtgattctyctgcctcagtgtcccaggtagctgggattacaggcacctgctaccacgcctggctaatttttgtatttttagtagagatggggtttcaccatgttggccaggctggtctcgaactcctggcctcaagtgatccacccgcctcagcctcccaaagtgctgggattacaagcgtgagccactgtgctgggcctgtttttgtgttttcgagagggatggctgagctggcgctctgcctgtagggagaggcagagaccctgagaagcaccgtccctgcccccagagcctgagatgggagaggcagagcagctcgctggggctggggtcagcggggacaagcgtgcctgctgggaggggttccggggactcttgcagtgcctgagccgctccccagagcgctccccccagagccctgtgcagctttaccgtctcctccagggactgcagactggaggttcaggtgccagtggccggcctctgtccctctggagaccgtaccccggaatgaaggcgtcttgcttggctttctgtggggcagagctcgctaggaaggccccggcctcctcctgctgggcgttacccccttgagcctgttgcctcctgaacctccctcggcctcygcgagctcttctgcacgatggggtcgtggcatctgagtgtgacgggaagcgtcgtgcgggctgtgctgtagcaggcctcactttgacgagaaaactctgtcctcctccgccctcctccccaccctcagaatcccttctgcaaagcaatccctagagaggagcaggcaggtttccggggagcgctgggtgcgcccggccgtggcttgttccttacgctgtccgcgcagtgggtagattctgttggtatgatctgctgcagaacaaaaagcaaaaacctgaaaagaaaataaacagggtagaaggagactgtcagggcaatcctgggggtccctgagcctcacggggacctctcgagttgccattcctcttcctcctctaacagccaagtcctctgggacccttggaggagccgcatgtgcactggctgtttcggggcgatccctcccttaggctccgagaggtttttgggaacggctgcgaggacggagcgcctcccgtcccatgacaggctgcgtgcctggagcccggggttctgggacctgcccctgcttccggcctcaggaaaggagtggttgggggaggactcgggacgagctgtgggctgagcctggacacacacaccacaggacttcagtgttctctgtaaagccaggagctggtcctggtgccctccaaggccctgtctgggtccatctagactcagtgtctgtggygccaggctgaggggactcgggaagcagaagcggagggggtgatgtggggtgggcccgggtccaggagacagggcagctgtcacttggagttgcagggagtggaggggtgacgtggggcgggcccgggtgtcactcagagttgcaggggggtggggcgagtgtttccaaacacaggattactgggctgggttttggaggatgaataggagtttgcctgtggctggaagtgggattagggctgtgggctctggggatggagacagctcgaggaaagcctgggatgttctcctgctctgggcttggggctgcttgggagcttgccgccgatggggctcactgttgatatgctgtctcatctgtccccagcctgggagcgctcctgcggttgggcagtctgcgattctcagctttctggagtctcttcctgttcccacagagactcatgtctggagagtcggtgtgctgcaggtgtggaggggcccgtgcctctgggtcagtgtttccttccccttcccacttyccttccttcctcagatctctgcagacacctgccctgggccagctccgtcgacgctggggtgctcagaagagcctggcagggggcagggccaggaaggtggcagagagcgtgtgcttgggggtgtgggcctggcgtgcactccaggcgtatccccgccctgtggcttcccagcctgtccatttgtcctggcgacaggtccatccccaccctgttaacggtcacgggtcacagtccatttttctgagacccctccctcctcctctcacagtggctcagaggccctcagagaccaaaagggagccagcactgcctcaggagcaggccctagggagacaggatctggaagccatggaagtgggcctgcgcagtcctgagttggccaccgccccgtgcaccacggccgaggaggtggagtgaggtgagggctccaccatgccttccacctctgtatcccaggcactatgccaggcactgctgcttctgcagggaggacttcggagggctgcctggaggaagtggactttggggaagtggatgagacagagagggagggccctgccctttgtgccctgcaggctgcgtgccctctctgaggtcctgggcaggtattcagagaacatgtgctggaggaatgaatgatggggccggggtcggcccacattgccagccagcaccccgtccccccagcatctgcacacaggtcaccaagtaacaaaaacagcttgtgcttgcagtcaccctggtgtgtgggttcctccttaggcgccacggcacccatcctagraacagcctgtgaacccctggctgaggggcagcgccccgtggaggtgcccactccagcttctctgtgagcccctggaagaggctgcagggctcctggatgcttttagtcctctgtgcctgacggggagcacaggagtcccagaaacacccactgggaaatgtcctttggggacagaaaaggccctgggatgaggaggagctgagagctggactctttttttttttttttggagatagagtctcgctctgtcgccctggctggagtgcagtggcgtgatcttggctcactgcaacttccgctgctgggttcaagtgatacttttgcctcagcctcccgagtagctgggattacaggagcacgccgccacgcccagctaattttttgtattttagtagagacagagtttcaccgtgttgcccaggctggtctcaaactcctgagctcaaggcagtccgcccgcctcagctttccgaagtgctgggattataggcgtgagctaccgtgcccagctgctgatttttgtatttttagtagacacagggtttcaccatgttgcccaggctggtctcgaactcctgggctcaagagatccaccagccttgtcctcccaagtgctggggttacaggcgtgagctaccgtgcccggctgagagctggactcttaacttactctgtgtggaccatgaaagtggctcacagccaaggtgggctcttggcagggatggagaggcatagggggagaaggtcccgctggctcctccctgccggttcttgtcctttgccatttgtacccttctgtttcagttttttttttttttttgaaaaggagtctcgccctgtcacccaggctggagagcaatgtcacgatctcggctcaccgcaacgtccgcctcccgagttcaaacgattctcctgcctcagcctcccgagtagctgggattacaggcgtgagctactgcgcccaggcatgggattacctgggattacaggcatgtgccaccacagctggctaattttgtatttttttaagtagagacaggatttctgcatgttgctcaggctggtctcgaactcccaacctcaggtgatccgcccgcttcgactttccaaagtgctgggattacaggtgtgagccaccacgcccagctggtttttttttttttttttgagatggagtttcgttcttgttgcccaggctggagtgcggtggcgccatctcagctcactgcagactccaccttccgggttcaagcaattctcctgcctcagcctcctgagtagctggggttataggcacccccacacccggctaattttttgtagttttagtagggacggggtttccccatgttggccaggctggtctcaaactcctcacctcaaatcatccacctgcctcggccttgggctcagcctcccagagcgcggggattagagccgtgagctactgcgcccagcctgtttctacattgttttgaaaggcagtgacctctgtcctggttaccgtccctgtcccctagcctygagctgtaagccttgggacagcagcgcgtccagtcatggcatgtggggacggccgccccatgaggtgaataaatgcccaggacgccccagagagcagagctggtggtccccggtcaggccgggacctttttctttttctcccctggaccctgccgtgtggctccacctgctgggcggtcctggcactgcacactgcgctgtcgaggtggggagggcggtgccttggagcagaggggaggctcggatcgcagccctgggggtcgaggagaaccctgggggcagtggggtagaccccaggtgccgctgctgcaggcacagcccagcctccacagcaagctctgagacctgggtggagtctggtgtggggggtggggcagagctgggccaccttggatttcagagagggtattggaagctgctgggtggtggaggtccaggcccccggcactggctggacttttcctcgaagccctctccaggtgaccctgtttctgccccgtgtggtctaggagctgtgggacctcctctgggtgcagagtgctggtccctttgcctctgagcagcgggttcctatctgtccagtgggctgtgcatggagggccccgggcgcccgcatgtccarggatggggctggaggacrtcccactgtgagggttggaggggaggccccaggagcagggacccccagagtggacgtrtggccatttgtggggaccttatggttactctgccgtccgcaggaggtggacttcaggggtgctgtcctccagacccctcttcccagagggtctgttatgggatgggcgctcccgtggacacaaccagcccctgccttgcgcttcgcgagggtcagccccgtgccttctctgccgctgtggctgttttgggaatgtcctctcctgtctccaccttcaaagcctcaggccgcccagatggctcccccaggggctaggttgggggtagtcttgcttatctcatgccgcagtgtcaggcttatcttttttgtccagctaagccccaggcgggagggactgtctgtttccatctggggtctctgcctggcctgttctgggccagcatgcggggcccactgcctgggctggaggggccagtcctgctgatgcctggttgcgttgagagccctgcgggcccaccgaacggtgtccggagcaggggctgggcctgccgggttcttttttttttttttttttttttttgagacagagtcttgctctgttgcccaggctgcagtgcgatggcgtaatcttggctcaccgcagtctccgcctcccgggttcaagtgattctcctgtctcagcctcccaagtagctgggactataggcgcctgccgccacgcccggctaatttgtgttttcttagtagagacggggttttaccttattgtccaggctggtctcgaactcctgacctcaggtgatccacccgtctcggcctcctacagtgctgggattacaggcatgagccatcgtgtccagccagcctgccgggttctttagagccactgagtctccccgtctgggtgggaggggcctggggctccttgtggggctaggagctgccggctctcgctggcactgggtgtcctcatctttgaaatgggctgactgagagaagacaggagtttggacgggtctcactagagaacgttctggaagttcaggttgggrtcttcgtgctccatgatcttgtcatttttgctgcctttcagtctccgtgtggggttggagctcatgccaggttctccccattgctggggacaggacagctgtgtgggtggattgagtgtggtggggcgggggcagtgggagcagagaggagagtggatgcccagggtgaggggtttctgggccaagggaaggtttgggggccaggagatggccttgggcagatagtgctggtcccaggccccacacctagaaccctgggaagaaatatcatctttgtcatccagcccgtcccggggctgsagggcactggtctcaggagakgcggtcaggatgggtggtgtagggagtgggctctctcctaggccgggacaaggctgggctgcgttgccctgggctgagccctggctggagaggctggggaagatagccagccaggcgttgtggcctctcaggaccactggggctgggtggtacctcccagtcctggcsttggggtgaagcagggaggaaggggcagctcccaggcctctggaggtaggcttttcctgtcagccaattcaccatgtttcccagaaacagactgacctgggccacatccaggaaggagcccacctgctcctatccaaagtaattcccagccgtgggacrgggcctggacgggcccctcctacttccagagtcggcattcatttatgtatgtgtgtgtgtatgtatgtatgtatgtgtgtatgcatgtatagctctgtcgcccaggttggagtgcagtggtgcgttctcggctcactgcaacctccacttcccaggtttaggtgattctcctgcctcagcttcccgactagctgggattacaggcgcctgccaccaggcctggctaatttttttttgtattttttagtagaggtggagtttcaccatgttggccaggctggtttcgaactcctgacctcggtgatcctcccgcctccgcctcccaaagtgctagcattacaagtgtgagccaccacgcctggcccaaactcggcctttagatgtgaccccctgggtgggctcccagggcacctagcagcatgcacatgccaccctggggcctttccagtcctgacaggtacccagatccaaccctctgaggcatggtgggacagggaggtccagggaggcagtggtgtgtaccagcttcaggtgacctttcaggggctcagcacgccgtaccccctgttctgagctgcaggcagccatggccgagccccaggcaacttcctgtgtgaaacttccagacctggctggagcgcccaggccaggatgctgccttccagcaccagtgggtcacaggctgcagggtgggggagcccagtgaccacagggaggagaggccgtggtgcagatcctgatctcagtcttctcggacccgcctagcatgcctgctttctttttggtgcagtctttgtggaggtggtagcagcctccacccgggagtgaaaatgctgaaaccccctctgcagagtgtgccctccggcctccaggtgcccctgctctttcccatctgttggctaaaggctggggcaggtttcacagcccttaaaagacaagcagtgctttgggaggccgaggcgagaagaccgcttgagcttagaagtttgagaccagcctgggcaattacagcgagacccccgtctctaccaaaaaaagaaaagaattagctggatgtggtggtgcacgcaggtggtcccagctacttgcgaggctgaggcgggaggatcgctggagccggggaggcaaagcttcagcgagccatcatggtaccactgcactccagcctgggcaatgcctgtctccacaaaacaacaaaacaagtactcacacaggcttccagttagaaagacaagcccacgtcccccagattggacccttatcacctgtcctgcgctctgcttgggggcctggctccactcctgggaggcaggtgctattccttccaagaccttccaaaagcaccttttggggaaatggtctctcctttcagagtccacaatgtccagaggtctgaatttccttcctttgggaagggctcgcgggtgtctgctggctggtgtgtgtattgcctgtgactcttggctcccctgggctgggttgatcttgcaggctgtgtcttagagccctggggtccaggacaaggaggtggaagcccctgagtggagtcccttatccttagccccttagagatgcctcagtcccctccacccccgyctgccctcctggggcccagtctcactgctgcccacccctgcctggggaggagagccttcccgttaggcgggctcttcctcctctctgcatccccgttagctggagccttgggaggggagaccagtgtctccctgacctggccttgctcctcctcagtaattgtgctctgtcacctccccttcatgaatctctgcagctcacgccacagtggccttggcctggcccctccacgtcactgggcagccgggcttccggggctgggggagggctggcactagttgccctgttcaccaggcgggtggcagggtggcgtgctctgcagccggctgggtcagggaggagccggagcctcccccagtgaagtgggccgggagggcgtccttgagctgctgctggcctccgcagccctccccctgggtgggggctgacacccagccccagccggccgtttccctgccgggagcatcctcctggcctggcagctgtccctccccgcacagaggaactggcagccacagttgctgatcctagttgggtgccctcgctgactcccagggtccttggctgtgagatggtgccagaatgggcccctctgcgcctgctgggcacatggggtgacgtttcctggaaatgccttggctgtagcctggcacaggcaaagaagaacctgtggcttctgtgtgatgttccmctgcctgcccgtacctcgtggccctccacacagtcccgcggagttccgagtggtccaaaacagacacacggatccttcctcttgtctaaatgctacttaattttatttgttttagagacaggatcttgctctgttgcccaggctggaatgcggtggtgtgatcacagctcattgaagccttgacctcttaggctcaagagatcctcccacctcagccttccaagtagctgggaccacaggcatgcaaccatcacacccagctcattttttgtatttttttgtagagacggggtctcgccgtgttgcctaggctggtcttgaactcaagcagtctgctcatcttggccttccaaagtgctgggattacaggcgtgagccactgagcctggcactaagtgtaatttttttttttttttttttttttgagacagagtcttgctctgtcgccaggctggagtgtagtggtgtgatcttggctcactgcaacctctgcctcctgggttcaagcgattctcctgcctcagcctcctcagtagctgggattacaggtgcacgcccccatgcctggctaattttgtatttttagtagagatggggtttcaccatgttggccaggatggtcttgaactcctgagctggtgatctgcccgccttggtctcccaaagtgctgggatgacaggcgtgagccaccgtgcctgggatgacaggcgtgagccaccgtgctgggatgacaggcgtgagccaccgtgcctggtccctaaatgtaattttaaagatgggcacaacactgctgtgatttcaagggaaaggcggcagctgcccgtgaccaggcctcctcccacctcctctgcagcctccgggtcccggcctcccgctgtccctgcagggttcccgggaacaggaggggccttccgccttcgcaggtacaggcagcgggcagctgttttccactgcactttcatcacccggtgaggctgcattcgtccccgtgggccttaaagcagcacactctctctcagygctgggctgggaagtccaaagtcagcctcgctgggctcaagtcaagctgtgggcaggactgggcctcccgaaggcttccggggagagtcagtgcccgcctttcccagcatctggaggcacctgcatccctcggctcagggcgccttcctccccttcaaacccacagcacagccttttccagtctctctgactctcaccctcctgcctccctctttaaaggaccctgtgaggacactgggttcccggataatgcaagatgttcacccaccctcagggtcctttgttcaagtcgcacctgcagtctattggctgagtgaggtggcctggccacaggtcccagggattaggatggggacttgcctggggaggcttttgttctgctggtgggtgtgtctcgggggagcagcttgggaaaccagccatttctttttttctttttctttttcttttttttttttttgagatggagttttgctcttgttgcccaggatagagtgcaatggctcaatcttggctcactgcaacttccgcctcccaggttcaagcgattctcttgcctcagcctcccgagtagctgggattacaggcatgggtcaccacggctgggtaatttttttgtatttttagtagagatggggtttttccttgttggtcaggctggtctcgaactcctgacctcaggtgatccgcccgcctcagcctcccaaagtgctgggattacaggtgtgagccaccacaaccggccgaaaccagccatttctttcttatgcctgctggggcttgagggggtgtgggtgggggccataggggaagcctccagttctgttgctgttctctgcgtcgcccacagtgggaggtcttgtgcctgcctccccttggctgcgtccagccatttctctgcacggaagtcttagcacgctgtgggggtcgatctccaggtgggccgaagggcaggcaggttttctgagtggaagaaacacacctgaggcccgaccttcagacaagctgcacgttcagtcagaatcaagtcagagccaagtggcgtcttggtgcgggcaggttcccatggggctgttgccttttgctacatggtgtcacagctccttatcagcctgtcggggatgtgtgtcagcattcacgtccctcttgggcagttggtgttgggtgcagcataaatgaaggccagattgcatttgctgtaccccatgggactgcgggcttggtgtgggcccgtgcgcctttgttggaatctgatctcactgggtttgtggagctgcttttcaaaggtgagagtgtgcaacattccttgcccctcttcttccccatagcagtgtgacttggaggtccctccagggcgcacgcctcccccttaaccacaggtgacctgcgtttcggcttctaggtcatctcctgcgttatttattgttgtgtttttgcagtgaaggctgcaccagacgcatctgtacctgccctgtgcggtctgtctgtggcacgggttctgaggattccgagtctgaaggtggtggtgttgaagctgcatgggatggttgcgaaactgctctgcaagatctcggcctgtccatggccccctcagtgacgggcaagggagatttcaccccatctagagccccatttgccatctaaggggatataccatctacaggttccaggaattaggacgcagacgtctttggcgccatttcctgccaactccagaggatcagacctgttgacctttagagacctttagagatgttacggaattacattcagtggaactttattttatttttttaagagctggggtcttgttttgttgtccaggccagagtgcagaggcacaatcctggctcgctgcagcctcaagcccctgggctcaagtgattctcccactttagcctcccacatagctaggagcacaggtgtgcatcaccatgctcagcttatttttaagtatttttttaagagatgggatctgtgtcatccaggctggtcttaaactcctgagctcaagcagtatcctcccgcctcagcctcccaaagtgctgagatgatcggcgtgagccactgtgcctggccgtgctcagtagaatttctaatggtcaacttccaagtttctggagtaaatatttgaacttggtttttattgcttcgctggaatactgggctccacttgctcatgttttctttagactccttcggcctgtccccacgggaggcttctgtggttctgacttctgtgctgacgttggtggcattgaggttgtgagggtctgctacactatgttctggaaccacgtaaataacatgcgagtctcatgttcccagctgccccccgggaagacatttcagccgtgtgctttaagccaggcacagcagcttgggctatagtcccagctatcttggaggctgaggtgggaggattgcttgagtctacgagttcaragccagcctggccaatatggtgagactccayctctacaaatttttttttgttgagacggggtttcactcttgtcgcgcaggctggagtgcaatggtgtgatctcggctcaccgaaacctctgcctcccaggttcaagcgattctcctgcctcagcctcctgagtagctgggattacaggcatgcgccaccacgcccggctaattttgtatttttagtagagacggggtttctccatgtcggtctggctggtcttgaactcccgacctcaggtgatccgcccgccttggcctcccaaaatgttgggattacaggcgtgcgccaccgcgcccagctacaaaaagttttgaaattaaaaaattaatttaaagtaggccaggtgcagtggatcacttgaggtcaggagttcgagactggccaacatggtgaaaccccatctctactaaaaatacaaaaattagctgggtgtgatggcgcacgcctgtaatcccagctacttggggggctgaggcaggaggtttgcttgaactcgggagatagaggctgcggtgagccaagatcgcaccactatactccagcttgggcagcagagagactgtctcaaaaaaaaaaaatcttcctgtggattttgcagggtggcccatcaactgggcatgtccccatcccccggccctgctcagccacatcaccgcaggcacaccgccaccacaccaccgctggcacactgctggcacacctccgccacaccgcgggcacactgctggctgggtggggccgtgttggctgaggaagggctctcctgtgtccaccgtcaggctgtggttgtcggcccagcccagtcctgcctcagcccggcaccctgaatgctgggagctccacacccgcctgccccggggagttccagcctgtcgagkgtccaccccaccatggtcattgtgcgcatttcatgagccgtgtgagggagcctccagtacccagggagctgtgtgtcacgcagcccaggcccatccagcgcccattggtcagggcaaggcggggcccggcacagggcctgagatggcgccatggcctgtacccagctgggcaccccagagccttggcgggcgccagtgcgtggtgggtttcggaggcaggtctcttcccttccctgcagtttgagaccggggccgcccccatgctgcgggctcctctccggcaggctggtcacagctgtgctctctgttcccttcagggctgggttacgacccctacaaccctgagctgcccaagccccccgcgcagagggagaatggcaccctgggcctgggggaggagccgcgcccggatgtgctggagttggagctggtcaaccaggccatcgaggccgtgcgcagtgaggtggagctggagcagcggcgctaccgggagctgctggagacgacccgtgagcaccgctccgccgaggcccccgccctggcgccccgcggccccaacgccagccccactgtgggcccggacgaggatgccttcccactggccttcgactacagccccggcagccacggcctattaagccctgatgccggctaccagcccaccccactggccgcccctgccgagccgggcagcaagtactcgctggcgtccctggacaggggtcagggcagaggtggagggggtggcggtgccctggaatacgtccccaaggctgtgagccagccccggcggcacagccgccccgttcccagtggcaagtacgtggtggacaactccaggccacccacagacctggagtatgaccctctctccaactactcggcccggcacctcagcagggccagctcccgggatgagcgggccgccaagcggccccggggctcccgcggcagtgagccctacacacctgctcccaagaagctctgtgacccctttggcagttgcgatgcaaggttctcagactcagaagatgaggccgccacggtcccaggtaacgagcccaccacggccagcacccccaaagccagggccgaccctgagatcaaggccaccgggcagccaccctccaaagagggcctggaggccgaggggggcggcctgcgggagaccaaggagacggccgtgcagtgcgacgtgggggacctccagccgcccccagccaagcccgcctcsccagcccaggtccagtcctcacaggatgggggctgccccaaggagggaaaacccaagaagaaaaaaaccggggccccacctgcccccagctgcaaagacggggcccaggggaaggacaagaccaaggacaagggccgagggcggcctgyggagaagccccgtgcggacaagaagggcccgcaggccagcagcccccggcgcaaggcagagtggccggaagggaccaagaagaagccatcttcggccactcctgtggccacctcagggaaagggaggcctgaccggccagcgcggcggccgagccccacaagcggggactcccgaccggcggccggcagaggcccaccccgccccctccagctgcccgacaggaagagcaccaaggccccgtcsgggaagctagtggagcggaaagcccgctcactagacgagggcgcctcccaggacgcccccaagctgaagaagcgggccctgagccacgccgacctctttggggacgagagtgaggacgaggccgcagggccaggggtgccgagcgtgtggccctctgccctccccagcctcagctcggactcagactccgactcagactccagcctgggcttcccggaggcgcaggggccgcccaagcggctcaaggcctccccgcccccctcccccgccccatcctcctcctcctcctcctcctcctccacctccagcgcgggggcggatgtggactactcggccctggagaaggaggtggactttgactccgaccccatggaggagtgcctgcggatcttcaacgagtccaccagcgtcaagacggaggacagaggccggctggcccggcaggtgaggcgcgcgggtgctggggctgggctcgggcagaggcagagccgagggcctggtgagagaccttctatctggagtggtttccagttggctcggaggcacggggtggaggcagctcctcagtgctggtccctgagcccgttgaaatctcaggagctcaggagcacccgggcagccctgttgctcctgtbcctcacccacccagaggtcactggcccgtggccaccagccaggcttctgtggccacgtgcacacggtctgttcccactgactggcagggggatattggcccacccacccacctcaggggaatccacctccggcacacccttctagcccctctcccctcgcctcccctttcctcccttccccctctcttctcccctcctcccttcccccatctctgtctcttctcttccagctcctctgtctcctctccttgcctcctcctcatcccctccggctcctttctcctcccctccctcctccckactcccagcgtggcgagctcttgctctcctgggccagccctggacccctgggtctcctggccccgtgtccccaaattggccaccagggggagctcactccacacagactgagcccaagtgctcagcccgcagcagctggttcggcccaaggtggcctcgctttcccagtgtgctttcattctgcagccctggggtctccaagctggggccctgggtgcncaggagaggtagccttgggcatctgcagaacgtgtgacacctgcccaccccnccgactgcacccacacaaagcccagggactgttggccctgagccctcagctgctgtgcctgggggctggactgttccattccccacttgccgggggcagtttgaggttggggtgtgttggtgttggcagcgagggcagacctgtgctgacggacggacatgtgtcttagccccccaaggaaaagagtgaggagaaggggctttcgggtctgaccactctgttccccgggcagaagaggaggatctcccacctttccaagcaaggccaggaggtaaggtccgcagaggccaggccagcaggagccttttttttttttttttttaaagacgaggttggcctggtttggtggctcacgcctgtaatcccagcactttgggaggccaaggcgggtggatcacctgaggccaggagttcgagaccagcctggccagcatggcaaaaccccayctgtactaaaaatacaaaaattagctgggcatggtgatgggtgcctgtaataccagctactagagaggctgaggcaggagaatcgcttgaactcaggaggcagaggttacagtgagccaagattgcaccactgcactccagcctgggtgatagagcaagactctgtctcaaaaaaaaaaaattataaaaaaagggggtcttgctttgtcacccaggctggtcttccaactcctgacctcaagtgatcctcctgcctcggcttcccagcgttgggattacaggcgtgagccactgctcccagcttcatccctctgttttctgtttgtttgttttttggttgtttttttttttttttttttttttgagacggagtctcgctctgttacccaggctggagtgcagtggcacgatctctgctcactgcaacttccgcctcccgggcttaagtgattttcctgcttcagcctcccgagtacctgggattacaggtgcccaccaccacaccaggctaatttttgtatctttagtagagacggggtttcaccatgttggccagactggtctcgtgatctgcctacctcggcctcccaaaatgctgggattacaagcatgaggcactgcgcccagaggtgggcagatcacgaggtcaggagttcgagaccagcctggccaacatggtgaaaccccgtctctactaaagatacaaaatattagctgggcgcggtggcacgcacctgtaatcccagctactcgggaggctgaggcaggagaattgcttgaacccgggaggtggaggattcaatgagccaagatcgtgccattgcgctccagcctgggcgacaaggcaagactctgtctcaaaaagatagataaatacataaaatgagttatccattcataaacttctgatttctttgggacattgttcctgtaaatctgtgacgctttttgtaaagcatcagtgatttccccattcgttcttccacccaagtttcaccataaatttgatgcttaacatttgcttcaattttagcagaactcctgttgctctgactggggctctgttctaactgatgtcttacttttttttagtgcctcaaactccgtctggttcagacatgttatgacaagttagtatcagtttattttggggcaaaaaaacttgaaagccatgcaagtttcgtcacaacgcacgttttccatgagctttttgaagacaccttatctttgacgctgcccgagttccagagggagctggccctgccccttcctgttagattgccacggtgctggggcgagggacagagcaggtcagcagccccagggtgacctcccccagagtgcggcagacggcctgctgcgccgtgtgcggcctgggcctgggccggttgtccagctctgagctccagtgtcctctgtagcccggagacagtagcgcttgtcaggcccctgtgcagacgtggcgaggyagtgcaggacaagcagmgagcctkgctscggggtcagcagccaggagagtcccagttgctccagtcccagagcctccccagaggaggggctttgaggaagattaggcgtagtgggattggattggagtgccagtgtaatcggggtagtcccgcccacccgtgccttatcagggctgaggacatagcctgggcaccgggagacactgggagtgggggagcctggagccacatggcattgaggaccactgccccctgctgcttccccccagtgtgcccagcagctcagaaggcagccagggaggtggtgcctccggcccccgagctccagccaccctctcccaagcctgcccggggtcgcctgctccaggtgcccccgctgtgctgccaggccttagcatttgtggtgacgcaggtggagcccccgaggaggggtcccgcggtgcccccggcccggcccccgacggcgcaggaggtgtgctacctgcgggcccagcaggcgcagagggcatcggcgagcttgctgcaggcccccgccaggctggcagagaagtcgccctccgtccacatttccgcccctggcgagaagaggaggatcgcccacatccccaacccccgcctggctgcaggtgagtcctggcccagggggcctgtgccggggggccgtgggcatgtgggcaggagaggtggcaccctgaggtctctgagctcacctgaaccacatggtgcttgctcatgggatgactttgggccccctccctggggccctcagcctgcctgtctgtgaaatggggactgttgaggggtgcaggaggcctggcccagcaccttccttccctgacccagctccggggttactaggagtccaacagcctgctggggactgggctgaaccagggcctgagcctgtggttccagggaatggggagccatgtcggggtacctggcattgggtggggagcaggcttctgcaggtgtggctttctcctggcgtgtgagtggggggcgtggcctctgatggaaatgagtgctgtcttcccaggagtggggctgtatttcctttactccgaggggcacttcccccccagcagggtcttgtagaaagtcgggccaggcctcagtggtgggtggacaggacccttcacggggggttgtcctgtctcctgcgtcttcacatcastggtgtctgtagagcgagaaagtatccctggaggcaggtcacagatgagggtcccccagaaagctcctaaaaaatgcaggttctggtctggaggctgggaaaggtctgtgtgtctggcaagctccctgggagggcatggctgctgtccgaggaccaccctgagcagcctgctggtttggagcccctgcctccctggcgctggctggagagccttagggccagccccggcgattcccctgcagatcccatggatcccacggccctccttagggagagctctccaggctactctgacctcccctccccagagccccctcacggctgagaccttagccccagggaggggaaatcrttgagttgggcctatcccaggaccccacacgcttcccgtctgtgtctccgcgctcgggttgtcctgttgctgatctgtggtgggtgctgagctgtcgcagtgcccttggggcccgccgcctgaagggagtctggcgtcccaagtgctggcagtgccgcagggcgggctcatctggcttggaggactcctgtggctgcctgggctcgcccccagcgtgcagccgagggagtctggaggttctctgtccgttcctgaagagcaaaccctccactgcaagaggcgcgtgccagcctggcgggcagcctgcttccttgctgggcggcccgcggtagcatgagcagactcatcctgcctcccttgcaccttccagggccagatggcatttcgagggatgttgctctgagactagggccagatgtccctgctcacagctccccttcctgggtcggtgccgagcccccagtccagaagcccccctgccacacagacgtacatgcccaggttgcagctgcccgcgtggccagccctccgaagcagcccctgcaggcctggcctcctccctctggtttgtgacttcatcaaagggcaaggcagaacacagaggccgcagggcagggcaaagccaatgagcaggtgggggcacccgagacccttcggtcctctgtccgggagccagggcctttccctcagacatcgacgccttgggcttggggtcagaacacgtggcagaggcctggaccaccccaccggtgacgtgtcctcagcggcctccgcagcctgacctgtgtcctctgcctcgatggacttgcctgaaggcagctagagcctgatgccattgcgcagccccagcccctcaccctggcccggccccctgcacgcggagatgcacgtgctgctggcgctgagcggccgcggctgcctggtgctccgccacgtggtgatgggcagccactcgccctgtgcccacaccccctgtgccccgccagcccccacaggtgccaagaggacccttgcggccagcggcagccagycctccaacggccctgagccaggtggccagcagctgaaaacacgcacattgtcggggatggcgtccaagactaccaccaccatcatccctaagcgaatcgcccacagtccatccttacaggtagcccctcccatctcggccaggaccaccacccccaagaccacgccctgaggcccggccacatgggacctgcggagggccagcctcgcccctgccctgcgggccttcgtgctccacaccgcagtacagccttcaccttccctccccatgccttggtgttttttttttttttttgagatggagtctcgctctgtcgcccaggctggagtgcagtggcgcgatcttggctcactgcaagctctgcttcctgggttcacgccattctctggcctcagcctcctgagtagctgggactacaggcgcccgccaccacgcctggctgtttttgtatttttagtagaaacggggtttcaccatgttagccaggatggtctcgatcttctgacctcgtgatccacccgcctcggcctcccaaagtgctgggattacaggcgtgagccaccatgcccgaccgccctggcggtgtttttttgttttgtcttgttttgtttttttggttggttggtgttttttttttttgtttagagacagggtctctgttgcccaggctagagtgcaggggcgcaatcatggctcactgcaacctcgacctcctgggctcaagtgatccttccacctcagcctcctgagtagctgggaccacaagccggtgtcatcacaccccagctaataattttgttttttattttgtagagacagggttttgccacgttgtccaggctgatcttgaactcttgtcctcaagtgatcctcctgcctcagcctcccaaagtgctgggattataggcgtgagccaccacgcttggccttgttttgtttttaattaatagactttatgttttttgagcaactttaggtttctaggaaaattgagcagaaagtacagcaagttcccttgtgcccccatggcctcagtttcccatgaccttagttccgctgccctcagtttcccctgctgctcctgtcttgccttggcgtgtctgtccctactgcagccaggctgatctgtcccagcgcacctcactcttgcctccagccatgggcacggcctcatcgcgtctgcgttccccgctggaggccttgtggaggccctcacccatggcagcttttgccttccctctagagtttaaagaaacccrttatccccaaagagtttgggggcaaagtccccaccgtcatccgccagcgctatctcaacctgttcatcgaggagtgtctcaagttctgtacctccaaccaggaggccatagagaaggtgaggtcctggagttcctatctggccggtcgggtggggactaggggtccagggtggtccccagacatcccccrgcctctcagccgcagctgtgacccggagctgcctgggagagatgcaagtccccgaccccatggcgaccccacygctggggctccccggcaccaggcaggcatggcctcagctgggcaccgcctgtcccccaggcactgaacgaggagaaggtggyctatgaccgcagccccagcaagaacatctacctgaatgtggccgtgaacaccctcaagaagctcaggggcctggcccccagcgctgtgcccggcctcagcagtgagtcctggcgggtgggcgggggaggctcagggttgctcttggggtggcagctgggctgggaccctcgctgggaccttcacagccctgagctcagccacagtctcagacaaaaggaaagcgcggtgctgtgggggggctgcctgctgcctggttcccaggcttctgtgtaggacggacctggccctggtgtcctygctgtcagccgccttcctccgctgagtggggtctccaagccgagccgaggggccgcctgctaatggagctgcggcagcttcttcaaagcaggaggcccagggctgggcgagctccatgcattaagctctggggaggaagaaagcggagacctgggcgtttcattgcagcctctccaggctgcattaagctatcaccggcccctgcccccgtccccgcctgcattagcactcggaggggccctgggttggcgtcgcaggctgggtggcccatgaaggctcaaagccctcgaaagccattagatcccccgtgctgttctccccgcccttcccccttcgcttgaggggaggggacgaagactttgggtgtggggcctccgtgcagctctggggcctgcagagctggcggctgccctgcgtccctggctcaccgcatgtctgcctctcctgttcgggtcaggctggaacccggggtcagtggggtgctgtcccagaaagggggagttgaggcagaggtctgaggagggcagggtgggtgggagagcaggcggggcaggggtctgagccagctacttcacaccctcctcccctccctcccttccttccagaaaccrgtggccgcagggttgtgtcccacgaggtggtgttggggggcaggttggccgccaagaccagcttctcgctcagccgtccaagcagcccccgggtggaggacctgaaaggtaaggccctgcccctgctctgccacacggtgcttcgtgggcctctgccggcccagcccctgctstgccacacggtgcttcgtgggcccctgccggcccagccgcctttcccggtggtgtctaccgccccgtgggccatcccaggcaggggctgaccactgtgcctgtccacaggggctgccctgtacagccgcctcagggagtacctgctcacccaggaccagctcaaggagaacggctaccccttcccgcacccagagcggcccgggggcgcaatcatcttyacagctgaggagaagaggcccaaggactgtgagtcgctggcctgcgacggcctaggtgggcaggtgcgggatgtgggcaaggccgggcatgcgggccccagcgtgagcctcagcttccacctgggtccccacccacagcttcctgcaggacctgctgccgctgtggcaccgagtacctcgtgtcctcttcaggccgctgcatccgggacgaggagtgttattaccactggggacggctgcgccggaaccggggtaaggccttacccgggtcctyccccttcccacccatggcccccggaacctgggccctcccttgaggcccccagaacyggggtaaggctttacccaggccctccatcccactcagggtccctgggctgcaccgtctttggcagagccggggctagcccttggcctcattttctctccacctgttctttatgcaaaagtaagacaagagctttcccatgacaaggttcaaatgccaccacctgaaaggccctgtgtccctgccttcctgtgcccttggtccatggaaatgtggaggttgctggccccaggagcggaggggcttgtcccacccttggcctggtggttctattcaatcccccaggcaaccacgcagccacgctcagggcacatggccagccttgcacagccctgtggcggcccctaaagccatcgcctcagggatacctggagggtgctgcccggggcagcgctgccaagaggcctctgcagagggcactggtctccctggatccaggcctgggcgtcctggctgccacasgactgccggggcctggtctgcttccagctccaccaagaggctgaggcctcctgtcctcagtcctcactccctagtarggctcggtagatgcaggtggtcagtgccccgggggctgtggagtgggcctggccgggccctgactgtgtgtctgtgtcccctgcagtggccggaggctgggagacccagtacatgtgctgctcggctgccgccggctctgtcggctgccaagtcgcaaaggtgagccctggcgtcccagtcccctctgcctgttctcaacagacttctgcctccccatcgttggtgtggggtctcgggacacagcacagtcctgggctcagggtctgggcccccgggcagcctttcttgtgttacccagagaacgtagcacccgtaggccccaggccctgtccctggccacttcccatcctgggaagccgtcctccctgtgtcttcttggcaagcccccttccccacctgctcaccagggtcccaaccagtgaatgggcgtgatggatggataggatggtcccgaagggctcagagatgtgctgctgctgccacccccgcccccactgcaccccgaagctgccctcacctgccttctccacccccagcaacacgtgcaggatggccggaaggagcgccttgagggcttcgtgaagacctttgagaaagagctctcaggagacacccacccggggatctacgccctggactgcgagatggtgaggctgttctctgcccagcgtcgggttcaggattggggaggacctggcctggtgcggccgccccatctggccccatctggccccatctgggcctggctcaccggccagcgckcagggtttctctcgcagcaccggtgcctgtggctcctgccctggaccaacaccccatacttcccagcagagccaagcacaccgggcactgggccccggctctgcctctgaatgggaggcaggagggctttgcgaaagggggttactgaggtcacaccccactcggcctctcctagaagtcccacagagtctctggtcactgcctctgcctggaggggctctggagactcaaaggggcagggaaggggagggagggaggccggtgcctgggacacatctgaggtgcatcccttgcccgcagtcctacaccacatatggcctggagctgacgcgcgtcacggtggtcgacacggacgtgcacgtggtttatgacaccttcgtgaagcctgacaacgagatcgtggactacaacaccaggtgtggccagtgccctccacgagctgggagccctcccagccgcctctccccagggacccaccctcccccgccccaccagccagtgcttccaggctgagccctggtgcccctcctgcccgttcccccaggttttcgggggtgacggaggctgaccttgccgacacaagtgtcacgctgcgtgacgtccaggccgttctgctgagcatgttcagcgctgacaccatcctcatcggacacagcctggagagcgacctcctggccctgaaggtgccctgccggcccgggtcccgcgcggttctccagcaggacctgcgcaggccccacgtgcgctgatctctgccgctgcccacaggtcatccacagcaccgtggtggacacgtctgtgctcttcccccaccgcctgggcctcccctacaagcggtccctgcggaacctcatggccgactacctcagacagatcatccaggacaatggtgagtgccggtgcctgccctggggccgtccctgcgcaggggccgggtgctcaccgcatctgccccgcagtggatgggcacagctccagygaggacgccggcgcctgcatgcacctggtgatctggaaggttcgagaagacgccaagaccaagcgatgacgcctgcccgcctcccacccgcctctcctgccgtcccgctggtccttagccccatgcctcttccaaaacagtgcaataaatctccggtaacccgtccacctggccgaggcagcccagagcagcgggatgagctggcggccagagaacgcccagcccagcccacccccgctcacgtcctgccgcacccctccgccggtccccaccctctgccccccagccctctggcgtctctagaaactgctgctgatggagaccaggacagagcccgcccccacccggcccgcagcccctcctgcccctcctgccaggccctccctcccgggtggtggccggcacctctgctcctcacgtgggtcgcggggcgggcttgtcccaggtttgtttgagacagtctttttttattttgtattgttatttttattatttttaatttaaacctgatgacttgcacagcatctttcccaccgggaagagcgggcctgctgccttccctcctgcggggtgggggtgggacagaccccagtgggggccagggccacactcagcgcagtgtgggctggacccgcctctgtgctccaggggctggccggtcttcgggggcgccggcttccaccactcgccgccccacccctgcactccgtgacctctgagaacccagctggcccctcgttagccccagggtctgccgtctagagggagcccaccggcctccggacactgtcttcccgctagagccccgtcctcctytgcggggctctccggacccccttccccctcacctccaggcagggacagaataaatgtttgtatggattttagattttgtggtggtcttggtcttggtgcctggtgaggcctctgcatgtgccccggggaggccactgtccctgcagccgggactgattctcttcccatcaacgcagagaaaacagagcagtgaaactttccctcacaaaagctggcccagggctggctcccccagggctgggccacacctgctgtggggtcccagttccagccccagatcatgggccaccatcctgcagcttctagtgcctctcggacagtgggtggtgtccccagccctgtgtggagctgggccctgtgcacagagctggcttccctctctgccctgcccagagatagggactgcacacagatggtgagagggggttaaagagactgggagctgctgtgtgttgcccgtcaaaggatggagtgcagacacggaaagctgctccggcccttgccaggaaacgccacacattgtgtagtgcacgcacgtctcgggcaactgtggttgcatcgggaccccatttgggaatgggaggcccaggggtgtttaggccccactttttattgacctcaagtagaaaaagtgatgagccttgcgggacaggacccagcagctgggggcaggttgcctggagtgggtttcctgccaccctggtcttgggcttctgctgaagggcaaggccaagggcacaggtcccgggatgaggacgtgggggccctccccagaggactccatcccaaggctcccttcccggttctgggctctgcatctctccagggccctcctgggggaccgtggttaggccaggcccttccaccctcgagggctgttcttgtgactagtgactctcccacctcttctgtaaaggagttgttttctttttcttctttatttttgagacacagtctcgctttgtcacccagtctcagctggctgcaacctctgtctgccgagtagctgggattatggccgtgccatcacacctggctaatttcgtatttttagtagagatggggtttcaccacgttggccaagctggtctcgaactcctgacctcaagtgatccacctgcctcggcctcccaaagcgttgggattacaggcatgagccactgtgcccggctctgtgttctaaataaatggcgcaggcgtgtatgcgctctgtttctgtgcattcccatgtgatgtctgcctcccccttcccagaacgcacctggtgcctcaggacatagcccacggggggtyccaaggctggccagccctggcttcagcccccagggactcccttcagcttgtgaagccacctgttgccactggaggcttcagggcctttgcacaagtgccctgggcaagctcctgcccccagatagtgccccctgcgaaggctggggtgggggaatctggtcctcacagctgcacccaaccaggtctcttctaaagtttattagaacagtgtgttcaaacccccagccccggctttttttcgtaaccactgagcaagcaagcaagcacaggggaagtgttgaaggaatgaaaggagagaagtcaaacacagtggcctgcctgcctgcttgtggtcccagctactctggaggctgaggcaggaggatcgcttgagcccaggaggtggaggctgcagtgagctctgatcgcaccactgcactccagcccgggtgacacagtgagactctgtctccaaaaaaagagaggttccctggcagcctccagggccaagcaggcttccaatttgggcttccaaagaaagagggtttgtgatcaccgagagccctcaggtggttgccgctttgatgggggaggtggcttccctatccccctccacccatgtttgcctctccctttgggccctcaccccaggtagcctcactcttgggggcatttcatcttcagcagcccctccgcacacactttctgaccctggctccaggccctatcgctggcctggacccgccctagcctcgtcgctgaactcacccctgccacttcttcagtaaggatccctgagcccctgccacctgctggaaagaaccctgcgggcttcctcttggccttagggtggtctcaatggctataaccgcctctccccagcctggtgctcagccctgcatctgcgcctaggaggcgctcgttgaacgtgtatgggatgaatgaacgaacccaggacacggatcagacatgacttacataaccgccgttacctgtggtccttcctcctgcactctgccacgctggccgcaccagcctcagccccgtcaggtctgcaaggcccattccgacctgacccaggcccacctttccaagaacccttccaaccccgccctgcggtgcaggttctttctgctccctgaccaagcccggcccggccctgccctgacaccctcttccctttcaggctccgcccctgcactggcactgctccctaaggccctcccaaggccctgccttctgtcctggacccaccctgagcgccctcctaccctgaccctgctctgcgcggccccgccttcctcctttgtaacggctccggatcccagccccgcccctaccataacactgctccgcaaggccacgctcaaccccgcttcccgctctggccaagcccctgagtcctggccccgcccctactctgactttgctcagcgagaccccgctcgtcctcgccttccttctagtcccttccccaaagtcccggcccctccccagacccaggcactgctcccgagcgtcttctatcccggcctgttctgcgaggctctgcgaggccccgcccttcggccgtgaccgcgtccctgaggcctggcccccatcctgctcggccgtgctccgctcggccccaccctcgaggccccgccccttcttcgccttggccccacccaccccctccaggccccgcccccggcccccttccggggtccgaactggctccaccttcgccttggccgggccccgaggccccgccccgagatcccgccccccgtttcaggaccgttggcaccgggctaacggttccaccacgtccgccgccctggacgcccgcggcctgcccccccctgcctctcctgcgccggtgagcggcgggtgctcccactgctgtgcgtccccgggagcccgcgcaccctctctgggctccacccaggctgagagctggggtcgtggcggcgggggtggagagcgcgcccctagaggttcgcgcggtcggggccccggggcgggtgcagacagccctggactctggagccctgtccagggcggtcctgtgcccctgcggctgcgggaagacggggtggggggcttccgagtaatggggcatcccagttagtgagggggcaggaagccagcgctgtgtccgtgtctctttctgcccccagatacacttcgagtggattctggccatttgagcattctctccaactctccaatccccagtctgcccccacgggggtctcccccacctctcccccgtcccacagcctaaacccctcttcgccctgaacctcccttttcctcatgcggtgaatgggcactggccccgctcagactcccaggagcaccagagctggccctgagccaagccctgccccaccaggacctggggacacgggtgactcagacgtgactcaggaaggctcaggtcctgctggcatccgcagaggtgagacggtgatcagagctgggatgggagactccccaggcagaggggcacccgagaggaggcacaaggcccagcctggccgggctaggaagtatgaatggagaccagaagggtgaggacgggtgcatcgggtggccggaacacaggggcaggggcttggcggggagggcactgctagagagctggcaggtggggggccagttgctggcgtctaggggtggtttgcccatcctcatagggggccaaaccagggcccccggtgcagggctagagccagacccacattcctgaacctgctagtggagaagattccaggatcttctgacgatgtccgtctgcctccatcgcccccatcagagtttgctgcccagcctgggggggtgaggaggggagtggccatgcctgaccctcatgctgtgttttgagatataacatatagcccgggggtcccattcagtcagtgaacagacgactgagcccctaagctggtgccacatggggagaggggcaggaggccgtcagtgaaaccaggaggaggtgagagtggtcctttcaggaaaagcgaggtgtggggagcagtggccggaggctggcatggccagaggctggcatggctggcggtagagtccttctaggctgtactggcgggaggcgaccagggtggctggcgggggacactggcagatgggctgttgcaggtttgaggatcatcttggggtcccctaggtctcaggatgtccaaggcaagacacacagcctatggctggacattcagagcctggcggggaggctgcagatgagtgtgggaggtagcatttgagagggtcggcccctaggctgtgagctccttgaagaccgagtggtgcccagcaagggctggggtcactgctgtgacccggggcccttctctcccacagccccaccagcatgggcagcctcggccagagagaagatctccaagatgaggacaggaactcaggtgctgatcctgggcrgagggggcggtgcaggtgggagggattatgaagttcagggctggccaggcgtggtggctctcccctgtaatcccggcactttgggaggctgaggcgggtggatcacttgaggtcaggggttcgagagcctgggcaacatggagaaaccccgtttctactaaaagtacgaagattagctgggcgtggtggcgtatgcctgtaattcyagctacttgggaggctgagacaggagaatcacttgaacccaggagacccaggaggtggaggttgcagtgagctgcgattgtgctactgcactccagcctgggtgacagagcgagactccatctcaaaaaaaagaaaaaagtgcagggctgaggctgagacgggctggggcccccagacctgcacgtcaggccttgcctaggattctcatttggtttctagtagtctccaaccctagtactgactgggtttgggggatttggctcaggatttgggggctgcatgcccagaaagatctgggcygccagctggatgtatggccttggacacccaagagcccatcaccaagcctcagtttacccccctctgtaaaatgtacaggcctgaacggtctcccagggcctgttctctgcgtctcaggacaggcccctggctgggggtgtgggtggccactctcggaatccacttgtgccggcgccaactatgggcagggtctggtaggtccccaggtggtgcctgctgcccgactgtctgtttacgggctctgacatctcgggcctccccrgtgcctgggtcccacgggccccatgagccctcctccgggcggtcattaggggtgtttgtcctgggcctcgagctccagcgacgcccggctctctygctgcagcattcacctggaaggtccaggccaacaaccgtgcctacaacgggcagttcaaggagaaggtgatcctgtgctggcaaaggaagaaatacaaggtgggcggcccctcccgcgcctccctgctccagaggagctgccrtggtaccctcggggaatctattttttgctcctcctgagtcctgcctctgcttgtatttgctcgatagttttctttttttggttttcgttttctttttctttctttcttttttttttttgagacagagtctccctctgttgcccaggctggagtgcagtggcgacatctcggctcactgcaacctccacctccggggttcaagcaattctcctgcctcagcctcccaagtagctgggattacaggcatgcaccaccacgcctgactaatttttgtatttttagtagagacagtttcaccatgttggccaggctggtctcgaactcctgatctcaggtgatccacccacctcggcctcccaaagtgctgggattacaggcgtaagccactgcgcccagcctcttttttcttttttctgttttgttttaagatggagtctcgctctgtcgcccaggctggaatgcagtggcgagatctcggctcactgcaacctctgcctcccgggttctagtgattctcctgcctgagactcccaagtagctgggattacaggcacccacaaccacgcccggctaattttttgcatctttagtagagatggggttttgtcatgttggccaggctggtctggaactcctgacctcaagtgatccacccaccttgacctcccgaaatgctgggattacaggggtgagccaccatgtctggccgatatttttattttcatctcgaggacygaaccgcccgtcctaaccaaatcactggtttggcacaagagttctgtgtgtctcatttgccctgtcccagtgcacgtgagggtcagttaatacccaacctgaaagtacaatgtgtccatcgcggccctacctgaaatcctcttgggtgtcttgctttgggaaatgctggtcacagctccgtgagtctttgcactcagtagaagcttgattaatgctggctccaggcttttacattactgagcaggtgctcagtaaatgctggyctgaggccttgcattcagcaggtgctcagtwaatgctggcctgaggccttgcattcagcaggtgctcagtaaatgctggtctgaggccttgcattcagcaggtgctcagtaactgctggctcagtagatgcttaatgaatggtgtcccatagcccagaggatgctgggcgaggccaagtgaggcaggtctggcctcgggcacccccatcccctggcctggatggcacccctctgccaggcagcccgcggctctcgttccagaccaatgtcatccgcacggccaagtacaacttctactcgttcctgccgctgaacctgtaygagcagttccaccgcgtgtccaacctgttcttcctcatcatcatcatcctgcaggtgaggcgtgttgcctcctccaggaagtcccccctagccacctggcagcatcgatgtgtttgtctgtgtgatgggtgggttcacgtcccactccccacagactgggaccctcagcgctgagtccctactaccctgcccagggcctggcacacaagaggcgctcagtacatgttgaatgacaaaggtggatggatgcaccctccaggtctgatgacggcaccctctccacgccccgctggttcctgctgggcagggctgggcatcgggaggcatagctgttccccagcctaaacggcctcggccacgcagctcccctggcccccgccctcccagctgacctcagaggcgagggggaaggaggagcccagagcatgttctcaggacctgtggagccacttcccggtacctgggtggtccaggccagcgtggggccggcatccggccaggggcgctgttttcagagcaaacactctcacccaacatctcatttctgttctggatggagaggttctcctttcatccatcgagtcattcagcattaatggagtacctactgtgtgcaggccgctggccgggtgccagggtaggggatggtggagctcacacctgcagggtgacctggggaagcagggacatgggagggagggggagcagtggcggccaagcttggggctgggggaggctccctggagaaggcaccgtgggagctgggcttggacgggagaaggggagtttgctggggagacgaggcgtgtgggagaagttccaggcaggtggagggatgccggggcgtttgtcccgagggctgggggttgcaggagatggctggaccccggtcaaggtggccagcagatgtgtcacgtggtgtcgagtgcggggctaggtcggcttggtggaagggcaggggacgggggagtgggctggtgtgacccttcctgtggccccctcacgtcagagcattcccgacatctccacgctgccctggttctcgctcagtacccctatggtctgcctcctcttcatccgtgccacccgggacctggtggacgacatggtgagtgctgttggatgcagctgcctrggggagggagcggggccggtcgggggggtctcttgatccctgggcgagagtgggaggagggctgggcttcctggagcattaggggaacgtgggcctgggagcctcagctgctggggctacaytgtccttatctgctagcacccacattgggcaggtgccgcaggtggcgttggctctgtcggtgcgtggttttggggccattgagctttggtggggggtggtctggcaggcactctaggtggtgggcagcacgcctgtcttctccccgccaatagcagtgggtccagtggcccccacgtccgggatccctgagcagacgcaacgtggcgtggggccagcggacagggaccccgtgttgcgggcgggcactgctgggctgcagtgcggcagcrgcctgggcgggggcaggagaggctggacggtctctctgatcctttccctcctggcccaggggagacacaagagtgacagagccatcaacaacagaccctgccagattctgatggggaagaggtgaggctggggctgcagctggggatccgcggggacacgggggctccagcccagcagggtcatcggcctcggcaagtgtccatcaccttccgtgctccctgatctcccggctggttgagtccgacaggaaccgggcctgcattcattaggcgtttggccgggacgaggacagaggccgaggccctgatggcgaacccttgcagagcttagggctcgggcgatggggaggacaaggaaagtctgaagaggacgtgggtgcaggaccctggaggtcactgggtgggagcgtggacccgcggggagtggggtgggagcccggggaaggcttcctgagggggcaaaggcccggaggtggggactgcagctgcgggccccccgtcatcccgtgcctctggtctcccggtgtggggagggttggcagagggaggggcctccttcacaaccccctctccccgcagcttcaagcagaagaaatggcaggatctgtgcgtgggggatgtggtctgtctccgcaaggacaacatcgtcccagtgagctggggttgaccccgaggtcccagaaccacgcgccccctcaccgagagcacccctcccagggtggggagggctgccgcacccccaatttgtcttgcatcccctcttgcaacgctgccccccactccacaccaggccgacatgctcttgctggccagcacggagcccagcagcctgtgctatgtggagacggtggacattgacgggtgaggagctgtggcatcgctggggaccctggggggtggggagcatggcccggaggagcccccttccccagtcaccaaggaggcggccagccaaggtcgctcagagactttggtcactcaccccatgagtgtctggggcgtgggtgctgccaggcactgaggggaggaagacgcccaccctccccattgtttccattgtgtgcatacgggcaggaggccctaggccctaggccctggcctcagcactttgcaaatgtgctgtgtggccttgggcaaggccttctccctctctgggcctcagccatctgactggcagctggcgaactagtaggtgctcagtgaaaatgtttgagtgactccagaaggggtctgggggctcctcraagcatccatcaactccactttcacctccctcctctcctcgtcaccagggagaccaacttgaagttcagacaggccctgatggtcacccacaaagaactggccactataaagaagatggcgtcctttcaaggtgagaggcgttgagcagggagtcacgtccctcgaatctgtaaaagttaaaagttagggtattttgttgttgttattactgtttttaaaacaaggtgctggccaggcccagtggctcacacctggaatcccagcactttgggaggctgaggcaggagaatcacttcagcccaggaattcaagaccagcctggacaacataacgagaccccatctctacaaaaataaaacaagtagctgggcgtggtggcacatgccggtggtcccagctacttgggaggctgaggtgggaggctcgcttgagctcagggaggctgaggctgcagtgagctgtgatcacatcactgcactcagcctgggcaacagagtgagacccctgtgtcaaaaccaaaaataaagtgctacattctattaagtgtaaaatttaaccataacacagtcacgtttggttgtttcattgaaaaggcacctgcgtgcatgggctggcaattcctgtggtgggaaggcctctgagaacagagtgctgacacctccaatgcttggctgtttctttttctttttctttttttgagacggagtttcgctcttgtctcccaggctggagtgcagtggtgcgatcttggctcactgcaacctctgcctcccaggttcaagcgtttctcctgcctcagcctcctgagtagctgggattacaggtgcgtgccaccactcccagctaatttttgtatttttaatagagacggggtttcttttttcttttttttttttgagacggagtctcgctctgttgcccaggctggagtgcagtggcgcaatctcggctcactgcaagctccgcctcctgggttcacgccattctcctgcctcagccttccgagtagctgggactacaggcgcccgccaccaggctggctaattttttgtatttttagtagatacagggtttcaccgtgttagccaggatggtctcgatctcctgaccttgtgatccacctgcctcggcttcccaaagtgttgggattacaggcatgagccaccgcacccggccgagacggggtttcatcatattggtcaggctggtctcgaactcctcacctcaggtgatccacccaccttggcctcacaaagttctggggtgacaggtgtgagccaccacacccggcctgcttgacggtttcttattttccacctggagatgtttcacacgtgatgtggaaacagttactctttgctgcagcccagtctgggggtacagttttgtttggttttcttatcttattgtgaaggagagtcactctaattggtttgaggacagaatcttttccttgctcctgacacccaaagaggttttccccatctgtctgtgatatctggggaaaggcttagccctggtggagggggccacacccatcctctctaatttccctgacagtcccagaacttggctaaaggttcctttttttttttttttttttttttgagacagagtctcgctcttgttgcccaggctggagtgcagtggcgcgatcttggttcacggcaacctccgcctcccgggttcaagcgattctcctgcctcagcctcccgagcagctgggatcccaggcgcccgccaccacgcccagctaattttgtattttcagtagagacggggtttcaccatgttggtgaggctggtctcgaactcctgacctcaggtgatccacccgcctcggcctctgaaattgctgggatggcaggcatagccaccgcacccggccggcttccttctttaacaccactgggacacagamtcatagacaggcagcggctcttcctctagcatttcctcccgggctgagcaaggaggcttttgtgggccctggcctcgtccatctgccccagcattctcactgggcatagacccatttttcagaggaagacactgaggttcagagaggtggcctgaggtgtgggcttgccctgtggttctctgccctctggccgtcccaccatgagcgtctccaattcctgcatccaggatggagtcagggtccccatccctaagacgcgatggggaggcaggtgaggacccttcaggaaccctgtggcccctctctcttctggggtcccaacccatgccccattgtcattttaaccctcactgaatgctgccccgggccagtctgtgcagttctccaatgaagtgaggccattgcagggtgttggtgaatggggggctggtggtggtggtagacaggctccggcacccaaaaggaggctcatcgatcaggcgtcccttctcctcttccctcttgacacatttattgagcacctactgcatgcaggtgctggtccgtgccctggggtcagagtgtggccgagatgaggctggcaccagttctcatggagttcacagacattaacaatagctttgcacagataaatgtctcgtcacatgctgggatcagaaccacgagggagggagctaggagctaggaggggctgatctggctggaggatcagggaagtgtgagtccccgtggaaggaacagcctgcccaaagtccctgaggccaggtggggacaggaaggctttggaggcagcccagtgctggggcaccrtagggcaagtttggggcacagaggggctcgtgagggtggccggaatgttctcacctgcacccggtgcagggaacctggggaggagggcctgagcccactgacccactgaccacctggccacccacaggcacagtgacgtgtgaggcgcctaacagtcggatgcaccacttcgtggggtgcctggaatggaatgacaagaaatactccctggacattggcaacctcctcctccgaggctgcaggattcgcaacacagacacctgctatggactggtcatttatgctggtacggctgctccagggtcctggagtgggagctgtactgatgggagcgtggtagatggatgtggggatgggtgggtgggtaggtgggtggatggatgtgtgagaggatgagtgcatggatggatagacaaatagatgggcagatgggtgggtggatggatgtggggatgggtgggtgggtgggtgcctggatgtggggatgggtgggtgggtgggtggatgagtggggggtgggtggatgggtgagtgatgggtgggtaggggtggaagggtgggtgggtgagtgatgggtgggtgaggggtggatgggtgagtgatgggtgggtgaggggtggatgggtaggtgggtggatgagtgggggagtgggtggatgggtgagtgatgggtgggtgaggggtggatgggtgggtgggtgggtggatagatggatacatgtttgtaggttttgacacaaaaattatgaagaactgtggcaagatccatttgaagagaaccaagctggacctcctgatgaacaagctggtggttgtggtgagctgccaacaagtgcccctgccccaggaacacagaggagtgcagggtcagggatgtcatcttccaggcctcagtttccttcttctgcaaaatgtgcggcctgatcctgtgggcaggtctttgggccagaaaatttttcattaaagtaattttttaaaaagttttataaaataataataattatgtatttatttattttttagagatggagtctcactctgtcaccaggccggagtgcagtggcgtgatcttggctcactgcaacctctgcctcccgggttcaagcaagtctcctgcctcagcccctcgagtagctgggactataggtgcacgccgccacgcctggctaatttttttgtattttagtagagacggagttttaccatgttgcccaggctggtctcgaactcctgagctcaagcaatccgccctcctcagcctcccaaagtgctaggattacaggcatgagccaccgtgcctggccagaataaatatatttttaggctgggtgagatggctcatgcctgtaatcccagcacgttctggggccgaggtgggtgaatcacctgaggttgggagtttgagaccagcctgaacaacatggtgaaaccccgtctctacagaaaatcgaaaattagctgggcgtggtggctcacacctgtaatcccagctacttgggaggctgaggcaggagaatcgcttgaaccccagaggtggaggttgcagtgagctgagattgcaccactgcactccagcctggacaactgagcaagactctgtctcaataaataaataaataaaaataaaaataaataaatgtttttcggctgggtgcagtggctcacacctgtaatcccagcaccttgggaggctgaggcaggtggatcacgaggtcaggagatcragaccatcctggctaacacagtgaaaccccgtctctactaaaaatacaaaaaattagccgggcgtggtggcgggcgcctgtagtcccagctactcgggaggctgaggcaggagaatggtgtgaacccgggaggcggagcttgctgtgagccaagatcgcgccactgcactccagcctgggagagagagcgagactctgtctcaaaaaaaaaaaaaaattaaaaaaaaaaaagtttttctatctcactctattgcccaggatggagtgcagtggcgccatgatatctcactgcagcctcctgggctcaagcgatcctcggcctcagccttctgagcagctgagactacaggtgtgcgccaccatgcctgactaatttattttttaagtttttcgtcgagatgaggtctcactttgtcgcccaggctggtcttgaactcctgacgtcaagccatccgcctgccttagcctcctgaagtgctgagattacaggcatgagccactgtgcccagccccagccttatctttgtgtttaccccatcctgatggcagagtgggggacccccgcccccctcacccaccctgtcgcgtctgccttccagatcttcatctccgtggtgcttgtctgcctggtgttggccttcggcttcggtttctcagtcaaagaattcaaagaccaccactactacctctcgggggtgcatgggagcagcgtggccgcagagtccttcttcgtcttctggagcttcctcatcctgctcagcgtcaccatcccgatgtccatgttcatcctgtgagtctccgccggctgcgtccccggtgcaaacgcggaacggggaggcatggggatggcacacagcaggcggggctgacygtgaccctgagtgcctctgcaggtccgagttcatctacctggggaacagcgtcttcatcgactgggacgtgcagatgtactacaagccgcaggacgtgcctgccaaggcccgcagcaccagcctcaacgaccacctgggccaggtggaatacatcttctcggacaagacgggcacgctcacgcagaacatcttgaccttcaacaagtgctgcatcagcggccgcgtctatggtgcggccccgacacctgagctcccagctgggtcctcgatcttcaaggggctcagggtgcctgagaaccagagccacgtctggccccatgcccagcacctccgcccgaatctgaaccagggaaccgtagccagatggcctggtttcctttggagggggccaggaaaatttttttttttttttgaggcagagtctcactctgtctacccaggcaggaatgcagtggtgcaatcttggctcactgcaatctccacctcccaggttcaagcgattctcctggctcagcctcccgagtagctgggattacaggcacctgccaccacacctaatttttttgtatttttagcagagatggggtttcaccatgttggccatgctggtctcgaactcctggcctccggcgatccacctgcctcggcctcccaaagtgctgggattacaggcgtgagccaccacgcccggccgactttttttttttttttctctctgagacggagttttgctctcgttgcccaggctggagtgcagtggtgcgatctctgctcactgaaacctccgcctcctgggttgattctcccgcctcagcctcccaagtagctgggattacagttgcgtgccaccccgcctggctaatttttgtattttttttttcagtagagatggggtttcaccctgtttcccaggctggtctcgaactcctgacttcaggtgatctgcctgcctcagcctccaaaatattggcattgcaggcatgagccaccacacctagccaaacttttaaacagtgtgtatttatttattttttgagatggggtcttgctctgccgcccaggctggaatgcagtggtgcaatcatagcttattgcagcctcgaattcctgggctcaagcaatcctcccacttcagcttcccaagtagccgggactacaggagagtgccaccttacccagcttatttttgtattttttgtcaagacagggaatccctatgttgcccaggctggtcttgaactcctgggcttaagcgatccgcctgcctccgcttttcaaagcactggaattacagatgtgagccaccacacccggccactgctcttcttttgactttcacaagcctttatttgtggatgctgaaattcgaattgctgagtatttctcagatcacaaaataaaatagttttgtttgtttgtttgttttttgttttttttttgagacagagtctcgctctgtcgcccaggctggagtgcagtggcgcgatctcggctcactgcaagctccacttcccgggttcacgccattctcctgcctcagcctcccaagtagctgggactacaggcgcccgccaccacgcccggctaattttttgtatttttaatagagacagggtttcaccgtgttagccaggatggtctcgatctcctgacctcgtgatctgcctgcctcagcctcccaaagtgctgggattacaggcgtgagccaccgcgcccggccacaaaacagtattagtattattctagtcattttttttcctgaccattaaaaatccaaaaacaattcttagctcgcaggccgtacaaaaattgatgatgtggtggggtgtagtttgacagccccgggtctaatttataaccagggcacgtggtttggactgggtcataatttagtgtagtgagaagtccccaagaaatggttcaagttcagctatagaaaaatgggcccgaggttgaggcgggtggatcacctgaggtcaggagttcgagagcagcctggccaacatgacaaaaccccgtctctactaaaaatacaaaaattagccaggcatggtggcaggcacctgtagtcccagctactcaggaggctgaggcaggagaactgcttgaacccggaggtggaggttgcagtgagccaaggtcacgccactgcactccagcagcctgggtgatagagagagactccatcacacacacacacaaaagacaccacaaaggggtggcatgcacctgttgccccagcaacttggaaggctgaagagggaagatgtcttgagcccgggaggttgaggctgcagtgagctatgatcgcaccactgcactgcagcctgggccacagagtaggaccccatttctaagaacaataaagcataaaaagtggctgggtgcggtggctacgcctgtaatcccagcactttgggaggctgaggcgggcggatcactggaggtcaggagtttgagaccagcctggccaacatggtgaaaccccatctctactaaaaatacaaaaatgagccaggcgtggtgacatgagcttgtaatcccagctactcgggaggctgagacaggagagtcacttgaacccaggaggctgaggttgcagtgagctgagcttgtgccactgcactccagtctgggcgacagagcaggactctgtctcaaaaataaataaataaataaataaataaataaataaataaataaataaaaataaaaaagaacaaaaaccccaggaggaggaaacaaagtgtgtcccacggatggggctgcatcccgctccaggctgtccttttggggtccctgggagacaggaaggggccacatcccgctccaggctgtccttttggggtccctagcccgcatcccgctccaggctgtccttttggggtccctgggagacgggacggggccgcatccggctccaggctgtccttttggggtccctgggagacaggatgggtgtgctcccctcttccccgctttctgcaggtggtggaaactgaggtcagctttcgccccaagattgctcggggtgtcggttccagggccacaggcctggcttgtgtggctgcaccagtggcccccggaagcctgaaactaggggtcaggggctatgggatcccgaatggggggcctgtgggagctgaagcaggaagctgtgtctttccccagggccggattcagaggccacgacccgacctaaggtgagcctgcctggcttgcagcgcgggacggtgagggggacggggcacggggagcggcccacccacagccggcccgtgcccccgccacccccaggagaacccctacctctggaacaagttcgccgacgggaagctgctcttccacaatgcggccctgctgcacctcgtgcggaccaacggggacgaggccgtgcgggagttctggcgcctgctggccatctgccacacggtgatggtgcgggagagcccccgtgagcgcccaggtgcgcccacccacctccccatctctgaggccgctcagcccccggggcacggcagtgtccccagccccgcagctcacccggcccatcttccagggctttcagctggcttggggggcgctgaggccggtgtgacaccagccgcacctcgagggcgtccgggcctggagcccagacagtgctgacaagcatcgtggcgggagggcggacgtgtcatcgtcagggctaaaggatgtccaggcctgcggtcggagcccgaggatctgttgttgagcgggaaggtcgtctagtctcaagtgctcacctccatgcattgggttgtacaggcgggggtccccggccaccatcaataaaggtgtagcccaggcgatacccatctcctccctgcactgtggagatggagacgggctccaccacgtgaccccaaaatggcccccctccctaccagaccagctgttgtaccaggcggcctcccccgacgagggggcgctggtcaccgcagcccggaacttcggctacgtgttcctgtcccgcacccaggacaccrtcacgatcatggagctgggggaggaacgggtctaccaggtcctggccataakggacttcaacagcacgcgcaaacggatgtcggtgctgggtgagccccgccacccaagccctgggccccccaaggtggggcgggcagacggggagcctctgtgggcagcagggcctgttcccccacagttcgaaagccagagggcgccatctgcctgtacaccaagggcgccgacacggtcatcttcgaacgcttgcacaggaggggggcaatggaatttgccacagaggaggccttggctgtgagtcccttcaggaaggctggcttatgtgtgtgtgtgtgtgtgtgtgtgtgtgtgtgtgtgtgtgtgtgtgtgtgtgtgtgtgtgtgtagggacaggaggaggaggaggcaggggaggagactgtacggagaaatggaaggctgcaggtacctgggatggctatgtacagtgaggtatgttgtgcactgtacaaaacaccctcccccggcaacacacaaaacacacacacaccggctgggaggcagctgaactcccaagtgtagcccccagagagagagcgtctttttctttttcttgtcttgtctttcttttcttttctttgagacagagtcttgctctgtcgcccaggctggagtgcagtggcacagtcttggctcgctgcaacctccgcctcccgggttcaagtgattctcctgcctcagcctcccgaggagctggaattacaggcacacgccagtgcacccagctaattttaatatttttagtagagatgggttttcgccatgtgggccaggctggtcttgaactcctgacctcaggtgatctgcccccttggcctcccaaagtgctgggattacagrcatgagccatcgcgcccagcctgccttttcttttttgagagggagtcttgcactgttgcccaggctggagtgcaatggtgcaatcttgagtcactgcaacctctgcctcccaggcttaagctatcctcctgcctcagcctccysagtagctgagactacaggcgcccgccaccacgcccggccaattttgtatttttagtagagatggggtttcaccatgttgccaggctggtctccaactcgtgacctcaggtgatccacccgcctcgccctctcaaagtgctgggattacaggcgtaggccaccgcgcccggccaagggtgtatttttctcatttgcacaagacgaccgtgcggttgagctggcccagctgccaggacacactcagctccgtctgctccaaagcttcccactctgtgggggaagcccgaactcctcggcccaggatttgaggctttttctgtcccctgctgacctctccagcctggtctctctttggcctcaccaagggactccctaggacccagtttctggcttgtgacttccccactctcaggtgctgccttggcacctttgcacatgctgtttcctgtgctgggagggtcttccctgcacctttgtcattcagaagctttcggtgtcctcatgactcagccacaagctccccacacatggggcctttcctgccccaccccctgccaacatggggctgtcatcaccccaggctgcctccccctggtccagccctgaccctacagggccagaggattctgcgtccagcctgggggctcctcacaggttctgctggggccccagcagcatggagcacagggcagcggggtgtgtgtgggaagatgtcctgtgtcccctgctctgccaggatgtgggggcactctgaactggaagtgcggtcacaataatgacctagagcccaggagctcagcaggtcagcttagctcagccaccccagggaatggatgggtaaattgaggccggaagaagggtcaaggcctgtcggaggctgccaatgtccgtgaagctcctctgctgtgtcaagcccaagctcttggacccgtgccccatcaacaacaaaagggaaatcagacatggtggcgcgtgcctgtggtcccagcactttgggagcctgaggcaggaggatcgcttgagtgcaggaggtggaggctacagcaagctgtgatcgcaccactgcactccagcctgggcgacagggcgagacccctgtctcttaataaacaggctggcgcgatggctcacgcctgtaatcccagtgctttgggaggcgggcagatcatttgaggtcaggagttcgaggccagcctgaccaacctggtgaaaccctgtctctactaaaactacaaaatcagccagatgtggtggtgcaggcctgtagtctcagctactcgggaggctgaggcaggagaatcgcttgaacccgggaggcagagcttgcagtgagccaagatcgcgccactacactccagcctgggcaacagagtgagactccatctcaaaaaataaataaataaaaataaataaataaacaaatttgagacctaaggccaccccttggagcacaaagctgggggcagggtcggggggtaagaagccgtaagggcaccttccttggggaccccccgaccacccttggggtgcctgctctctgggcctgcccagtttcctcccagcccctagaggccccaaccctgggtctggcccttgagaaatgaggggcccaaggaaggggctcagagagccaaagttgaggggtcagagggaggggcctgggactgggggagccccagctggggaaggcaccgggtgggtggactgcatagaaggtcttgagtgatagtcagaattcgccatgcaggccaggtgtggtggcttctgcctgtaatctcagcgttttgaggctcaggtgtgcagcttgcttgagctctggagttcgagaccagcccaggcaacatggtgaaaccacctctatttaaaaaatatatatatatacaaagaaattagccgggtgtgatggcatgtgcctatgatcccagctatttggaaggtagagacaggagaatcacttgagcccaggagttcgaggctgcagtgagctatgattgggccactgcactccagcctgggtgacaaagtgagaccctatcccccacccccgagaaaaaaaaaaaaaaagaatttgctgtgcaaagcatagggaaggtgttcctggcagggaaacagtcctccaagaaggtctggaggcaaaagagagctgagagtctgggggtgggagcaggtgtctgagacagagtaggtggggagcaggggcagctcagttttcttttctttttttttttttgaaacagaatcttgctctgatactcaggctggagtgcgatagggcgatctcagctcactgcaacctcggcctcccaggttcgagggatcctcccacctcagcctcctgagtagctgggattccaggcatgcgccaccacacctggctaattttttatgtgtttcgagtggagacgcggtttcaccgtattggttaagctggtctcaaactcctggcctcaagtgatccgcctgcctcggcctcccaaagtgctgggattacaggtgtgagccaccacgcccagccctcttccccrctttctttctattgttttttctatttttttttttttttttgagatggagtctcactttgtcgcccaggctggagtgcagtggtgtgatctcagctcgctgcaacctccgcctcccaagttcaagcaattctcctgcctcagcctctcaagtagctgggactacaggcacccaccaccatgcctggctaatctttgtattttgggtagagacagggtttcaccatgttggccaacctggtctcaaactcctggcctcaaatgatccgcctgcctcagcctcccaaagtgctgggattgcaggcgtgagccaccgtacccggcctcagaccagttttctgaatcccttctggctgctgttggctggggaggcaacaggcttttggttgggggacccaggctccggagcccggcagggggttggggagggckgagcctcggatgtcggcttcagcatggtgacagcttccacctgcccggcccccaggcctttgcccaggagaccctgcggacactgtgcctggcctacagggaggtggctgaggacatttacgaggactggcagcagcgccaccaggaggccagcctcctgctgcagaaccgggcacaggccctgcaacaggtgtacaacgagatggagcaggacctcagggtgggtgggcagcgggggcacccaagggggccctgggactctcctgcycccgccagggagctggacggctgctcagcatcttccccgccctgccctcctcccccaccagctgctgggagccacagccatcgaggacagactccaggacggtgtccctgaaaccatcaaatgtctcaagaagagcaacatcaaaatatgggtgctcaccggggacaagcagggtgagtcccgggcagctccgggtggctaagcccctgcagcatgggtcttcaaacttccctgaagtttgaaggctcacacctgtcatcccagcactttgggaggccgaggcgggcggatcacttgaggtcagaagttcgagaccagcagggccaacatggtcaaaccccgtctctgctaaaaatacaaaaatgggcctggccaggtgtggtggtgcgcatctgtaatcccagctactcaggaggctgaggcaggagaatcgcttgaacctgggaggcagaggttgcagtgagccaagatcgcaccattgcactccagcctgggcgacagagcgagactctgtctcaaaaaaaaaaaaaaatgctgcaactctcagaggagcgcagtggcacatgcttgtggtctcagctactccagagaaacgaggcaggaggctcgcttatgcccaggaggttgaggctgcagtgagccgtgattgcgccactgccctccagcctgggtgacagagtgagcccttgtcaaaaaaaaaaaaagtgattttcagggtgccctctgtcggccaggagccagcccagggaaacatattcaattatttcccttctgatttaaaaagatattgagacattttgtgggttcctgaaggcactgtggatcctaggcacatgtgcctgctgatcctggcctcagacacatctctgggcagcccagtcccggccagaactacagccaaaatctcagggctggctctcattggtgagcctgggttacaagcccttctctgaaccaatcaccatggccagggggtggggcatgtggctgccattggtcgggccaggattcaccgggcagagtgggcgtggcccccaggcagccagtgcggggcgggtcgcagaggcgctgagctggtctgcttcgcagaaacggctgtgaacatcggcttcgcctgcgagctgctgtcagagaatatgctcattctggaggagaaggagattaggtaagaagtggggagttggggggtgagcaaggggagtggggaggtgaggacaaggagcacccaggtgcgtgtctcactggacggggagcccaaggcacagtgggaagggggggattgagaggggagggaagggtaggaggaaggagtgtggtaatggggagtggagggagcttggagggaagggggaggggcagtggagggagaaggggagaggcagaggagggggaggagcagaggagggagggggaagagggagggaaggtgagggcagggggaggggcaggggtggcgaagtgggcagtggagggagagggtaggggagagggaagggaggggaggggagaggggaggggagagggaagggaggggagggggaggtgcaggggtgagggagtgggcagtggaggggaaggatgggggcagtggggaggaggggaggggcagtggagggagggggaggggagagggaggggaggggggagcagcggaggggagtgggcggtggagggggaggggaggagagaggaggcagaggggaggagagagggaagggggaggggcaggggtgggggagtgggcagtggaggggaaggggaggggcagcggcgggaggaggaggaaaggggaggggaagagggaagtggggaggagaaggggcaggggtgggggagtgggcagtggaaggggtgggaggggcagtggagcccccggggaagtggggagaagcccgccccctcccctgccccgctgacccctgcgccccgcagccgcatcctggagacctactgggaaaacagtaacaaccttctaaccagggagtccctgtcgcaggtcaagctggccttggtcattaacggagacttcctggtcagtgtcgctcagggtggacggcggggtcccggcgccagggaggggcctggaggggcggcgggctcggggtggggactgctggcgaggccgagggccgggtagggtccagtctggcctggaggccacggcgcctggcacagccccctccccgccggccaggacaaactgctggtgtccctgcggaaggagccgcgcgccctggcgcagaacgtgaacatggacgaggcgtggcaggagctcggccagtccaggagggatttcctctacgccaggcgcctgtccctgctgtgccggaggttcgggctcccgctggctgcaccgccagcccargactccagagcccgccgtagctccgaggtgctgcaggagcgcgccttcgtggacctggcgtccaagtgccaggcggtcatctgctgccgcgtgacgcccaagcagaaggccctgatcgtggccctggtcaagaagtaccaccaggtggtgaccctggccatcggggacggtgccaacgacatcaacatgatcaagagtgggtggcggcggcggggctgggggtgcctgggacgagtggggggcggctgacggaggcggtggtgggactggggggacctggggcaggtgaggggggcgctgatggaggcggcggtgggactggggggacctgaagcaggtggggggggctgatagggggcagaacagtgcgggggtctgggggggcgggcgggactgggggcgtgcggggggctgaccagctgcttgtgccctgcagccgcggacgtgggcgtggggctggcgggccaggarggcatgcaggcagttcagaacagcgacttcgtgctcggccagttctgcttcctgcagcgcctcctgctggtgcacggccgctggtcctacgtgcggatctgcaagttcctgcgctacttcttctacaagagcatggccagcatgatggtgcaggtctggtttgcctgctacaacggcttcaccggccaggtgcgtcccccaccctggctgccccatgaccagggcctctggggatgccctgcccctcccatagctgccaggagcagccctggacgcactgagaaccctgggatcctcggtggacagggcttgcctgaggccacatggcaaggctgcgttagtggaggcctagagtccaggtgaagggaggtgacggtccctgtctagctctgtgcccaacaccttccaggatatttgtttcgttttgttttgttttgagacagagtctcactctgtcacccaggctggagtgcaatggcacgatctcggctcactgcagcctccgcctcccgggttcaagtgattctcttgcctccacctcccaagtagctgggattacaggcgtgtaccatcacgcctggctaatttttgtatttttagcagagacagggtttcaccatgttggccaggctggtctcgaactcctgacctcaggtgacctgctcactttggcctcccaaagtgctgggattacagcgtgagccaccgtgcccggcacactcagagctttcaagcaagggcaggcactgcacatggacctcctcttctggggagagttgagtgaacaagaccttgaaccccagagaagatccgattgtgggagctggggctctggtcmagactctgagcggtatcctgacaaggactagaggagccccagggcagtgctattccctgcgtgtagggaaactgctgggaagcaggtgccttggagaaggaatgagctcccatcactaatacctgggcatttgagagggagctttacagaaaccccttagtaagtatatattggtttctgttttatttttattattattaccttttgagacagagtctcactctgttgcccaggctgtcgtgcagtggcatgatcttggctcactgcaacctctgcctcccgggttcaagtgatcctcctgcctcagcccctctagtggctgagattacagrcacctgccaccatgcctggctaatttttatatttttagtagagacagggttttgccatgttggccaggctggtctcgaactcctgacctcgtgatctgcccatctcagcctcccaaagtgctgggattacaggcatgagcaatcgcacccagcgtttttttttttttttagacagagtttcacacttgttgcccaggctggagtgcaatagtgtgatctcggctcactgcaacctccgtctcctgggttcaagcgattctcctgtctcagcctcccaagtagctgggattacaggcgcctgctaccacgcccagctactttttatatttttagtagagatggggtttcaccgtattggccaggctagtatcaaactcctgacctcaagtgatctgcccgcctcggccttccaaagtgctgagattataggcgtgagccaccgtgcccagcctgtatccttttttgatgccatccaattaaaacaaaaactcagaggtgccattatgagggaatttgatcatgctttcctccctccctttatcttgccgcctttatcaggccgcacttcaccccaccccagtcccagccccaaccttgagtgtaactcgaccagagttacctcacccagaaccctccctgggtgcctgcttggcaggctccttgggtgcctggaggctgacttgttctccttgcccttctcccccggctcagcccctgtatgaaggatggttcctggctcttttcaacctcctgtacagcaccctgccagttctctacattgggctctttgagcaggtgagcagggcaaggccgggtcttccttccaggtctctgcttagcctctcctcctctcctccgctccttggggcggggagagggagcctgggagaccttcaggccatggggtggggctcagggggtgcagtccagtacctctccctgcccactgccattgaccttctcccaccggagcctacgctcatcccggggccatccagctcctcctgtgtgtgggagcccccaccctgtgctggagcccccgtgcctctgtctacccatccatgcaatggggagagaggatcagagcagatgactctgctaggtttatcatcccccagctccaagaggccccggctacgtgatctggggttgggagggtgggtcacatggaacgttccagatgatggaagtgtcccacagctatgcaatccaacacagaagccagcagccatacgtgcccatgaggaacgcttgtgttgcggctggtgtgacccagggactggattttacatctcatttcatgtttgctagaatcttttttttttttttttgagacagggtctcactctgtcgcccaggctggagtgcagtggcacaatctcagctcactgcaacctctgcctcccgggttcaagcgattctcctgcctcagcctcctgagtagctgggattacaggcgtgcaccaccatgcccggctaatttttttatttttagtagagacaggatttcgccatgttggccaggctggtcttgaactcctgacctcaggtgatcctcccacctcggcctccccaagtgctgggattacaggcgtgagccaccgcacctggccttgctggtatctttaactgtggtggaatacaaatcacgtaaactgccccgtctcagccagactcatgcgcacagcccagcatcacctagtgcgttcgtgtggccaagtgaccaacctccagagctctttccatttcattttattttattctgtagacgaggtcccattctctcacccaggctggagtgcagtggtgcgatcacagctcactgcagcctccactcctgggctcaaatgatcctcctgcctcagccgcccaagtagatgggattacaggtgcgcaccaccacacccagctcctttaaaaggtttttttggagatggggggtttcactatgttgtccaggctggtctcaaactcctggccttaagcgatcctcccaccttgacctcctaaagtgctgagattacaggcgtgtgccaccgtgcctggccttactttattttaactcacttaaactcaaagagccacacacagagagtggccaccctactggcctgcccgaggagrtcctgatctctgttgggtgtcccccgccccccaccmaatcccaagagcttctgcttgccccaaggacgtgagcgcagagcagagcctggagaagccggagctgtacgtggtggggcagaaggacgagctcttcaactactgggtcttcgtccaagccatcgcccatggtgtgaccacctctctggtcaacttcttcatgacactgtggatcagccgcgacacggcgggacccgccagcttcagcgaccaccagtcctttgcggtcgtggtggccctgtcttgcctgctgtccatcaccatggaggtgggcaaggtcctcacctccccggggccttggacatggcctayggaggcctcctcccctggggacccctgctttgggggcattgccaggtgcccttcctggaccccaggggctggtgtcctggtgcaagccccgctaggccccggatttaccccaccgctgcctgtccaggtcattcttatcatcaagtactggaccgccctgtgcgtggcgaccatcctcctcagccttggtttctacgccatcatgactaccaccacccagagcttctggctcttcagagtatcccccacgaccttcccgtttctgtgtgagcccccatggggaagtgggacgggcggtcgtggtgcaggggagccccgatggaagaggttgcaggttgctcatgacagtcgtccggcaaagtgtcctggggaaggcgctcctttatggaccaggcacaaaggcaccaaggcgctccctagcctgggggcatccttggagctgggggtaggctctgctgtgaccccgccctgtccccagatgccgacctcagcgtgatgtcctctccctccatcctgctggtggtcctgctgagtgtgtccataaacaccttccctgtcctggccctccgagtcatcttcccagccctcaaggagctacgtgccaaggtgaggtgggcctgggcctggggtcctcatctggtacattccaggaccctggttggggagccgtgcagggcgtagggactgcaaggtgtcccggcccctctcggccctccaagacactaggcttgggggaagggtgggtgcggagccccggacacacgcccagtgcccccggggcccgatttcccaagaagggagacctcactcccccgacaaagcagcagagagcacccaaacgccgccctggattccagtgctgatgccatcgggctcttaaggttttatttatttatttatttttactttttgagaagggtcttgtgctgtcacccaggctggagtgcagtggcacaatctcggctcactgcagcctcgaccttccgggctcaaaggatcctcccacctcagctttccaagtagctgagaccacgggcatgyaccaccacgcccagctaattttgtagttattttctagagatggagactcattatggtgcccaggctggttcaaactcctgggctcacgcaatcctcctgccttggcctcataacatgttgggatttcaggcatgagccacactgtgcctggctgacaccatcagattctaccgtgaatgatctagagcttgggggttgagatgacggaaacaaccttgaaatggtttaggcaaaaggaggaacttagaaataagagtctgttgacagatgagtgggtcaacacggcacgctccatctgtgcaatgaaacacgcctgagccgtgagaaggagtgaggctctgacacaggccacagcgtggatgcaccttgaggacatgtgctcaaggccaggcgcagcggttcacacctgtaatcccagcactttgagaggctgaagcaggtggcttgcttgagcctgggaggttgaggctgcagtgagctatgatttttgccactgcactcctatctgggcaacagagcaagaccccacctcaaaaaaaagggaggggacttactagcccacgtaaccaaagcatgcatggaaaagcaggttgcagctgagatgggccccagaattgactggaatggtgtacctgccctgccacctctgttctccctgcccagctcctgccacctttactgcacaggctgggcacctggctgtcccaggctcacctctcctggatttgccaccaaagggcagccaaggcacctggtggctggtccagagtcggggaaggactctgattggctgagccagggttaagtcccagggaaggactctgattgggtggtcccgagttaagtcccagggaataactctgattggctgatccagggttagtttccagggcaaggccaattagtgggtcttgaaaagcaaaggactagagtcctccttagaactcaacactgagagtcgaggactctaattggctcaacttgggtagggaagaacgtagccaatcaatagtggccaagggctttgaatcctgcctctcctacttgggggacctgagagccatcagccaagcataggagtctgcttcccctgctctcccctttgctcttcaggaggagaaggtggaggagggccccagcgaggagattttcaccatggagcccttgcctcatgtacaccgggagtctcgtgcccgccgttccagctatgctttctcccaccgtgagggatatgcaaacctcatcactcagggcacaattctgcggaggggaccaggggtcagcagtgacatagcatctgaatccctagacccatctgatgaagaggcagcttcgagcccaaaagagtcacagtgacacctcaggaagatgtccttcctggggaagaagaagcaccagccacaggggcaggtgtcctcccaggaagtacagctcccccctacacctagctcatcattttctatggatagacaatccgctcttcatccagaaaaccaacctgccctccccaaatatgtgctcaccagcagcaacaggctatctgagtctttccaagagcaattgccaagggcacaggagaggtcactgtcacccaagcagaggccaccttctcctgagaagttgctgttgaccaaggagaggtcacattcttttcaggagaaatcactgttgcacagagaaagccagctgtcgtcatttgagagccagccacagcctctggggagccagtcatttctttcaggccagctgacgttggagagccagccagactcctcggaggagaagtcagcatttttgaagccctccacaccgttccggaagagctggcaaaaggagcctcacacccccaaggaggggacggtgccacttccagacaagacccacaaatctcaggtggagactctgccaccaagtctggaagaatcgtccacgtccacgagcgagcagcctatggaggtggagctgtggcccgcggagaagcagtcatcatcatccatggagtggctgctggtgcccggggaggagcagctatccttgcccccagaggagcagtcattgccctctgcggaggggaccagggttcagcagtgacgtagcatctgaatccctagacccatctgatgaagaggcatcttcgagcccaaaggagtcacgctggcatatcaggaagatgtccttcctgggaagaagaagctccagccagttctgctgcaagtcaaccagcatgcagggggccttcctctaaagacaaggactccacatgcttttctttttctaataaaccagggtccatctgaccccagcgctaattcaggctccctctttccctacactttttttgtgatggaatattccttcccggtttttaaaatcaaaacactgacctctagtggtccagccgggtatttgcagggaaaactttccttcttcatgctggggtaagataatgtgggtaaagcttcattgctctcaaaagttgcttattaaaagctgtggctcccccactgcctgacagctggcccctcccaagaaagtttataaattccagttcttgtaccatctagcttcttcctctatcgggaagccctggtttctcccattcaaatacaccttcattcactggggcctccgttcactttagactccagaaagcaatgagcagtgatgtcacagaagcaggtcctgacaaggtgtgcatcttggggcttggttgactcaaaggcgccaagcttttccttttaaggcgccaagcttttctttctgattctttttttttttttttttttttttttttgagacggagtctcactctgttgcccaggctggagtgcagtggcgcgatctcggctcactgcaagctccaccttccgggttcacagcattctcctgcctcagcctcctgagtagctgggaatacaggcgcccaccaccatgcctggctaattttttgtattttttagtagagacggggtttcaccgtgttagccaggatggtcttgatctcctgacctcgtgatccgcctgccttggcctcccaaagtgctgggattacaggtgtgagccaccgcgcctggcctctttctgattcttaccattccctgtgggtggtggacttgtgtgggtggtggagttgtgtggattgtggaggctcagagctggccactggcccaggaagaagacgggactcagagcagagaggggcgagctgggtggaagcaaagtccgtcttccctgcactccggtcctccctccccagcctcgaggtgggcgagttccattcccgccccctatctgtgcccgacccgtcagctaacacacacgcccaggtgagtgactagaaaataatttattgaagaaaaacaaatcaacaaacccagcacagcaatggttaacaatgacgagatttttttttttttttttttagcttttaagcctgtcgcccaagggtgaaggtggaaaagggcttctctcccctgtccctggaggggaggggactttggagggtccaagtggtgtctcccctgaaagcagccctcagttccagtctattcaaaacactcaaggccgcagggcctcctggctcttccgtcacccccggctgagctcattccaccaaaaccagcccctgcgtggtctgacagggccacgaggaggagccccaggagtctactggcctgattttgcttaaaccgcttggggcagagaatgtgaaatggcccaagctcctgctggtgcaaggagcatcctggccccggcatcatttcagatttgaggtcagctgagccctcagccccaggcccagccctccagaccagggctttctgctttatggggtgagaagcaccccgtttagctaccccgcccccccctactggggcctgtcccaaaagcggcccctctcatctctcccctgccgccctctcctccagcctctgttcccaagctggcacatctgtgcccctttccacctccagggactatctggggatggctcagggacgtggcctcatggcacaagaggagtcagaggcagaggacattgtcccagagccccctttgatgattttggggagtcctctgttctgtaggctccgaaagtgggctgggagggaggggtctctgcaggcgtacaccccctgcctcccgggctggacagaaaggcggactcatgcccagcccagggagggaggccgaggctgtctgggtggaggtggggggggagggggtgctggtgcctgctgttggggccctcaggagggtccttcagatctcaggaagttggggcacactcccgtcccccaccaccctgggcaacaagacaagaataggctgattgtctgtctcctctgaacaagacacttgggaattcatgctagagtgaaagcaaccgggtgatggggggttgggggggtctaagatatcgatgacaccagagtgcccccaagaaccaggaactgagggggggacgctcggtggctcccgcctggctggggcaggcaggtggcatctcgggtggagatggacaggcaggtggaggagacccggctactgaggctctgttcccgccccctctacctggggccccgtccacctgtcccggctggacacagttccttagaaaggaggaaagaaacagtaacgaaaaaccactgaacagcaccgatcaggcaccagacacacagatgcgacacggaaccgggccacgccccccgccccccaccctgaccactttattacaattagcgtcaagaaagagtacattagtcatgcaccaactcaaattccattttgtcttttttttttgcatttttcttcctttttttttcttaaattacatttgaacacagaacacagagaataataaatactcttataagacatgactccagaaaacaagaaacagaacaagccagagaacagaaaggtatacctctgcctctctctctccctctccctctctctccctctctctctctcttgctctcgctctctctctctcttcctttctttcctaaaggactcatttaaataagaaatctgtaaacgccactggtcctttctgccgcagtctctctcgcgatcacgctccctctaactttccctctggtctccagccctgacattcaatgcgtctcccacggaactcgtcaaagaaacgacatgccatcgtctgcaaaattataatttaacggtataaa

SEQ ID NO: 94528 - DNA, 466120 bp, Homo sapiens
  misc_feature (1)...(466120): n = A,T,C or G
ctccagggtctctactctgctaagagctgcagagaggatggcatgggctgccagcagagaggagccacccaacccagagcctcctcctctctgctgaaggctgaacactcgttggaacatcctagctgcagaaaggagctacccacagcaggtctctgagctcttctactgctcaataaagcttctcttcatcttgctcaccctccatttgtctgtgtgcctcattcttcctggtcacaggacaagaacttggggcccaccaaatggcaagtctagaagatctgtaacagacacaggacagaaacataccccttgctcaccacattgctgatgaagagaagagctgaggccctttggggagcctagacattcagggccatgactccctctttgaggccctatggtttttggaatctctgagcttctgcgtgctgctgaattccttggtgccagttgggaaagctgcttgcagtgtagctggtccagctgcagccttgcagagagctggcacctgtgtcagcacctggagctgcctgccacactgcagcagccagtgtgactatgtgcagtggccggaccctacactcacttgctcacacaccccttgcagctccatgcctggctcacccttggcagatgtggcatccatgctggtagtgtgatccaagtgcagcctgccaggccgagtgggtggaacaagctgggcctgagcaaaaggtgggcaaacacaccaccagccagaggtttcyggccagaaaagtgacaccccaaagatcctgtaacaactggaccatattcttttattatttagcagactagccttggcttttaacatgatagcagccacaaagttctgaaaagtagcaggagacatgttcttaatacatgagcacttaaaaaatctctgcctgtgtcagatttgccattgatcaaggaaagactgaaggcccagcccagaatcagtgttgggtaggggataatcaaggaaaaggatataggaagaagaattattgagccaacttgcaaacagtctaccacacgttgtttaaaaacattgtatatatttttacaaagtggtcatcttttcttttaggggacatgtatttcaatgcatggctgggctaacttttcttctgaacttttttcttttcatcctgactcagtaactcagtcatgcccaacctctgattttgtttcttcattttatgagtacttttcttttaaaactcttctttgtcatctaaatccatcccccaaagacctgatttttgtaaacaaacctgaagatatgtttctgagtaaaacagctctctccatgaaggaaatccagtggacaactcaatattttttttcagctacacaagtgtgaaaattaaaatgtgaatttccacaaaacagtaagagtacttttatgtattcagtgcataaacaaggcttgggatttctaaacaacttacaataatgttgagtactctctatggctcctctgttgttgaaaattgtgtagcaagcaacctgaaaaaaacctttcagaaaatgaatattctgcaacagatggtacagaaagagaaatgcgttgatgatgacaaaaaaagcaggagcattttgaaatagcattacttatttttttaataatcagctcttataaaactacccaattttattttcaaaacctaagagaactttgctgtagagtgttcaaatctaattaacaatgatggaaactctaaaacctgaaaatttttacttaaggatttatttttctcctgggagtagagtaggattgtgctcctagaccaggcttcaagggactttcctgtcatgttgaagtagcaacctgaagatctggaggtggaatatgggattttacttttatgattgcaatggagggagtagagtctagagatctggtacatgtaattatttagcaatctaatcagatattacatttgggtcaataactggcataattaaacctctctgatgcctatagcacagggatatgtgcttgggttggcttgtctgataaaagatgggccatccagttaaaattaagtttcagataggcaacaaataattttttttaatagtaaaaggatgtcctattcatctgaaattcaaatctagtgggggcattctgtatttttgttatttctgaaaattttatcagtttaaagaatataaagcttaaaagccagaacatacataagaaataataacacagagaagcacattgtggtggatttaaaacatatccacaagttctctggcactccattgagaggtgggatgtatgtcctttcttttaaatctgatcggatttaatgattcacttgtaaccagtagatggagaggaaatgcctgcatagctatggaggctgggtcataaaaggcattgtagcttctgtcttgcttttgcagatgagcgtccaggaaagaaaaagactaccctaaggccaccatggtataagggagcccaggccacatggagagctcaagcagctgctttagttgacagccccagctcaagtcccactgaggcagagccaggatccaccaccagtcatgggagcaggcacccatagcagggaaaagccaggcagtgggagcagtcacttctgagcctgtgagggtagggggggccttcctgggctcccaagagtgcaggatgcatgagtctgcagccatggtttgggtagttgcagcgacacctgcggagctcctgccccaactcagaaggggcagagctctcactggctccatggagcatgaagccccagccgtgtttctctgctgcagccagcgtgatggcagcggttgtgctgtctggagaactccagcctccatcccatgagtaattcccagcagaagtccaggcactgtggagcacagataagctgtgtgctatcttaattcttgacctacagaatccaggagcatagtaaagtggttttaagccacaaagttttgtggttatttgttacgcagtaatagtaactgtaatacacatgctcagtataaagtgaatggttaaaataatcagtggtgcaggagcttagtggaagaaggagtcatcagaggctttggtagggtgaggattcccctactctgccctgcccccacactcgaaaggcagagcttgatagggagtatagaacatgggaaatgagaaagggagagcgtgaaagcagaattaatggcaaagatccttgtttttgttttttttttttttgagacagagttgcgctccatcacgcaggctggagtgcgttgcagctcactgcaacctccgcctcccagattcaagtgattctcatgcctcagcctcccaagtatctgggattacaggtgcccgccaccatgcctagctaatttttggatttttagtagagacagggtttccccatgttggccaggctggtcttgaactcctggccttaggtgatccctccgcctcggcctcccaatatgctggaattacaggcgtgatccactgtgcccggttgagaaccttgttctttttcctttacaattttcttcttaggataattgcaatttaaagtaaatcagcttgcagaagcactggaaaaaagattaagggttgaacagaagaaggaataaattaaactcccattttaatttctgggctatgtttctgagcatttgaagatgaagctgttatggctgtgcataggacttaatggtctttagggagcctgataaactgagaaacagattgcagtaattttgcattggtgamccagtaggctgacttagtcgcttaaatttcacatttctttaacatgctgaaacaaggaaattttaaagtgttctaaaagaacagaaaagtttcatgggagaacagcaatttggtgaaaagaggattttcttaacgcctcagtgccttttgagaagtctccaaactgctgaatgaccaaagataaatgcaaaagaaactatgttatctctatttgtggaaggattgtttctgagcttcaccatccgcagttgttgtagggaagatattgaaggttgcgtcattttccctggggacttgacaatgcctgaaaagtttataattcaaagtatgtcttatattactcaaaataaagttagcatctagagatttctatttacatgtgaaaaagtacacttcttaatttagaagtgggctttgggcaaaattacgaggtgggtattgtggaaacggtctctctacccctgtattctttactttctttactccctttcccccacacctctcaggaccctcccaggacccctcagctctcatgccctgtcctggcccaccagttcctctcttcctctgcaatagcctgcaagcgctggcttctctgtttcctccagccttgcctttgaacctattgatggctccttcacatgcaccattcagatatatttccccttagtgaggcatagcaaccacatagtctgtatcttccagaataagtcatatacctatcctggtacattccattgtctccatgaattaaaattcctcagcaattctaagattttgatgtcaaattcatttctcataattgctcttaagtctgaaactccaaatcatttttagataatgtgtttagatttaaaaaaaaaattttttttttttaatttttgagatggggtctcactctgttgcccaggctggaatgcagtggcatgatcatggctcacctcagcctcaacctccaggctcaggtgatcttcccacctcagcctcttgagcagctgggactgcaggcattcaacactgtgcccacctaatttttgtatttttaatagagacggggtttgccatgttgcccaggctggactcaaattcctgggctctacagattcacctgcctcagcctcccaaagtgctaggattacaggtatgagccattgcgcctggcagtgtgtttagattctttatatgaaagttctattcttcacacctcattgcttctattttttaaaaatcagctttctggttactctacagctttcattgtagctgttgattcttgccttactctctttgtccttgcccaaattcttgcatttttcccatccatccatccatccatccatccatccatccatccagtttattattcatgcagacagttcatattatacagtagcctcatagttactgatggccctcaactttgatagccttatttgtttttcaatggagttacctgcacatagtgaatattatgttaaagatataaaagtatttaaagtataaaccaattattgaagagtatcgccactttggtaacaggatcagtagctcaaatttcactggctttccttctccccttgcgatgtggctggcacttttaagactctgcaaattctcacctaagtcttcagcctccctgggggaaggtatgtctcatgtgtgcctcagaagagtctgtgggtgcatgccctgaacactgtcttgatcactctgtgctcttcggactcccctttgcctgaagggctgcttgtcagtgctctgcctgcagctgcttgctgcaaaacacccatgctcactccatgtgttcactctctttgaactttcatagctgcctggtccagcgtaccaaagaatgtaccttacttgattagactttgttttagagacttaagtaacactccttatgcctgttctgtctcaaatactcccttatgaaacaaaggttggttgttgttgttgctgttttagcttttgactttatttgcttgtactataaatttatagtggtgtttctcaccttgaatcacctactttaagttactcctttaaaagtgctgctgcctcaaccccaaagattttggtttaatctgtctggatgggccctagcatcagttgattctactgtgctatgagggttgagaacttctattttataagcattgacaggaggccaatgttatagtcatctcctcaccctcctaatctttattccggatgtcaaaatagtagtcctcctccttcagatgaaagcagacaaatcaccctcacccaccagcaagtcatatcaagagatccacctgatggcgagagaaagctgaattttagtttggtgcttgaagtgagtccatagcaatttgtataaggaaagaatttcaaacacagacttcagagggagaaagagacagccttatgggtgctatagagttccccattctaagctataagaataatctttggccaagttgaaaacgattgagtaggatcagaaaataagcatatattatctcattttcagccttgacctatttattttcctgtttactatataaaaacacagttaatgtgacgtgtaatgttaattctggattttaataaatttctcagtttgctagggttaaaatttattttgggcacaggagaatctttgaaagagtcaatcagttgtgcagtttcttttggacaatcagcagaggaggatttagtgatgataatgaagttggagctttaggtcctctgggaggaactctagaaatgtgttcatatagtcctattgttttttgtaaaatttgcataagaaatatgtttttttcttaaaaagcattttcttcctcaattgcagaagcttcaggccttgcttaaattgattatgtctaatccctgagaacactgtgaaataggatactctcttcctcaaagtgaaacggctcttagttcaattgtctttatcgtccatttcttttctagaagaaaaaaagtaacaaaaaggcttaccacagggcttattttatatgaatgtgtaccactaactatgcacagttgttaaattattgcaaaaatctaaataattgataaatagccattgcctcaattacctgagtgccccgtactgccattccattgaatccctgcaattcacccaggcctcccattatccagaaactaataaggagcatgaaggagcagttcaggacctggtccagtgttatgaccaccagcatccattctgaatggtagatctctgtgctaaatgagttattaaataagttggactccgtgcctgcttaaaaacaacttttaaaaaatcctgctgttacatattataggtcagaagactaagtgtcgagttaaatacctttatacaagaagtggtcctataaaaatgccartatcttttataaattatttttggaaattcattttgtgttcatttaatatctgacttgtatatgacaaagaaaagttatgtcatgttgaaactagatcttagattagtcaaaaagaatttgaggaatgccttaatagggctttagtttgcaacttagaggtttcttaaaatatattgaaataaggaagccagctgctaacacaaaggagtactactcagtagtcactgtgtaggagttgctgtgaggactagaaaggagacagcacagatcttcaacaattgcttaaatctttaccaagaaatacgctgtgcaaagtgccatacttagactctatctagagatgtccacattttagattagagagttgtaagcttatggtattatcttcacatttggcaatctagaaataaataaatcatttgggttatatttaatgcacatgagtgttaaaagtaaatgaaaaatttaggactaggttgtttaaaatatatttagatcataaaccatgatataggctttgaaaagaattaatctcaccttattatttcagcaggtctttttatttataaagtaaaaagaatctatggttatattagatttctagacttaagggcccttttataagtttaattactaataaacagatataagtaacaaagggaacagataaaaattacttctggatagaagaagtgacgcccatgcattttcaagacagttttatttgaagtttcacaaatggcctggaatcacacaagggaatactcaaatatgcagatgctattagtttttctgcataaagacttgtctgcctatttattcaacactcaaaagacctttattgggtgttcatactgtgttacactacagagacaaaagaatgcagatgacacagtccctgtcctgtaagacatggtcccagtggtagagacaaacaggtaaacagaagactttatttcatgtaacawgtaaggggtctgcaaaagtaaattagtcactctacataattatatatctttttagtataagatgctgcttggcagaaactccaaaggagttttttcaaatccaacacaaattccctcccacgggtctgactcatcaggagggattattctgtccttatgttaagtggaaccacattatcctatctactagtctagatttcctgagtacttaattcraacagtagtggattgatggggcttctatatgatctctgccaatctcttcccaattttctggttcaactgcagtgctcttctgttagtattcttgacaatatctgttctctgattctttagtaatgaaaggaaactataactggattcaagtgcagacttgcccagtttaatccctaggtttgatcccaaattccaccagcaggtgatagggaagtcaaaaagagctaacctatttgtgattgtttggggatgacactgcaagtacagtaatgattttaacacttctgggtagataacaccttctatgtttttaacaacacttgtgcccagtctttttccctggaagactctcaggggcatagaactctcactgtctcctaagcaatcagtgtacattaatggtgttgtgtgtagatacgtttaattattgggtagaatttattcctgtttcttctgagagggtcaactgaacctccttctaggtgggcaccatccttggcattcacagttatctttaggggtaaggcctctgggtcacctcgtcgttttatgctttcggttcctaactgggtggattagcagattcaagtacactgtccagagaggcacaacagtgtgtgtgaaagagatgtctgttttgacraatgtatcaactaccctttttccttttttgacttgttttctgattcattctttctttttctttctgtgtcaggcataaaacctctgccaccctgaccaggagtataatttatccaaaacacctccatgtggctgtgattatttcattggattcacttgatttgccctgtccttattttttttcctgtattttgtatgcagaaaacatctccagaatatccagtcctggatggggagtagctgtcttttgtcagcataatcatacttttactcagttcaaaattgaaataatctaaaaccacctcttaattttcagtcatggaagctggtgttgggaagatacgtaaccaagttcaagtgtaaatgcaccccatgtggatataggaatctagcaccatttaaatcttaatactcaaatatttatatacttgcaaaacttttgcccataattcattctttgaactgaacacctgctataatgaatatgcttgtgcatgagcaaaatcatttttgttggatgaaactcggagagaaactgtagagcatgctacatctcagttgttctggcagtaggattacagcatgtatgcttgtgtttaagttattggcattattgctatcagctttatcacttttttcctgagagtttagccttaagctttccagtggttgcttctctgaggtgcttgggggcaataccaagctggcatcgaaattagagaaaaagtgtttatttgatttgaagtcagaggatggttagttaacatttgaaatactctaatcaggcatacacccaccacaagcagttagttagcatttgaaagaatctaatcaggagtgcactcttcagaggcacctgctactagcactctcatatcttgctttctgatgagcactggtaggtgtcctaattatgttgtaagcaatgttagaaatgattcttcactggtggaatgagaatgctcaagatgtatgaattggttagaaatgttgcataggcacaactgacttaatttaaaaagagactaaatttccagtgaaccaggtggcttgactagtggttcttgactagggtgattttgcctctcaacctcctgtcccaaaatatttagcaatgtctggagacatttttggatgtcacagcttgggggagaggctgctactgacatctagtgggtagatacccagggcgttgtggaaaaccctacaatgtataaaatctcatcactcacccgcaatgaagaattacacaacccagaatattggtagtgccaaggttgagaaatcgtagcctagacccatcagggtggtatcccaggtctagaatgctatttggtcccatgtgtagccattaactgaggattctgccacccggttctgactagaaatttagctgactcttgctgccagaatactgctgcaattctctcaaatgaatctttgatggaacatgatagttggagttcccaagaggtcagataactgggacttaactgtttttgtgcctgcttgctaatatatgtttgagtgtgtcacagaatttgatctgagacttacacttattgtaatagaacacctggtagactaagaaattttgagaatgaagacctatggcccttatctacccctcattattagggagtatttatatttatcaaagtatcctaatgattgtgcatgactaattttgtttaggttagttctaaaaagaataggtccagtttcaaccttttaacacattgatgatccacccagtatcttaaggaactactggcattcttaaatatttgttttgtatattcaataggttatattgagcatcttctatgtatgaggcattgttatagttcctgtggacacaatggtgagcaaaaatagacacagggcttgcttactgtgggtggtattagaaatatgtcttagatccaattgtgagaacacaactgagttgtttcgctagtaggcaagtcatttccagtgcaaattagtgggtgcaaataaatgggactatgggagtcacatgcttttctcaattttacgtaacagatatattttcctctcagaaccaggttttccctatatttaatggaaatctttgcatataaaatatctggggtagtcgttcatcagttagaacatctataagtacaaattctgcaatcattgcttttattttatgaaaaaaatggtgaatgtttggtaaagtctcttggttatttaaattatagaactgatccctctcaactgagttgcatgcagaattaagttccccctccacttgcttcaatttcattcccacaaagcaccattatagtgtttttaatactatatcatgtgcacacacattttttttttgagacagggtctggctatgttgcccaggctggagtgcagtggcatagtcatagctcactgcagccctgaactcctgggtggaagagatccttccacctcagtctactgagtagctgggactatgggcgggcaccaccatgcctggctaacttttaaattttttgcagagatgggggtctcactttgttcttcaggctagtcttgaactcctgggctcaagcagtcccytctgcctcagcctcttaaattgctgagattataggcatgagccaccatgcctaactacgtttatacacatttcagtctcctctgccaggttgtgagctatatcaaggtgggtaygctacgtctccactacttactaaagaatctagcacacagagggagttatgtatgatggaagaacatccagaaaggacacctataacttgtctttatggtttgtacatattgcttaatgttgacaagaaatggacgagttttagttgtagaaatttcaaatggagagcaccaaaagctaatagcgtggttaggatgtccactggaggaagcctggctgattattatactagtaagtatatgttatcctaaatctggtgtagtaactctaggtgggtatgttaaccactggtatgatggacttccattgaccaggcttgtgggactgatgtatggaatagaaatgttaatatatcaatatttatgagcattcttaaatgagagtattctcgatttgtaggcacatccatctgaaatcagaatcagagcagtgagatttagatagatacaaatttctttagcctgatgtactcgtttccctgacaggaagagcatttttcgtgggattgcattactctaagtatagttggctaaaatgctttctttcctggatgaggcttggatgggcacttctagttttctttttctccttgaatttttgttttagatgattttgtgacagaatacccctgctttttcatatcttccaccaagtcataatggacatctttctttaagggtattattatattcattcagattggatttgatcttttgggctagggaatctctacacttgcacactattcattgattctgaatctcagtggagattgtcacactgtagcttctatgaattacatcaatcatacctctttttccttccttccttccttccttccttccttccttccttcctccctccctcccttccttcttttctttttttcccctttttttcttttctttctctttctttccctctttcctttccttcttcccttcttcctctgctatctttccttctgttttctctttcaggcccagtcttgctaagttaaaaaaaacaatataattgtgtcaaaagatcattaaaattattattattattattattattattattattattattattattattttgagacagagtttcactctgtcgcccaggctggagtgcaatggtgccatctcggctcagtgcaacctctgcctcccaggttcatgtgattctcccacctcagcctcccaagtagctgggattacaggcatccgccatcatgcctggctaatttttgtatttttgtaaagatggggtttcaccatgttggccaagctggccttgaactcctgaccttgggtgatccgccygcctcggcctcccaaagtgctgggattacaggcrtgagccatagcgcccggctaaaaattattatttaaaattattacctaatgattaccttttgttgaatatctttaaaaatttaaatactgtgaggaaaaaagaattcagttytaaccttctttaataggttttataatyttaattagacattcagatatgaccacttagaaaggatgagatactttttaaatatgaggtgacagataatatgaaaaagggtcatatggttgttcatttttaagacctgcagtgatatttgagtrtatttttgctgagaaaatttaracagaagtaataagagtttcaggggaaggttaatttctccagcactttaragtctttctaaatattcagaatttaaaatgtagcagaatttatggaaatttaaaactacaggaactttttgttcacctgtgagagaaagatcaatggacaagaatcactttgaaatgtgctaaaaatcaaaagtaaagatccctgggccacttactccagatgaaaagatgaatctttacaaaactggagagagaagctcaactctggttttattttacccagcgctctctttttccctgttttatgctgtagtgaacagatgatgagaaggaaatgaattcaaacttacttacttgcaaatagacatattccacaaagctttggtttgagtaaggttacttaattgcaaagcaatgctaccaatttttcatccttcacattccaaacttcacattccaaacttcacatatcaaaaccacattctgttaaaacacagtcactgcttggttaaaaacattctcccaatatgttgagcatttatttgattttcttccttgtgactcagatgttattcaaagtcacatcaagttgttttctctctcatgctaaatgtcttctttagttgtgtggtatattaaacaaacattggctgcrtatttagtgtttttaattcacacaaagactaaatccattgcttatgtaatgaacgtattagacatttaattttttaaaaattgagttattgtggctcagaaattccccagtgaactctagacaaatataactagatataacatcaagactaagaaaggggaagtcagtagaacttgtctaaacccgatcagccatcgatttgattttttcttagtttcatctgtaaatggcaattaactttctttatattctgaaagaactaattcttagttagtgcacagaaaagttggtaccccacttagttataaccacgtggaataacttcagaatttagttatttgtgcaatagtgaaaaatggcaaatcattttagtttaaatkgtagagataatttctcattcttttatggttagacctggaagattgatggtctctgtattggacctgttaaaagagtggataaagcttgaaaagagtgctgtgttggagaagttctaggctgtcatggaagtacccaaggactgacatatgttagaaggacatttatttcaagttataagagtcagggcaggggaccccaactagcattgtcctgaggagcaaggtcatagctcatcattatcctcagaataaagtcaaactccttaatatgaaacacaaaaccttgtgtgacctggttcctgcttactgttctctgtgccccaataatgctgacctgcaggcatttgcctacttggtctctttgtctggagcactctgtgccttttaaatttttcactgagctaattaccactcatctttcttgtatgtgcttaagtgccttttcctttgtgaaaagctttacaccccccacccctgccaaactgggttacgtgccctttcattatgctttagtagtgctttgtttttatctcttcatatactaaattataattaacagattacttgtccacacttataaccagactttaggatagggcaaccactgtatctttcttactattgtagtccagtatttgacacataatatgcatctgataaacatttatcgaatggatgaatgcatgaataaatgtcagtgtaaaatagtgattttcatctaggggccattgatcttgcctactagggtatattcagcaatgtctgaagacgtttttgattgacaagatttgagaggggtggtgttggcagtatctagtcagtagaggccactgtaggatgtaaacatcctataatgcataacaaagacttgtctggtccaaagtgtcaataatgctgagattgagaaacctagctacaaataataccatgtgcagtgtaacatgtaacaggcaatgcaaagttgtcctcagaggaaagtagtagaaaaaatagacagtcaaagtaaataattgggaggtttggaagcagttttaagacaaggaacaagaagcatgattcagaagcaaagtcatggagagcaagaggcaccaatcttcccttgatagtggtggtctgcatagtgggctgagtagagtagtgcacaaggttcaggctgggatgtgttctctaaaatatttattgtccttttcttatcccttctagttaattgctgttttacattgccttgacttctccttaatgtccataagatatttttgtcactcaattttgaagtttaaaaaaataatattctatttgaatattatagattatttactcgggatgaatactgaaaatgaatacctcataatttgtaggagaaagatgggggagatagaaccgaaagtgcttctaatatgggaaatgcgaaaacattcagtattttgacctgtcttagaaataggtatacattattctatatcatctgtgtaatatctttttgattacagtttacacatggtcaagcatggtaataccatttttttctacatgtatatatgaaatgcatctaaatttaagtcaaatcacctttcaaaatcatgttattgtaacaaatgggaccaattagtaaacaagaatatgtttaaaatattacataaggacagatgatatttaactggctttgtgatttatgatctattattctgattactaatcagacttactgtatctatgggaacaaagaggaaaattatttttgccaccaacgaatatacaaagatgagaaatattttgcttctctgaataatcagcccagatattgcccttcttgttttccttgtgttattatctgttcttgccaggagaaaagcaaagtcatgtgggtggggaatagaaagtgtaagattaagaaagtggactgaaaacccactttcttaaaggtggttatagactatcaatttttttaagagttctgaattgctttttgaatgaggaaataaaagtgctcaaacctaggtagttcttaagacaaatctattatttgactcatgaatacgatcactttctgtggttcatatacaaatttttatatgtgaattttaatggagaaatctctgattgaggacattgaagaataaaaatttcccaaataggagtgagactcccaaaatacacttcataaaaataacacgccattagtttttgaatgagatactttatgggacatgttgctatcacgaatctaattttcatcaggatctctagtgtgatgaaatttcctggaagatgtcaattctttccaggtgattgttgccaaatattaaagactaaatgggatatacatgagagttagagctgaaatgcaattcctgccaatttatatccagttcttattctcctactgaagttaaaacattactgtgctcctctatttaggtgttaaaagcttttgctttataacgtttttcaaaaaatcaagaagttgaagaamcctcttactttttttacgtccaggtttattgtttgattttgttttgtgtatttttgtttttgtagaaccagctcaaaaacaaagcttttctcatatcacctttcacagtggattgagtctgttctgtttgtggagttaattattggggtgggttttcctcctgtgctcaagatagcttgaggcacttgctcttgggtgaggacagaggagagccaatgccctggtgtagccaggctttctgctgagaggtgagcctcaaccacaagtgctgacagttgctggcaagagactcccatcaccctaggagggcagagttcactttggagaagtctctgactcttctctggcacatactgtcaattcccttttagatggtgagcattgcacagctgtctcagacactagtggcctgagcaggtgacgacagccaccgtctgtctcacttacacacatcatctcacatatgacttacagcatgacgtccaagtgattattattatcttctttttaaagacagggaatctgaatctttaagttaagtagtttgcctgtaaagtcacagagatagtcagcggtagagctagaattcaaactgaagtctctctaagtccaacactgctgtgctttctctctgcaactccttgtggctccttgcaagatctctagagctgcctttttaactaacagagatagtcagcagtagaactagaattcaaattgaagtctctctaagtccaacactgctgtgttctctctctgcaactccttgtggctccttgcaagatctctagagctgcctttttaactaacagagatagtcagcagtagaactagaattcagattgaagtctctctaagtccaacactgctgtgttctctctctgcaactccttgtggctccttgcaagatctctagagctgcctttttaactaataagagaatgtagcattggccagctttctaaatgagatcacgtaatatctctgatttcttatcaggaaatcagaggttgaaggatttaataatattattgaatctcttgataggaattgtgacccaattcttgttaattttgagttccaagttttaaatcatcccaatttcaacttctgtgcaaaaatttaatcaccacaatatgcttacctcaggtgggtcttctgtggaacactaaataggtgatttttaaattcatgcgaaacattgtataatgaaggcaaagacctgtcactgggaatacagtatagcagaaatatgtgactgtttttttgatgtgaataatgcagaaaaattgcactggaaaaagttaaacaggcaaggaagactttattcaaggctatttcagtagaggagagagattgaacccaacttccccaaaacaaagggctggagagtttttaagagccggggtgaggagaatcatagattgcctgtgtttgctaattggacttacccaaaggaaaagtaaactttccatatcttcatgacaggaggcaggtttacaacttagagcaaggcatccatggatgatgatgattgcattttggacggatggcttccagctccttgagaaaggcattttgctcttacgtctgcagttgaagaaagaaaagccagatgtttcrgataaatagtgaaacagatttctactatatctttataataattttaagtggtcagtttgcatatattattctgataatttcctcaattattgaattttctttgattatagatattttgctgttctctttcaattcttattaaatgcgtaatagctgaatcatatagtgtcagctattgaaaaaagaacagcctctcttattaaaaacaaaacccagaagctccatggattttaccactggaaggagatgatttttgaagaggagagcaggtgaacaagcagctgtttctttgttctcctggatttatctttgtcttggggtttttctgttctaatcactcccaccatcatcaaaccattctctggggctatgctgtagttattttaaaggtctggttcaagcgcaaaaaggaaccccattttcagttctttttattacaattaatatagcatgaaatattcaaatatcagccaaacacagaaccacaaatataaggatacaagcacagaaaaatgtgggaaacaaaaatgatctgacttaacacaggttatatctctgatcctatggtcactagtgtttttccaagtcccataggctctgtccgctagcttagtagtaagtttcttataactgggtctatccctttgatctcaactcaagctttctcctatgtgttctgtaatatagaccttagccccactagggcactctcttccttgcagacatctgagattttgcatttgtgcatcattgtacgagctgttccccttggcccgagtggcactctcccatctcttttgtccatatatccttactcattcttgagatctcacatattgatcaagtcttagtgtttcagacttccacaaaattaattcctgtttctgtagtgcctttgatattatttaaaaatttcagttatactgttttattttttaatctggtatctatcccctttgttaggcctgggttccttggaagcagagactacatcttaatgaccatctgcgtgtagcatagcaacaagcacataccaggcattcaaaagctttttgctaaattacattgatcaatttttatgcccttttggagaagatgtccacattttcatgccaactgacataactttgaagattcttgcccagttcattgctttatatttccaactccttggaagtatccatctaaccagacattttgatccttgccacctttgcatttaaagccaggaaggcctataaaatgaaattctgaggtgcaagtggatggttagggtggagggggctgtcaggtaatttactttatttttaatattaagctaaacattttaaaattctactacatgaaattgcatgctttggtatgtgattcagtatttccttattgtcatttttagttttacctggagcagttggagagcttgctttagtattgtattttaaaaacgcataggatttctatttttctcagtatctcaaaccagataacaaaaccattctgcctcccccaggtgatacagaaggggggttaatatggaagctgccctcgagtggattgagatcagctyacgttctggttgagtctctagtgagctctccagttgctagccctgttatttcactgccctaggcttctgtttcttcagctgtttctgtccagataaaatagtctaaggttttccaagtacaggtttttcttcttgggtgtcctatactaacttggttctgatttctcaatctggtattttctttgatttctttgtaacagggaagactgacagttaaccaatgtgagatacagagaattataacatagaaataatagattgatttgatttctgacatgggtgcaggtctcccaattattcctttaggtaaaaatgagaagtatgctggagggctcacacacaggggcatttgtgtgcaaaggcccttcattggagaatatgggtgctatcttttgaatgcacagagcctttttgcatgctgagagagtctgcagctattttctttggcaagagagagtctccatgaggccgtttgaggtttgtacccaattctgttcttgtctgagtctacacttgaagaattaaacctgtgagactactccaacatccttagtttttctttaccaggtctttggggaagataggatggtcttcactgactttgtgcaacaattatgaaaataggtatcttccagggactaaaatttgctttggtataattaaaactagctagcaggtacaactttaaatcacttgttttattgtcatcagactcaatttatgaagaaaatgatgactgcctatgtggtcaacagctatggttatcttattagatgttatctgatattgtcagcaatactgaaagctgtaggatggtaaggtatttcagactgggagagtaagagtgacaagatacagaaaagaggcatatatattttgcagctgggagatcatttttttgcaaggcatgtaatttatgtggaataatggggaaaaagggacaaaaattacttatcttcccaaaagataagtaatgaagttatatgactaaggccattgttgagcggtgtcaagcagaggatgtttacaaatgctgttaaaaggaagtgcacctttattaaatatcccttggctcttagtaatacatttaaattaaaaacctacgttattcctggtacttacagtggcactaagtacattgaaaatggattgactgaaagccagtcttccrtttaagttatagtaaaatctttctcaaccttgctatggactgaactgtttcccctggctctccacccccaaattcagtgctgaagttctaacctgcagcacttcagattgtgactatatttggaagtcaagtctttaaagagataaaatgaagtgagcaggtgggcactaatctaataygactagtatctctataagaagagaaaatttggacacagacgggcacagcaggcagaccgtgtaaagactcagggagaagacagctacccataagcgaatgagagaagcctcagatgaatccaatctggatctcaaatttctagccttcagaactgtgaggaaataaatttctgttatttaaacttcctacctggtctgtggtactttgttatggtactcccagcaaactattaattaatataaggtcacattctgaggtactgagggttaggacgtcaatataccattttggccaacacaatccaaccataagaagttctctgtgatacagtgaattccttgttaagcaaggcaaatttaggaaattcaaatgattaatttgtgtgtttattttagttatcaaaggagtagttatagtttgttttgaagatgttgttagcctgaatgaaatggaaacagggtctgtgtatttatctgcatttaatgaagtcacattgctcatgatcagctatagtgaaatatgtgctgatagcatttttggggacaagaagagttagctagacattctttcactgtttgttgttctcatggaattaatgccctccatttgtgtttcttctagtcctataatgatcattcttttgtccaaattatacaagtgtataccactttattataataatttatatgaaagtaatttagatttaaaatgctcatttctccttttttttttgggcataccatgtacttgcttctaggtatgatggaaaacaggaaaacagttatccccgtctttcaaacttgttctcctttcagacttatgccaacaatgacagtcaaagtggctctatatactcatagcccttggctgatcttcaagctgctgcagaccatgccacttggggagaactgaaaatgattctgatcccttgcagaagaaatcttcattagctgtgtttcttgctaatttttagatatttgtctcgctgctttgctatgagctacttaagggcagggactgaactctatagcagagtgcctaactcctaacatttattgtccatgtattatatgcctgccaccttgctaagggagtgacctcccactttatagatgagcaaagggaggccaacagagagaataaataaggagtcagatgctacgtagcaagcaagtgagtagcagacagaatttgaaccaggcagtctgactccagagctggggtcagccccattcagcagcagagatggtcaactaataagtatttcttaaatccattgtagcatgtttattttgagatacattaagctcactgttttcctgttataatcaagttagaattaagtggctctgagctttcaaaactgttttcaggttatttattcacttcactcaaggtgaaaacatttgtttttcccttttgtgtgaatagataactaagtgtcttttaggaaaaagaaagagaagcaactccattgcctaaaacttgactttacaaattgtatttgttgagcagaacttcagaattttgtctttactagattaaaaaattatataatagtactttgttattgcaacaaggtcaccatgtgagatctaagaagaggctgataatactcccttcaaccttccttcaggcctaaagtaacccatgttagcacctcactgtctaccattccttgccctttcctgagctcacaatagggcaaaactatgtacactgctacaacttactgtttgcatggagtggaaataccattctttcaggttcatgtaaaaaagctagcttattttttaaatagcagtatacttttctattgtataaatgtacttattcaaccattcccttactgatgaactttggtttgtttccagggcccctgtcctctttgctgttaaatgataagcttatgaaaaaatgaatctgttggtcaaagtacatgaatattttaaaatagatgttgccaggtcacattattcaaaactttactaatttaaaccttaataatatagactttctttttgaaatcataaaatattgcctttttratgttagaagctttaggtctctattttgtttcctatgtttggaataaaatttgtaagaaactcagatgataagcttaatagatacataaggtataaaagaggacccttaaatttgctttgtaagaaactcagatgataagcttaatagatacataaggtataaaagaggacccttaaatttgcttcctgccaaagagtagaagggagtttagaaggaaagagatccatgttatgctttattatagaggttccatgatttaggctggctcatgacttcgggcttcttctagaccaaagctcatggttcagaaaatggaaaaagaaaagccttctttctggtccttgtgcaaagacactttttaatttttaaattttaactaattcttccttgctctttcccctccctccctccgtcccttccttccttccttccttccttccttccttccttccttccttccttccttccttccttccgttttctttctttcgacaaagtcttgctctgtcgcccagactggagtgcagtggtgagatctaggctcactgcaacctctgcctcccaggttcaagcgattctcctacctcagcctcctgagtagctgggattacaggcacgggccaccacacctagctaatttttgtatttttagtagagacggggttttgctatgttggccaggctgctcttayctattgagaaggttctaccaactctctttggcaattctgtaagtgcaattttatgaatgcaattctatgagtgcaattttagaggtgatctcacacatcggacctgctgccacattcagcattccctgattatcatgtttgaccccttcacctcttgctttagttattctaaacagtgacattctgtcagaagtcttgtgtgactatttatctttctctgtttctaagcagttcacatgtcaaagaatacaatatctaagacatctggctgtccgagctttgccatctgggggaaagagtttctcttaatcaatttaatcagactctatatttgtagaactgacaaatctgcaaattcaggatgggacagaaagtttattctaattaattattcttaatttggtaacaatatgaatatttaaattagtactgcagcatggcttatagagatgtcagatggaactgaatttgaaactcggcttcacctcataatggtagtgtagacttggccaagttaattatattctaagcttcagattctttctgtataaaattgggctaaaatatacatctctcaaagtaatatgaaaagtaaatcaagtagcaaaagaaaaaatgatcaattaaactacattgaaattaaaaacttctgtgcatcaaataatacaatcaatagagaaagcaactcatggaattggaaaaaatatttgcaaatcrtatatctgatatggttaatattcagaatatataaataacctttataatgcaaggacaaagagcaaacaaccaaataaaaatgggcaaaaacttgaagagacatttttctacttaagatatatatgaaaagatgcttataatcaccaatcattacagaaatgtcgattgaagtcataaaaaccactgataccatcttctatctactggtgatatcagtggttttaatggctttaattgggatggctactataaaaaacacaaaacaaaataacagattttggcaagatttagagaaattggaacccctgtgtactgttggtcgggatataaaatggtgtagccactgtggaaaacagtatggtggttcctcaaaaaattaaaattagaagtaccatataatccagcaatttcacttctgtttatatacacaaaagagttgaaagcaagatcttgaagaaatatttgtacactgatgttcatagccacaatattcacaatagccagaaaagtggaagccacacaagtgttcgttggtagatgaatggataagaaaaatgtggcctatacatacaaaggaatattattcagtcttaaaaagaaatgaatactaacatattctacaacaaggatgaatcttgagaacattttgctaagtgaaacaagcagtcataaaaagacaaatatggtgccattctacttrtaagaggtacctacagtagtcaaattcatagagacgtaaagtagaagggtggttactaggtgcttagggaaaagaggaatggagacttttggattcatgggtgcagagtttcagttttgcaagatgaaaagagttctgtagacgaatggtggtaatgattatatgacaatttgaatttattaaggccactgaactgtacactcaaaagtagttaagataaaaaagtttgttatatgcattttatcacaatttttaaaaagcaaatcagataatgtatatacagcacctagtgtgttcttaatatagtactaattaattaattagtattagtattaataatatatattataatatattaatactatatatagtataataatatgatactatatatagtattaactttatatatatataaagtattaacttatatgatcacaaggtcccacaataggctctctgcaagatgaggagcaaagactaagtaattaataattaataatactaattattaataattataatatataatatattattaatactatatgtagtattaagtttttatatatatctatatatatatagatacataatggaataattgtgtctcctggtggcagcgttcctcccctggaactaagacctctaggctggcagaccctggtattgtttctcccatagccaggattcatgggtccaggaatcaaagggcagaagtggaagtggcaccactcaccatcaccccctagcaaaatttttgcttcctgttcctgtggcattatgttctgctggcctagaggtcttagttccagaggaaggaacattgccaccaggagtcacaacaattattccattaaactagaagttaagattgccacctggacactttgggctcctcctatctttaagtcaacaggctaagaagggagttatagtgttggctggggtgattgacccagactatcagtatgaaatcagtgtactcctccacaatggaggtaaggaagagaattcgtggaatacaggagatcaattagggtgtcttttagtattatcatactctgtgattaaggtcaatgggaaacgacaacagcccaatccaggcaggaccacaagtgtctcagacccctcaggaatgaaggtttggatcattccaccaggaaaaaaaccatgacctgctgaggtgcttgcttaaagcaaagggaatacagaatgggtcgtagaagaaggtagtcatcagtaccagctacaaccatgtgaccagctgcagaaacggagactgtaggctgggcacagtggtggctcaggccaggcacggtggctcatgcttgtaattccagcaccttgggaggctgaggtgggcagatcatgaggtcaggagttcaagaccagcctggccaacatagtgaaaccccgtctctactaaaaaatacaaaaattagctgggcatggtggtgtgtacctgtagtcccagctacttgggaggctgaggcaggagaatcacttgaaactggaggcagagcttacagtgagccgaggttgtgccaatgcactccagcctaggcaacagagtgagactctgtctcaaaaaacaaaacaaacaaacaaaaaaaacggagactgtgattgtcatgagtatttcctccttttgttaaaaacatgtttgtgcatgtatacgcttgtactaagaaaatatttttttctttatcatttgacataagatttatcaacttcatatcagcatttaagtattgttaactttatgtaatagtatttgggttggggattggtgcgtttctggttgtacaaagggtagttgtattatgtgaggtgtaattatgacattattgtctttatttgaagattatgtatgatctcaggagatgtgtatgggttcaagttgacaagggttggacttgtggttgttaatactgagtgtcaacttgattggattgaaggatgtaaagcatcgaccctgagtgtgtctgtgagggtgttgccaaaggagattgacatttgagtcagtgggctggagaaggcaaacccacccttaatctggatgggcaccttttaatcagctgccagcggatataaagcaggcagaaaaacatgaaaaggagagactggcctagcctcccagcctacatctttctcccgtgctggatgcttcctgccctcacacatcagactccacgttcttcacctttgggacttggattggctttctttgctcctcagcttgcagacagcctatcgtggggccttgtaagttaacacttaataaactccgtatatatatatgtttgtgtgtgtgtgtgtgtgkataaaaaaatatataaatatatataatatataaatatacatatgtatatattaatatatataatatataaatatacatatgtatatatattaatatatatacatatgtatatataaatatataaatatatatatcctattctgtccctttagagaaccccgattgatattactagaattttatatattatatgaaagtatatttttgctgaatcgtttaaaataaattgcagagatcatcaccctttacctaaatattctagcctgcatttcctaagaacaaaattatacatagttacaattccattataactaagaaattactaacgatttgctaatgtcgtatattcctcactaatatatgaatatcatcatctgtcccctaaatgtctttaatagacaaatttttcaaaccaggatctattaagattcctgcattgcattttgttgttgcgtccctttagattctgtcctagtttagtgatagcccctcgtttgtttttccctgtgaaattagctttttgaagagactagtatagctgtcttgagaaatgtcccacattctgtattttttttaaaaaatgatttccttatggcatcgttcagcttgtttctctctgtcctctatttctgtcaatctggaagttagtcccaaagcctcagtgagattcagatgaaacatttttgacaggatcagtgatgtctttatattttacacccaacagttacatgaaagcaggttttcctcccacagtttgctaagcttgatcagtgggttaagagagggtcattacaatgtagtcataaactacattgtaaacggtatcaggtatttgccaagcagtctatagaataacgtgcgaggcagagcccatttctcaccagccttaccccaaatggctttagcattctttggtctaattaaatcattatttcattggggatttaaaaacagagatgaattagaattcctctaaaaaggaaagttagatgttgaattctttcattttagttatcactttctagagtaaagattgggcactgttgtctcctctagtggtggcaaataagatttatctttcactttttttttttttttttttttgagacagagtctcgctctgtcgcccagactggagtgcagtggcgcaatcttggctcactgcaagctccgcctcccgggttcacaccattctcctgcctcacctcccgagtagctgggactacaggcgcccaccaccatgtccggctaattttttgtatttttagtagagacggggtttcatggtgttagccaggatggtctcgatctcctgacctcgtgatccgcccgcctcagctggaattactcgcgtgagccaccgcgcctggcctatctttcacttttaaaacactgtaggccttataaatgtttagcaagaggttttacaatgaagtagaaaatttcctagcaagtccagggctgataggaattggatagtaattattgtcatacttttctaaactggtttatagtgattgtgatttaaggtaacaaacttggaaccatgagaagaaagagccagtttgtttaaaggaatagtggatgattttcttctctttccttcctcctgtacctgttttcctgcagagttatatcagaagagtgttctcctagattgccagaagaggagagattattgtatgaattttctcctcattcttctttagtgaaagctcttccttcccttgtcttctacctcaccagttcatgcaaaatgggcttcgtataagcacataaaacacactcctaagaagacattctcccgacttccattctttcaataacaaacaaatattgaacatttgctcaatgtcaggcacagtgtcagttcctggatctgtagagacataaaaccacccaaaaaaagtctctgcctctcaggaattatagttcagttagaaaacatctttctaaggggagttagctgacacttcagttctaagagaaataagctatgggctgtcatgaggtcatcacaaagatgactttgccacatggttagcttttcttaggaagtgaacatagagtaaggtcaatttttaaaaggaccttttctggataatgagacatggttgagtgactgctgtgttgtagatttagaattctgctggcataatggatcatgatactgttcttgaaaagttgctactacaccggagacctgaaagttatttgagctttttttgctactctcggaaatcagatttactggcatttaaaacattttctatgattgacattattattattattattatttttaaatataaacttattgtttaatttagtagttagcatcctattttgctctcacataacaggaaagtgccattgaatgttatctttaatccagcaataagcagttcttgtattttaccaatttttaattttaacaatgatgtagagagagacatcagcttccttataattcatgacatttgccttcacagatccatactcactttagacaaagaattagaaaataagaggcttaacaaacctccaaagtctcaaagtttgtggtaatcattttatgctattttcttgaaattctctttgtccagtcctatcatctcttctatgatttgattggtagaataataatgagggtatttacattattcttttttcattctcttcctcttggtgatatttcaatgacccctattttaaaagaaagcatatgaaaaacatgatcttaaaggtttgaattgcaaactaaaaatttcagtttcatccatgaaaatagctcttaccattcttctcataatcaggaagcattcaaggataaattgttggcacccattaaaataaaagctacagtcagctttctaatcttcatatgagtatttaaacattagcatctacttaaaatgaattagccacttattttatagcagttgctgttgccagctgttgctctaagaaccttacgaatgattttgttataatatccatatcaactcaatgagctaggtacaattattagtctcattttacagatgaggaaattaaagcaaagagatgtcaaatgacttacccagtgctccacaggcaacaagtgcctttatctctatcccgtgccattttctcatacagcttttcatgtctaatatatggatacacaaatccttaagctctccactatctggcccaactcagaagcaagatgaagaaagcattaggtattaatgactgaaggacatatattgctccaattattttaggtttcctttttaccctattttaaacaataagaaaatgatcatattgaacactgaccgtttctaaaatagacttcattactgtgtctgatgccaggcctttcttttattggtgtatgctctaagaaacaacttcatagatttgtcgctgtatttgacatgacaatgctactgagggctttgtctactgtattactttgtctcacattgtaaagacctgagtgaagaacatattttaaaatttagtgataagaaagggatttgctctcactgataatctccctgcctttttcaacagtcatttacaactgtctctatttctctttcactttggttaccaggaataacatatttagtttagtcaaatatgtgtcttagagtcaaatatgaagctcagtattaaaaatgttttaaagtaggttcttacagtctgcatttttctattttatttttctattttatactctctacttcccttctctttatgtcttggcttcctatttcaggttgtattttccctgctccagatttttactaacattttatctcccctttgaatgttttacgtaaaccacctcaaatctcttgtagaataagatagagacaattttgtgtccccaaaccccagggaagcaaggaagcaaaaggcatggtctctgattttatgaagctcagacatgattgggaacacagcacaggatgcagaagcaaattcaccttgggaatatcacaagtggtatagattgaaaaaatgctgtaggagttttgcatgaggtctgggacagttggaaaacacttaagaagaactagaaactacactggccattgaakaaaggctagaacttcagtaagagtagtatcgaaagaaggtttttaagaaaggaaaatgtattgaaccaagatgttaatgggaatctagcttattcaaataaaaatggcagaagattgttaattgttagctccaacatccattctcatctctccctcaattgctgaacttcagttttatttcagagcagccatgtaaccagataaaagactatgttttccatttctactttgaaaccaggttaatcaaagtaatctgcttttgccagtgaaatataagcacaaagtgttgtgtcattctgtgggactttgagaaagtctcgttaaagagaggaagtttgctcttcttttctccttctaccatcctactgcttgacgcccaaggagctcaatgagcgtcttagaccctgaggataaagaggacactcagaatgatggagcagaatgctgggagcaggttgaccatagctgaatatagtgcctcccttataaaaccatttagctagagtagagaatttatacagagcataatgaaaaattgtaggtcagagctaatgttcagcaaacaattatgagctttattttattacaacaggaaatacatatatatatatatatatatatttgagacagggtatcactctgtcactcaggctgaagtgcagtggcacaatctcggctcactgcagccttgacctcttgggccaagtgatcctcccacgtcagccccgccaagtagctgggactacaggcatgtgccactacacacagttaacttcaaaattttttttagagatatggttttgtcatgttgcccaggctggttttgaactcctgagctcaagtgatctacccgtcttgaactcccaaagggctgaaattagattttatttcaagcaagaatgtaaaaaatatcaagatgaatattattattattatttttttcaatttgcaacttggcaagatgagattggtgattaatctcttaaaacattacaggtgtgagccaccgtgcctggcctataggaaataaatatatatgatcacatatgtgatttttcaagaaaaagtttctaagccattttattcagctaattaaacttgtatgaattttttgagtgcaattacatgttgtataccaactaagcatatttgtattgatgataaatacagaaatatgtacctactctgtgttatttatttatttattttttgagacggcgtctcactgtgtcacccaggctggagggcagtggtgtgatctcggctcactgcaagctcccctcccgggttcatgccattctcctgcctcagccttccgagtagctgggactacaggcgcccgccactgcgcctggctaactttctgtatttttagtagagatggggtttcaccgctgtctcgatctcctgtcctagtgatctgcccgccttggcctcccaaagtgctgggattacaggcgtgagccaccgcgcccagtctttgtgtttactattactataaaaacattttataaaaggatagaagataaatttaaaataattttggtgttcaaagttttaataacagctaaggaaatcagaaatatgagttcaatgaaaaatgtttttttcttaagtttataaatgtaaactttagtttaataactcgttattaaagaacagattaaaaaccaaaaattttaacaatactgttacattttaaatttaaatttaactaaaggaaactctacaaaaaaggctatacaaaaagttatttagaaaacttaaacattgccgggcgcgggcgcagtgacttgcacctgtaatcctagcactttgggaggccgaggcaggtgaatcatgaggtcaagaggtcaagagttcaagaccagcctggccaacatagtgaaacactgtctctactaaaaatacaaaaattagccgggcgtggtggcgggcgcctctaatcccagctactcaggaggctgaggcaggagaattgcttgaacccgggaggcagaggttgcagtgagtcaaaatcatgccactgcacaccagtcctggcaacagtgcaagactccatctcaaaaaaaaaaaagaaaaaagaaaaaaagaaaaaaaaagtaaacattaaaatgatttatacgttatataaaagatattaaaaactcattatcagggaaattagattttatttcaaccaagaatataaaaaaatcaaaatgaatattattttttcaatttgcaatattgcaagctgaaatttatgattagttgttaaaacattatttttgttgagcaattagaaatcactgtatttgctttagaaaacctagtaaagagattttgtttgttgtaaatggaaggaagacgagaagacatatttttgaagtttcccaatttggtggtatttcatgtctaaatgagtaaagattttccttttcataactatttgactctttgttttaaagccaggtatatcattccaggtttcttctgcaggtgccagaaaagtaaatgaatagtacttctgctataaaatcttcttccctttctgaagaattaccttagagcagtaggtcaccagctgggagagatatcaaacacaaatatgccaggaaaacgaagtttcacagtcatccaattggaagcaaacgttttgtgggaatcaggtagttttcttgctgatttcctaattcttggtaatgttctctcatggtaatgttatagcaaattgttacgagatggcattacagagtgatttagaatatcatacagctaaatttggttatggcagcaaaaatgttctgcatttaaaaaatgttataactaattactaataaataaagtaactaatcaagctagacttatccagggcttttaacacttcaaattgttcattctaaattataattatataagaaacaaaatatgtaaggttatcatgaattatctctatgttgcaaagcaagagtaaacagtaaactaaatctaggtattcacaggaataagtttaaaaatttggattgcttgaagatgttatgcaaagctaagtttataaaaaatatttccatagcagtgttgctatttacagaagatgaaaaatcaactcacaactggtagatggtcttagaatgttaagaaaggaaggaaagaaaacttggcaaattcactctcactaggatcagcttcctagctttatagaagtttggactcaaatataaacttgagaactttaaggacgtattatcagataaataactawcactgaagccttttccagttacatgcatgaaactacatcttgagaaactagaaagaaatatttaaaatctaatataatttacttatttcctgtttcataggatgtataataaatatatattatataatttatattatgcatagcatatggtattaaatcatatatatttggaatgtaaaattgctgaaatctttccctccattatttcctgtcttctttcttttctttttaatgttcattgttaattatttcgaaatattgatgactaagaagtttaccagttttatatgaaatataacttaaaaattacagtattagaaggtgtagggtcaaaagtatggcaggtagatagatatgggaaatgaattgatttaaaacaggagaagtttagcctaaggttctgaccaaggtttgttatggttcaatggagggagaacatagttgtgacacatgaaggaaggcttgtagatgagagagaattaatggcctatgtgaaaacaagtaagtgaattagaataagaatgtcaagcagaaggtctggaagctaccttgaaccacccttgaaatctcttgcatttcattcaaatcactgagctctgagactccctgaactcacaattccataaattttgtattctgtgtctacatgtctgatccaagtcactccctgtctctttcttctttttcttagtaatattagcaaatgaaagcttatcagggtagtgatggtgatgggtcagtctgtgataatttctacgaagagtggattaaggagctgagttgtttaacctgggaaaaaaactaagggcaaagtaagtttgctgtgttcaattcctggaagaacttttactggaaattcaagtggattgtttcatgtttcagaaagaataactagaaaaaatcttgactctaataaatagcatgtgagtcattagattctttttttttcttccaaaaaagaacagtctcccttataaattgtgtttctcatcaccagtggttcaaccagatgtatcgaaggcagattgtaatggatggctgcaaagtaggactctttgattctgtgcttttcgtgtacacatcaccagtcaagaacgggcagactgcctcctcaagtgggtccctgatccctgacccccgagcagcctaactgggaggcaccccccagtaggggcagactgacacctcacatggccgggtactcctctgagacaaaacttccagaggaacaatcagacagcagcatttgcggttcacaaaaatccgctgttctgcagccaccgctgctggtacccaggcaaacagggtctggagtggacctctagcaaactccaacagacctgcagctgagggtcctgtctgttagaaggaaaactaacaaacagaaaggacatccacaccaaaaacccatctgtacgtcaccatcatcaaagaccaaaagtagataaaaccacaaagatggggaaagaacagagcagaaaaactggaaactctaaaaagcagagcgcctctcctcctccaaaggaatgcagttcctcaccagcaacggaacaaagctggatggagaatgactttgacgagttgagagaagaaggcttcagacgaacaaactactccgagctacaggaggaaatttgaaccaaaggcaaagaagttgaaaactttgaaaaaaatttagacgaatgtataactagaataaccaatacagagaagtgcttaaaggagctgatggagctgaaagccaaggctcgagaactacgtgaagaatgcagaagcctcaggagccgatgcgatcaactggaagaaagggtatcagtgatggaatatgaaatgagtgaaatgaagcgagaagggaagtttagagaaaaaagaataaaaagaaacgaacaaagcctccaagaaatgtgggactatgtgaaaagaccaaatctacgtctgattggtgtacctgaaagtgacggggagaatggaaccaagttggaaaacactctgcagtatattatccaggagaacttccccaatctagcaaggcaggccaacrttcagattcaggaaatacagagaacgccacaaagatactcctcaagaagagcaactccaagacataattgtcagagtcaccaaagttgaaatgaaggaaaaaatgttaagggcagccagagagaaaggtcgggttacccacaaagggaagcccatcagactaacagcagatctctcggcagaaactctacaagccagaagagagtgggggccaatattcaacattcttaaagaaaagaattttcaacccagaagttcatatccagccaaactaagcttcataagtgaaggagaaataaaatactttacagacaagcaaatgctgagagattttgtcaccaccagacctgccctaaaagagctcctgaaggaagcactaaacatggaaaggaacaaccagtaccagccacygcaaaatcatgccaaattgtaaagaccatcgaggctaggaagaaactgcatcaactaacgagcaaaataaccagctaacatcaaaatgacaggatcaaattcacatataacaatattaactttaaatgtaaatggactaaatgctccaatgaaaagacacagactggcaaattggataaagagtcaagacccatcagtgtgctgtattcaggaaacccatctcacgtgcagagacacacacaggctcaaaataaaaggagggaggaagatctaccaagcaaatggaaaacaaaaaaaggcaggggttgcaatcctagtctctgataaaacactttaaaccaacaaagatcaaaagagacaaagaagggcattacctaatggtaaagggatcaattcaacaagaagagctaactatcctaaatatatatgcacccaatacaggagcatccactttcataaagcaagtcctgagtgacctacaaagagacttagactcccacacaataataatgggagactttaacaccccactgtcaacattagacagatcaacgagacagaaagttaacaaggatacccaggaattgaactcagctctgcaccaagcagacctaatagacatctacagaactctccaccccaaatcaacagaatatacatttttttcagcactgcaccacacctattccaaaattgaccacatagttggaaggaaagctctyctcagcaaatggaaaagaacagaaatgataacaaactatctctcagaccacagtgcaatcaaactagaactcaggattaagaaactcactcaaaaccacttaactacatggaaactgaacaacctgctcctraatgactactgggtacataatgaaatgaaggcagaaataaagatgttccttgaaaccaacgagaacaaaggtacaacataccagactctctgggacacatttaaagcagtgtgtagagggaaatttatagcactaaatgcccacaagagaaagcaggaaagatccaaaattgacaccctaatatcacaattaaaagaactagagaagcaagagcaaacacattcaaaagttagcagaaggcaagagataactaaaatcagagcagaactgaaggaaatagagacacaaaaaacccttcaaaaaattaatgaatccaggaggtggtttttcgaaaggatcaacaaaattgatggagcactagcaagactaataaagaagaaaagagcaaagaatcaaatagacacaataaaaaatgataaaggggatatcaccactgatcccacagaaatacaaactaccatcagagaatactacaaacacctctacgcaaataaactagaaaatctagaagaaatggataaattccttgacatatacacactcccaagactaaaccaggaagaagttgaatctctgaatagaccaataacaggctctgaaattgtggcaataatcaatagcttaccaaccaaaaagagtccaggaccagatggattcacagcygaattctaccagaggtacaaggaggaagtggtaccattccttctgaaactattccaatcaatagaaaaagagggaatcctcgctaactcattttataaggccagcatcatcctgataccaaagccrggcagagacacaaccaaaaaagagaattttagaccaatatccttgatgaacattgatgcaaaaatcctcaataaaatactggcaaaccgaatccagcaacacatcaaaaagcttatccaccatgatcaagtgggcttcatccctgggatgcaaggcwggttcaatatacgcaaatcaataaatgtaatccagcatataaacagaaccaaagacaaaaaccacatgattatctcaatagatgcagaaaaggcctttgacaaaattcaacaacccttcatgctaaaaactctcaataaattaggtattgatgagacgtatctcaacataataagagctatctgacaaacccacagccaatatcacactgaatgggcaaaaactggaagcattccctttgaaaactggcacaagacagggatgccctctcttaccactcctattcaacacagtgttggaagttctggccagggcaatcaggcaggagaaggaaataaagggtattcaattaggaaaagaggaagtcaaattgtccctgtttgcagacgacatgattgtatatctagaaaacaccattgtctcagcccaaaatctccttaagctgataagcaacttcagcaaagtctcaggatacaaaatcaatgtacaaaaatcacaagcattcttatacacgaataacagacaaacagagagccaaatcatgagtgaactcccattcacaattgcttcaaagagaataaaatacctaggaaaccaacttacaagggatgtgaaggacctcttcaaggrgaactacaaaccactgctcaaggaaataaaagaggatacaaacaaatggaagaacattccatgctcatgggtaggaagaatcaatatcgtgaaaatggccatactgcccaaggtaatttatagattcaatagcattcccatcaagctaccaatgcctttcttcacagaattggaaaaaactactttaaagttcatatggaaccaaaaaagagcccgcattgccaagtcaatcctaagccaaaagaacaaagctggaggcatcatgctgcctgacttcaaactatactaccagactacagtaaccaaaacagcatggtactggtaccaaaacagagatatasatcaatggaacagaacagagccctcagaaataacacctcatatctacaactatctgatctttgacaaacctgagaaaaacaagcaatggggaaaggattccctatttaataaatggtgctgggaagactggctacccatatgtggaaagctgaaactggatcccttccttacaccttatacaaaaattaattcaagatggataaagacttaaacattagacctaaaaccataaaaaccctagaagaaaacctaggcattaccattcaggacataggcwtgggcaaggacttcatgtctaaaacaccaaaagcaatggcaacaaaagccaaaattgacaaatgggatctaattaaactaaagagcttctgcacagcaaaagaaactaccatcagagtgaacaggcaacctacaaaatgggagaaaattttcgcaaccwactcatctgaccaagggctaatatccagaatctacaatgaactcaaacaaatttacaagaaaaaacaaccccatcaaaaagtgggtgaaggacatgaacagacacttctcagaagacatttatgcagccaaaaaacacatgaaaaaatgctcaccatcactggccatcagagaaatgcaaatcaaaaccacaatgagataccatctcacactagttagaatggcaatcattaaaaagtcaggaaacaacagatgctggagaggatgtggagaaataggaacacttttacactgttggtgggactgtaaactagttcaaccatcgtgaaagtcagtgtggtgattcctcagggatctagaactagaaataccatttgacccagccatcccattactgggtatatacccaaaggactataaatcatgctgctataaagacacatgcacacgtatgtttattgcggcactattcacaatagcaaagacttggaaccaacccaaatgtccaacaatgatagactggattaagaaaatgtggcacatatacaccatggaatactatgcagccataaaaaatgatgagttcatgtcctttgtagggacatggatgaaactggaaatcatcattctcagtaaactatcgcaaggacaaaaaaccaaacaccgcatattctcactcataggtgggaattgaacaatgagaacacacggacacaggaaggggaacatcacactctggtgactgttgtggggtggggggaggggagagggatagcattaggaaatacacataatgctaaatgacgagttaatgggtgcagtacaccagcatggcacatgtatagatatgtaactaacctgcacattgtgcacatgtaccctaaaacttaaagtataaaaaaaaaaaaaagaatccctatctcttcctcatccatccctctgccaccaagaaaatgtgtttaatgcttctcttcccccacaaactaccttccagtcactggctgctccctacccatactgagggtaacccttatcctgtctcttacaaatatgggttagctttgcctgttttttaaaaatttaaatggattcattcaaagcattcttttgtaactggcttttgctcgatgatacttgtgcgagtcatcctgttttgtttagttgtaaatgattaattctgatggctgtacatatagtgcttcattgtgtgaatatgatacactttattgcaccgttgatgagcatttggggtagttttcagtttgatgctatttgaataatggtataacaagcattctattaagtatcttgttattgaacatatgtacacatttctactggaaatatatgtaggagagaattgctgggccatggggtatacctatgttcagctttagtaggtaccgtaaagtagttttcaaagtgattttatccatttacgtttatacaagcaatgtcagagaattctggttgctctatacccttgtcaacatttactgttgtcactatttgtaattttagctgtgctgatggatgttttgtggtcagagtgatggtttaaaatcatgattatatcttttctgttttaaaaacactctcccatggctttattaacctaggataaaatccaagcttcttaccatagtttacagacctctgtataatctagccactgcttattcctgatttcactttatatcagtctcccttgttctctggattccagatctgcagcctttacttcttttcaaagttaactktggagattttgcattaggtttttgtcttaccttttcacttattcagcctttaattttaatgttataatggttttttaaaaaactgatcactgggcaaatataaggagtcaagataaattaaggtgatatgatttgaaaagctctctttggttgaggtattctcaaagtttgagaacagtaagtcctttaaaatcactattttgttttccctttggatttaggcttaggctttgatattagcgatgatcaaagaatatgtttcctggcaaggaggagaaaaaacgttcctcaacagccttttggartcactgagattgaataaatgttgacaytgattcaagcccacattctgatctgcagacatttctttcccaaacagagctaggaggaagagtacattttcttttatggaagactgcatgatttgagtactgacagtttaaatactgtacactatgatttattgagaaatggaaagcacatttattatttttgcaaatcctttgtctttggcatggcttttataaatcactcttgtcatgcactatgaaagaactgttagctgtttcacttttacagtttccattgtcagatgttttaaaattgcagttgactatatatttgttgaaaggaaaaaactgacatgatcttgtacctttcacttcttgtagcagtcctggttttacatagattaaaggccattatggctgtagcatattatgctagaagtaaaataatgattgtaaaagctttaattttgttttattttatattattacagactgtcaaagggctaaatagagatatggagtagccattaatatgtatattaaatgagaatattacataaatttgggaagatcaacttattttttatgacaatgttaatcttaaatcttaaacgccataatatatattagattatatcataattaaaatatttgtagactcttttggtgtacttgccttattaaaaaaaaaagagttgtcaaactgttgtaatgtttctttgagaatcctgcacatccagtgagaatgaaataacagaaggatgccaaacttatcttctcaaaatttacaggaaagaaaatcctacaaaatgatatacatcaatgataaattattttcaactcaaactgttataagaatatgaagagctatgttaggagaagaatggattaccccaaacatattttgtacttactaattaaactttgaaataacagattttataacaatttataaagaaaagttcctaaagttttgtggctatggcagttaaaatttcaatagaaaacttatgattgctatagctgccagctactttcagtagttgatgatgaaagatttgtaagatttgctcaagctatggatgttttataaaattatctctaggaaatatgctactaaaagttgttttctgaataatattcttctgtgcatggagacatttagagacttttttattttatttatttatttttattttattattatttttttgagatagggtcttgctctgttgcctaggctagagtgcagtggcacgattttggctcactgaaatctttgcctcccgggttcaagccatcttcccacctcagcctcccaagtagctgggactaccagtgcatgacaccatacctggcttagttttgtattttttgtatagatggggtctcatcatgttccccaggctggtcttgaactcctaggctcaagcgatctgcccaccttggcctcccaaagtgctaagattacaggtgtgagccactgtgccagcctagagacatttttaaatgggccagaatctataaacagtgattgccgaaataatctagagatgacagtgcagagaaattatgttcagacaataatataaaaatttagaaaaggaagcactagaatttttaatgatctgaaataaatatttttcataaaatttaatgtattctttttttgtttgtttttgatacacagtcactctgtcacccaggctggagtgcagtggtgcaatctccactcactgcaacctccaccacttgggatcaagtgattctcccggctaatttttgtatttttagtagagacagggttttgccatgttggccaggctggtcttgaactcctgacctcaggtgatccacccgcctcggcctcccaaagtgctgggattacaggcatgagccaccgtgcccagccttgtttattctaattccaggtgttctctccaggatgataatacttggctttgggtaaatatcaattctaccattcagctttcagtgaaaatgtgtattcactgcatcaccaatatttatttattcgttaacaatatacatgtactatggtcctagtgtttaagtaccaggcttactatatgaagtacctaatatattataaaataaacggagaaatagaaattgaaaaggctgagatgaagatggcatgaaaatattttaaaatgtcatatttctagttatggcttctgaagcacattagacaatattttaagaaataaaattagggcagtgcattcatcataaatgaaagttcatgtaaatttattttatagtctccataatttcaaaaagtttaaagggctcattggactcattgctttcaattcccaatatggccattgaggaacatttcctaacaggagggttagcttccttgttttctgattgtttgctggtgcttgcatcattattacactgtctttaatgtttaatttatttataggagtatttttaagacacttgtgcattttctgagaataagtttagttaacattatatagaataatttgtaaaccaatttaactgcttacaagtaagctgaaaagtcacgatatcctggctgcctgtggctctctcttcctctctcaccaccccaacagccaaattatctttcagatctcagcctcattgccatattttctttggtggatctttggtgggaaattttaggtggtttaaatagttatttccaaaggtttttcttgctccatgtttgtagctaccatctcaaataatttcaatatggtcagttctgattttcttttgtcagatcttatgtacatcactcccttcatttttattgttgattgtcttccaatgagtttttttgtttccctcttcaattcaccaatgcacacagttctaattatccatccaagagtagattatgattatcttaagtcaaaagaatgccactctttttttttttttttttttttttttttttgagatggagtttccctctgtctccaggctggagtgcagtggcgacatctcggcttactgcaacctctgcctcccgggtccaagcgattctcctgcctcagcctcctgagtagccgggattgcaggtgcctgccaccatatctggctaatttttgtatttttagtagagacaggggtttcatcatgtcggccaggctggtctccaactcctgacctcaggtgattcgcctgcctcagcctcccaaagtgctggtattataggcgtgacccaccacgcccagccaacaatgacattcttaaagaatattatcttaaaaaattcctgataactaataatgacatttcaaacattttctgagaatatgttctgggcaaaattttctcagtgtaaaattatgcattcttagtacatattcttaaatgtgaagaaagggttatgtgatttttaagattgttgacgtttttcactgcactataacataaaagacattttaaaaaagaattggttaatttatgtgaaaaaagaggttcatttacatatatcaggatttactagttatggcaggtggcatccacaccgattagaagttattttattgtagctcctgaaatcttgattctgttatcttacttctattatcaaacgctcggagtatcttgacaaaaacattcaccgacaatgtgtttgaatgatgtaattaactcaggtagcatggaaagctgttgtgaatttaagaaaagcttcataaaatccttttttggttaagattctgtttattgtctagagtgcctctgtcaacagaaagctctgaagtcagggaatgtttactgtgagtgctactgtaattaaatttgccatttgagtcattgcccaggagtgatgtcaggtaacagattacgtttgttcacatctctttagtttatatgagtattatgagacagatattactgacagggctttatagattcaatatttcaactatttctctgtttacacttttgaaatgatgtcttgaaatcctgagaagatatcgatgagattgtgcaaatccttttcaaagagtttcctccaaattttatggtgaattacagctaaggaaatactgacttcgttttgctaaattatattatgaaaccatatttttctatgaactggcagaatgaagacttttctaaggtagctgtccagcattagaagatgaatgccttggaaactaataataataatgacatgactaaaaataatgataacattataaaacatgtttgaaggctgtgcatgcattatttccttcgtataactctatgagttaaataatattacattcattttacagattatgaagctttgagaaaaaagttaactaactcgccaaagttcacacaagtagaagcaatgaaataggaactcaaatctaggtctgcttagtttcagaacccacaccttcaccacctcactagatacttcattcctggagatgatcaagcctggtccagaagatggcttggcaaggagagcttagaaaggcttccaacatcagatggatggtgaaccaagtgaagtaaaactttcaagccctgagaatctgtgattctatgtttatatcagtaagaaatgtatttttgtgtacctttagacttcagaaggggaatcgtgactggagtttcatcaaagatggatttaaaattagttttaatttaaagcactaaaatggaatatgaaatagtttagaaaatttggtttccaaacaaatgatctctttgaattgtaggttaaatttagtcaaaggaaaatggtgtgactcctttgagagatgccttccttcaggccctcgtgtctcatctaagtattatagtcctttctctactggtctacctgcctggagttttgtgccttgtaatcaactctccactataaagttgagttatctactgaaatacaaacctgatcccgtaacccccctgcctaaaacagtctgtgatgatttccattgtcagttttttacttcattgctcaaggctttggccttgactgtctaaagtctcctgatacttttcggcatgcacccaccattccagacatacggggattctttatagcccctaaatctgttatagagatatacataactctgtcatgcagattgctctgcacttctgtgtgtgcatttgtacctctgactgaatgcttgtcttctcattttccatctagaaaatgcctactcatactttcagttccagtttaaatgaaacctcctgtgagaagtctctcaactcctcccaggcaagttaatcattcttttcacaattcctccagtgcatttggtacatattttcgttttaacaccttgaactgtaatcatatctccacatgctcccaactatgagttagctcctcaaggagaatgacaacattttatttaaaaaaatctttgtatgccaggcatggtggttcatgcctgtaatcccagcactttgggagaccgaggcaggtggatcacctgaggtcaggagctcgagaccagcccagccaacatggtgaaaccctgtctctactaaaaatacaaatatcagccgttgtagtggtatgcacctgtaatcccagctactcaggaggctgaggcaggagaatcacttgaacctgggaggcagaggttgtgttactggggggtccttgctcacagagcacccaagatggtggcgagccacttccaagatggtggtgggccgcttccaagatggtggcaagcctcgtgttctctgacctggggttcttggcctcacggattccaaggaatggaatcttgggccatgcggtgagtgttatagctctattagaagccgtgggtcacggaagagaaccgtggagtccagtgaccagtgtttagctcgattaggatgaacccaggcacttagccgtgcaggaacaatggcaagcctttagcccagatcaggagtggcaatgggcccctcgctggatcaggagyacagcggacaccctgctggatctggagggatgggagtcagcagcgggtctgcgagggcggcaaacagctgtggtggatggcgagcgaaagctcagctcgagccgtaacaaacatggaccagaagagtgcagttgcaagatttaatagagtgaaatagagtgaaaacagagctcccatacaaagggagggggtccaaagggggtagccattgctggctcgaatgcctgggtttatatcccgatccttgtccctcccactgtgctctcaggcaatagatgattggctatttctttacctcctgtttttgcctaattagaattttagtgagcgctctgattggttgggcgtgagctaagttgcaagccccgtgtttaaaggtggatgcggtcaccttcccagctaggcttagggattcttagttggcctaggaaatccagctagtcctgtctctcagttgcagtgagccgagatcacgccaccaccctccagcctgggtgacagagcgacactctgtttcaaaaaaaaaaaaaaaaaaaaaaactttgtgtagcttttgttttacaaayaattgcctactgcagttcccagtacaatagctgctcacaattccctgttggatgactagctgaatgctgtgtcaaggaagagcatgtgaaggaagagctgaaaatttggggagttgcttatgctaacatgctttctttagaatctatttttctccctgtttttgagagccctggaaagatatgttataggtttggaaaggcattatatgtgaaaaactgaagtgatactcaggcccaatatgacttattggagaggtaatgggaatatttgggttcattatgtgataaaaatgaaatagtaaaacaaatagcatatcttttaaaatattttttaaaggtttcaaagagttgtatgtgatggctggctggtagtgatcattggaagtcaaaaagtggccacattctagatcaagaccacacacccctgtgactttatctgttcayccagagtaatctctagcttctctgagtatagaaatagacactgtgtttggcataaactcccccttcttgaaagaggtccagattgaagtcaagaactgagtttaagaaaacctaatcctaagccttctatctaccttgattttttagcaggggtcaagagtgagttgccaatcctcactccttaatgtcctggacacttgtaggcttgccaccatttcagcctgactccaccaggacaaatctcagtatgccacttatctctgttcataccggtcaccacagaaagtgccagatttcctaaaatcctgatatcattgacattctttctataagaatgctttctagggggaactggtctctcacaagagggcattccttctctgcagccctctgaagtggtggctgcttttaattccacaactctttcatagctggacctgaagttgggagtaggcattgtcttctctcctcattgctgctttcagatcattctttttctttcctgtaaaattccaaattccacgacacccactgcttttctctattactgttatcagcttactcatgggacaaccccaagcccccacttcgctccgattttagcttctggatcaccatcactctctccaacattatcccattattggcaaagatgattcctccaataattggcctctcattcctttgattgactcttcaacagtgatccatcttctaccctgccacagccacctatagctattgtcaaaagatacctctcccttttaccttgctctgagctttctttgcaccccccaattgtagctattattttataatagattatgcaatttataatttattatgcctctttctagtcatttgtttccgccagacagaatgtaagttcctaaaggtcagggattttttttttttttgtatttgctgattgtaggaaacattggccagttattctccaaatctgtttctttttttcctgggtacactggtagactatatttccaggctcccttcctgtttggtatatccttgtgctttgtttctggttaaaggaatgtgaacagaacttacatacaattttgagcccctcttgcctctatgctcctttttcctccatttgccatatggacacagaagatccaacaggagactctcatgctctctacaggatagcggaaccacaagatggaaacaattctggattcctgagtcaactcctgatagctgcccaccaaacacactcattgatcttttacctggcacagaggtatagaatcctattgttaaggcatgaaaactattggattgtctgttataacagtgagggcatcctgaataatacaataatgtgtctaatgcacctagaagtgtgactggagcgtcgtaattgttcattaacatattattcctttttttcttcagtagaacggaattaaaggtcttaaaatcaccagtacttgctttaccagtatttcagaacttagtagtagactaaggctaacaaagagtctggcttggctggaattgccctgaattctgatgatctgtgccagagaagtataatagttgcccagagcatgatttccctggagaatggggttttattacagctgtaataaccaaatagaaaggctagcgaagtgccctgtgaattaatctattccagactaagtttgaaactaattaattatttatttcatggtatttaacacctttgtttagagttcaaggaatttttggtggactgggaaaagacaaattcaactagttacgtgtcattctcacatttactttctttatttataggaagaattctctagtaggctaaacagaggtagaacctggattctaatgccggtcttgattattttggatatctggggtcagaaatttgctacttctttactaggaatctccaagagaaaatgttcctctttttcttcattgatggctagaaaaatctaataactttgaatgactatgaaggtgaaaataaaaatgtcgtagggaaaagctaagtaagacataaagataatagctaaattgagaataatcagattttcttcctgatttcatttgtatatcaatttaccttaaccaaatgttactatttataaaacggaattaaacaatacagatagtaaaaactatttaataaccctgtctataagtaatataaacatatacacacacaaatatgtcaaaaaacactatctcattgaaagaaccctaataacttggtgaaggaatgaaaaaaatatgtacttagaataataacgttgcttctgtcttctgtattccatgtctatttaaattggaagagagttccccagttttgcctttacttatagtgaatgatttgtaacaaaatataatctagacagaaaaaggcatttgtttcctatttaagtacacaatttgttcaaatttggagrtattttccagagatctgcaagtcatatttcctaattcactctttccttcttcagtatgctatacattgtatgcataatacaatactatattgctgataatattaccattaactcctgatttatgtgtaactcatgactttttaatttcctatgttcttttagaattattggttttgtgcctttttgcataatcaatacttgtaatttgaaagagacaaaatctaaattaatagaaatgtaattctggtttgcaagttaaagtagactttaactttatcttctatgaaacatacaatagaaatcgattgtgcttgttattttttttcaagattttttggctattcaaatatatctcaaatattttttgaaatattttctccataaaagtgatttttttccaagggaaatggaaacactgatgattgagggattcaaaacttctataatccaaagtgaattatacttgagaacttcaaggtagtttataaatattaatttcttttatgatgtagacatactaatatacatttaccttcactgcatactctaagctttattagttggacttaaygtcttaaacacatctctgcttcctgttagtcttacaaattgtgattatcaaaaatacttaattgattatccacatggaacattctttaggactggtctgcacacacttagaggacatgcagtggttagtttttgcattgtggaattgctgtttgaccttagcatgacctatctgagggaatgcagaaccatgagtggaatctggttccaagtggggaaaatatactagtgttgcatgaactagggaattaccaaagggacctaacctaccccagataagggtttaggcaatgggagaaaaaaatttcacccacaaagaatggtagaaatccataattttgggaagtgctctagcctccttatttaaaaaagaaaaaaattcttaaaaatctgtggaaaagcagcatctgtctccttggtctgtgtgtgtttttgaataaactcccaaatgtttctttgacctcggcacagtttattgagagcagttgtcaggcacagattgggatccacattcccctaatctgccttccaaattccttcttgcattttgcttggtcgtatcctgtgcgtttcgacttggcatttcagcatttgtcactgatcctattttaaaaatcaagcttgccgttgttttggctcaggtactttaaaaacaaaaattgaaagtcagggaactattcaggaggtcttgggaaaaaaggcaaaaccagctgtttcctgttagtaacagctgaatctggagcacaggtttctttaggcgctgatctgctgtccactatttcacctctggtgtctgagcaaatattatgttcactgacttaagatgagaataaaagcaaatctttttccatcttccagttccttgggaaaaagcacaaacttgggaaaggagatgtttattttaaacttgtgataggaattaaatggtaccgaattccagtcccaggaaaaattgtgattttattttagggtaagcaattcccatatctacacatctctctcagaccctacttctcggtttctcgatattgttgcaataaaaatggctatttaacttttttcttcaaaacttacttgtcctaggtactaacctctcagagaactgggaaataattactttatcagttaattcacatgatgccattaagagtaataattgataaatatattagtatttattctagtcatagaaatttccggctctttcacaggacatttctgagagatttttggtcagaatgggccttctggtaactgccaaattacattacaaaggcatcagcctagtctgcctgagtgtaaattaatgtagatttatttttttaaaggatatttgcctatgtacacttcctatgcaatatgaagaatgtgtcaagtgtctgcatatcttatgtgttttaattagtatttactgagtactgttggttaacctggcctgattaataaaaacaacttacacgaagtaaattctgatgtcgttgattaattagttcccgtctggagtcttttcatcaagaaaatatcttatgctcatcatcaaaggcaggaaggcataagatggagggttaaaacacatcaactttggttggtttcctaagaattctctttggttctcttttttgtgggggtagatttattttaggagatgacagttctgctagacacatatggacagcaaaagggtgctagatcagaaagggtaggctgatcgtttagaacaggaacccaacaacgagatggaaacccagcacccaggatgtgcaaatgcctctttttgtattttgcaaatgcagttattaactagggctgttaatgaaggctcttttttgttaaatcctatttttagatgtatttacccctaataatcactaatatactttcaattttatttttaaaaaattgtaaagtgagttcatctactgaaggagcactaacttcagttagctgcgagtgcctcttaatcatttttttgattccataaaaaataatgtgaaagtaactgttttgatgaaatagcaacttggaggtaaaaacaggaaatgattgaactttttaataacttctattgtcctttaagcggtagttctttcaagttaaccatatcttctgctctgtagtagtaagtttccttaagattatttcagttcaattctacaacaccctgtcatttagagttaataaaatgtttcatttaggtgaatcctttcttgttctccagacttgttcctctggtattggtttggcaaggaagaagagggaatgaaaggatctgccctttgaggaaccaacaacagggcaacaacacacagcaagttggctggaatctctggttgattgtaactcttgttcttggatgagaaccactcctcacgggtggtgatgaagttgctgttcttttgtgagtgatcgatgcttcgttatccacgtggctttcaaatgctatcacccttccccagttgttgcttcctcacagggccttataggggccttttgaygcacagccctctgatagggggtatccatcttagtctcagctttatctttaccttctttcctcccacagcagatggaccaccaagaatgccttgctcttggggtacatccatccagtgagtggtctcttggaatggatataagcaaaatggctttaactttgctaccttctcctttgtctaggtgtgtatcagacaccctggtgcatcctagcaacagcacaatgggaatgcaggctggactcttggcacttcatcctcctgatctgccccttctctcctgcttcttcttggtattttgcttatcaggaactctgccactttcaggcaagagatgattaccaacacttgcttcagtaacaaggggagacacttttggttgaaagaccagagctggagaaccaattcaaataactttcctcagccacagaggggatgaagggagcaatgggttattctccactaactctatagtacttgaaaaggtcactttcgtcttgcttctctatatagtaaaagtcctcttaaaactctgtatgataaaagtcactaaacaggtttggcctctgtcacttactaattacattatgtaattatactaacaactggcataaatagattttggaataaatataactgactgctggtaagaacataaattacggtgtagaaacagaagtataaactcctggaaaaaagatcacagatttggcctttcactgtgctgcagaagtcagtcagtatgttttacagaggaacagagagttttaatatgacaggtctgttcataaggtgagttagagagctttcactttaaactttgagctctgagccataaagcaatgttatgaaccctaggctgaatgacctgaccggaactttctagctacttagtcacagttaagacttgaaatcaggctttctcatctcatgtcttttccactatagtatttgtatccatcagagttattaaaaaaatagaaaccactctggatatttcaaatggaaggaatttattagagagaatttgttacactggaaatgtaagaaagaagacattgagcagggaagagggcaacaactcagaggacagcaagtgcagggagctgctactattcctagtgcttgagtgtgtcactggagcccatggggtggggtctaggaccagggaaggggctgctttgggagaagctgggaccacaggggatgggattgtccagtgggatccggagccatgaagaaggtgcagccattatcagagaagccagccacagcagagacagggagtagtatccggtttcttccttcatcctgtctgctattcttacacttgtgtctgtctttcctttttgaattttcctagtgaatacaatggctatgaactaagaaaacacatggcacatctaataactaagctctaaaggggcatatttaaaggataaaaagaagcacacttccagtaagaccggtatttatttaattattataaaaataataattacacaaatagtaaatgataaaatgagacgtgattattgtactgtttattccttttcatcctcatcacaacttttacagtaattttacctctttgtttctttccaccacatgagaaggagataaataaagaaggagatgaaccagaaagatgagacaggaaaaaaggggaaggcaagtggaagcatcagagaagccaatgtggagagaatcaagaaaaacagacaaatcgaggcagaaaagcaaggccagtaactgtaatgataaagttttgaaatgatgctatgcatactacattttaatgggcagcttcctcattcaaatgagaggaaggaggagggattgggaaggtgagtggaaaagaatatttcaaacaaattctmyctccacgacatcactttcctttaggctgaccttgatttcttgtcaccagagcaggtgccacatgtttagctctctaagctgatggtatgtcgcaaatcccatgtttttatgaatattttagacaactttttccttgtgacttaaactcatctagactcaaaagtctaagtttggacagcagaaggaagcaaaagcagcaaaagaaagcatgctgtagaaaagatactaaaacttgaccataaacagaggagggaaaccagacagctgtattttacttcaattacttttgtttaccactatctgtcagggctagtcctgctgctactctgagcaagttgccctgctttaatttcagtagtatctgtttatcacccagtcttggttgccagttatggtcaggtcattaattgcttggtcacctcttaacctcatttgggaaagtttatgtgttgatagtcctgcaacttgaaccaggtcacttatttttaagaaggttaggattctttttattttctcccgcttattactgagagaagttagttgaaaaatacagagaccactacttaagtaatttttcaccaaagacattcaatatcatgacagaattcaggatgtggagggagactggcaggtggggaaggagagacagagaggaagagttggcaggacccatgtgtatcatcttctcattttagaagcccatatggtgcttcataatgctctgctcaattgccatatagttttagtctacatcctattaaaaagaaaccctattaagaagagcatttcagttaaattataaatctcacattataattcacaaaaatttttcacgagtatctggagtgtaatatagactgaccttgaaagataaattgagacatctttttttttaatgaaaaaatttctaaaagaactgtttccaatgtttaatttgtcaaggacataaagattacatgtctttgattaaaataaggttaaagtttgattttaatgttcaaaataaaataacccaaaatgtaaaaaacaaaatccaccaaaacactgttacccataatktaggcatcccctgttccttttatagtttgatgtacaaagctgagtcctaattttaaaccctgggttggactacccaaacaaatctcagtccctgtccttaagaatcttgtaatctggtttatctaatgaaatatagttacaatagcaagttgtagtggcttataacaatggtcagtggtacattagggttttgtcttacaatgagtagaatagtcggctacttagaattaatcatacaaatctgtatgttttatttcatttccagggcatttttgggaaaacattaataaatacacttaagagaaaatggactttattttccacaatcttatttatatttctatatctgagctatgtacactatcaatatttcatatatagtgcaggtataaagcatgatttgagtggtctcctctgatggctaccctttccagtgcccactgcttcctggatttgtaacttcagggaaatagagcagctgccttgagctgactcactcagagtacactcacaaaaacacagcctcttaaaaaagccaaaggaaaaacgagatgtggaagcaaggtacatcaatgataatgcttataaatgtacatacactctaatttcctttatcattgcattgtgagttctggcttttggacatgaagacatatgcttattttcattaacgtgatttccccctaagagataaagatatgattttggcagagaaatcaaaacaaatgtgaatactgagaaacatccaagttattatcttgacaattggctttaatacgccagttggacatcttaaccaaaaatttatcattcgttgacgtaaacccgtagtgtagaaattctaatgatatgccatggaaccaagagatttctattccctaaataggcattactattttattgcctaataaaataatagaacatgctatgaaggattaaatgagatttataaaaaatttaaaaactggaaatacaaataaaataattcaagacattcaacacttggaatatattagatactatatgtaatttaatatattcattaaayttacacaaatgtttaattcatacagaatgcaagatattttcatacatcttcagtgatgtttttacctaaatttatttggaacatctactggttagcagttcagaaaatctgggccttgtctctaatgttaaaagtaatttggccttaaagaacatacatagagatagctgtcaaataaaagatcaaatacatctttttgtgaaattgagcgtagtttagaaaattcgcagaatatataacattttgaaatatttaaggttagatttttaacttaaagtatatattttctctgaaatcgcataggtatagatgtataaaataataactaatttgaaaaggcaatgcttgattttaaaataatctaataaaagcaatgtattttataatcacataaaatttttaaaataggttaattgagatattttcagcaaatgtttctaaattcctgacattaaattcccaggttgattttaattttcatgctttggatttggaattgataggtttattagttggaaaaggaatcttaatattcgggcctctccttaagccagtctttcctgctcaagtcacacataaagcttcatttacaatagttaatttggaatttttaaacttaatatttccttttctaacatgtaaaggtaattaagtcacaagcagatttgcctgcaaacatgcatggctaacaacacattttcaaattttctacgttcagagcattaatactctattatcagttaaattaaatatgaacaaatatagacctaatggtcagtctgtaatgggttttaaaatagttacatgtgtaataggtttttataaaccttattagagattgagcctcacaagaaaactctaaggttagtagggcagcttttctcacagcccttcaatagcataatatattgcatttattgaatgtttccttccaccaagacccatggtcaccatgttacatgtatttcctctctgaaacctcatgacaacctagtgaaggaagttctgtggttagtcctttatgtcagaggaaactagaaatattaagcagtttctgccaggttactgagttggaaagtggtaagactgggaatagatctaagcttatcttaatctctgttggctttttatttatagatgaagaaactggaatatagagagcttaagtgtttagatcattagcaaggagtagggccagaacctgaacccagttcctgtgaatccaaatccagcactgattctactgcatcaccatggtgtgccaaaattattgtaagggtctttataaatataactttttcatttaaatcatgtgaggttagtagtgactttcagtatgtttagattagatattgttgtatatgttttgaactctatcctcttacatataaatatatcttgtttctttgatttctgattttgtagccaatcagccatcgttcctttctcggatctttccctccttccaagataattgctgcaattatattgggggttttagctaatggtaatagggaaagcagttgagttttcttgcatgraataagcataaatatacaattaggtaatgaatatttagtattttatggagcctttcagttgggggaggtcctatgcatgtatattaacatacggtaatacaagtacatagtcatgtatttgtgtcaatgtgaattaagagcaatataaataaatatgtatttatgttcattatatttattaaaactacataagtgaattgaaaattttataccagttttcgacaaactgtgtacatatgaagaaaggtaaaactgtgtaagtcaagatcatatataattttgaatgtaaaaaatatggctttacttaaatcaagaaataactaacttaaaaatttttaaatatagagaatttggttaactcagacactatttgttttaagaagtagttattctacatcagtgtggccaatttaataatttggcaagattttaaagtgggagaggttagtcccttgcaaaatagcttcccttttctgtatcccttgtctccttcatgcactaaagtgctcatgacctcttctgacttcctgctgctgctgctgctgcttttttttttttttttttttttyctttgagacagggtgtctctctgttgcccaggctggagtgcagtggtrtgtctcagctcattgcaccctctgcctcctgggctcaagcaattctcctgcctcaggctcccgagtagctgggattamaggggcccaccaccatgcccagctaatttttgtatttttagtagagacggtgtttcaccatgttggccaggctgggttcgaactcctgacctcaaatgatccgcctgcctcggcctcccaaagtgctgaattacacgtgtgagccactgcacccagccacttcctacttctttcaataaatgatttgatgtcagtaatttatgcctttgtggaactttaggtcaatgtcttatttctccaagagttatttgcattttgatatttctaagtaatgctacaataaaaagctttcttctaaatataattttagtcattatcaagcaagtgggagacatatttgaagggaaagaaatgacttcctgagcatagctgaatgaactttactccatatctgcataaaactgacaatgaagtcaacaaatcatttgataggtgtttttacaagtgtttattaacaatgcatttcattgtcattcaatgcccattgcactgaaactacagttaggctattcatactaaactataagatatccttggcactaaataatctataacatgtacagtagtggagtaacacaacgtttttttcctggcaaaatgaagactttcagtatgggatgtgatgtatataacaaaataaaattatagctttttctagctaacaaacaatgaaccaaatattcccatagatagctttaagttaggatagaaactattggtttttattcaattgctttgaaagctagtggagttatgctcacgaatgttcctttttggggttgatattcagaactttggtttataaatcctgggctgtctctgaaagctcactgtttgttctagggactcaaaataaaactaataatgcaagcccaccacttgacctagcagctagtgggaggacagggaaaatcttgaaagctcccaaggatttgtgatggctcgagagcctcttttgtttataatcttttatgatatgaatttcacagaatttaagtttgattccgataacttggaaatttactatgagtaaaataaaccatgtttgtgaaaccctatctctatgaaaccctacctgactctaagtcaggaaggaattttgtatgttgaaggaatggaaaaaaggccagtgtggctggaccaaatcagtgggaaagagagtgtggggaaaaagtcatacagaaaggtactattgacacataaatcagagctcaaaaccttcaagatcttgcaaatgagatcctttaaagatagtgtggatgtgctggcaatttctaacacaatagattgattttgacataatcttaggtatggacctgaggtagcaaagggcagagacatgaatgttgggtcaggccgtaactcattactactgtaggcttaattcatataatgttgatgtttgtttttactgaatgagtactttttaccacttaaaatcaaaatgagttttacaaaatcygacaccatatgtatttgattcacccaattttaacaaatgtcatggaatatagtagaggagtactaggcctaaaatatttccaaagatatttagatttaaaaatctctatgaatatttattgaagtttttctcttgtttagaatctattcataagatatttacataattttataattaaaagtgaaatgtgtatagtcaaacaaatgaagatattttccttatatggcatgaggctaataagaatatagagtccagcaaaaaaaagcaaaaaaaattggagaaaaaataaacaataaaattctctaaattaatggtgcatgccaatatcttttcataccttgtatttcttccttctcataatatctacagaagatattgttgttcatgcatttatctagcaaatactggtagagcacttactttatttcaaacactgttctatatttctgtacatgtatcaaaaagcaagagaggcacagtctctcttgccatgggagtttatatttgagaaggagcaacacaccataaacaagtaaaaacagggaaatgtgattggaagtgtcacctgatgtggcctgatattttaggctggataaacagaccaaggaatgtttggttcagcatccatttgaggatatgaggaggcaggtgctggcagagggaamagtagtctcaaagacctaactccggaaagagttttgtatgttgaaggcatagaaaaaaggccagtgtggctggaccaaatcagtgggaaagagagtgcaggggaagaagtcatacagaagggtgcttttgacacataaatcggagctcaaaaccttcaagagcttcagtcttgaagagcttcaatctcttgttcaaaatccttcaagagcttcccattacacctagaacaaaattccaggacttttcaggggcctccaaggctctgtatgacatgacttctcccatccactcacccacttttcttctgattacttcctaccagcaacacaccttgctgattgtctaatatgccaagtatctccagcctcaggaagtttttatttgctgctccctctgcttgaaattttctttccatggatatatacaggccttcttaatttttcttgttcattttcatttctttttattatactttaagttctggaatacacgtgcataacgtgcaagtttgttacataggtatacccgtgccatggtggtttgctgcacccatcaacctgtcatctacattaggtatttctcctaatgctatccctccccttgcccccaatcccccgacaggtcccagtgtgtgatgttctcctccctgtgtccatatgttctcattgttcaactcccagttatgagtgagaacatgcggtgtttggttttctgctcctatgtttgttttctgtgaataatggtttccagcttcatccatgtccctgcaaaggacatgaactcattcttttttatgactacataatattccatggtgtatatgtgccacattttctttctctgctcaaattttaaaaccttagagaagcctacattcaatatcaatgtaaaatctaacctcctcctatccctcaatattcctttactctgcttcttccagttggtatggctatgtaagcagttacaccaaagcttagttgcttaaaacagcaataactattatttctcacagtttctgtgaggtcaggaatttgaaaatggttcaactaastggttctggctctgggtgttttatgatattgcattcatgcagcggctatggctgggatcatctcttagccttcacttacatgtttggcacctggtctgggaagactaaagaagctrgggactagaacacgtgggtctccttagtcatttttctctgtagggactctccagcatggtggctttagggtaatcagaattcttccgtggtggctcaaggctccaaaggcaaatgtcctgagggagagagttagccatgtagaagccataccaccatttatgatctagtcttggaaagtcagtgagtatcacttctgctgcattctcttagttgagggaattacaaaagttaacccagcttcaagggaggaggggaatgtgacattttaagaacatgtgtaatggtatatataaatatattatccatgtttggaaaatayaatcttccacattcctttttctttctccagtgcagactttgctctatttattttctgttttcatcactagaatataagccctataaaggcaaagcttttatagtcttctttactgctgatcaatcaggttttgctacataggtcaatgattggcatatggtaggcactcaacaatttctgctattgaatgaataaatatttcctgaattaatgatctgtgaaacaatagaagtattatgaaaactagtgttttagagatgaaagaaagttttataatattccataaactgttccagaaacacaataagaggatagaatatactaaaattttcctaaatgtgaattggtttttatgacatgtacctaagtagaaaaaagaaagtacatgcttcctgtataacattttggaaaactgtagctttttaacatcacacttcctgagttctcagttgatacaaatcacagaagttgagaagtgtgagtttagattgtaatctgctcatgtgcacagattataacattgtaaatactgtgtcagtcacagccatacaaatgccataatgtagctcatgctatatcagtgaagatgagctgtgtggtacagtgaccctactcgctattttggactgttcactttagcatgttcagtgtgcctaaatttatgcttcttttaaggcagactgtttataatcagaaaggaaaaagtattccttggatcttcaatgaaagtggcaattttctaaagccaagaaatgttcatttaaaacccattttccgtaatgcacagtgtagtgttctgtgacacaaacatggggatatgcattaacgttgccctcttaataatagccctcaaggacatgacaatcagaggaacagagaaatgggtgatttttcattccaactgaaaacaatctaaatattcacagttagtagaatggttgagaaattaattatatacccccgtcaaatgtacatacatttaaaaagacttcccaaaagagaaagcaaaagatcatttttcacagctgacagcaggattacctaactaaaactccaagatagttaactaaaaattaaattcaataagttaattggatagaaaataatataaaaataccactagttttcttataaacagcaatgattagaaggcagaatggaaaaatamgaaagcataatagccatacaatataaaatacttaggactgatgacaagatataaaggaataagtaaaagacaaagtatttaagagtacaggctttggaattagacatgagttttaaatcctgactctgtcttgtactagacaggaggttaatctccttgagttcactattcctcatctataaaatgaatgtaatattaatgtgagattaacagataatgtatgcctggaaaaagcacttcaaaatagtatctattaaatgtaatttaaaatgcatcaaaaccttattactaaaactgtaggacttacataaaaatagactgatggggcaatgaaatagtagaggtgcttcagggacaaatacagtacttatatataaaaaaatacttttgataagggccacaattcaaaccaatgaaggcagcagaaaaattttagtaaatggttctggaccatcatttaatctttggaaaaaaatagctagatgtgtgttttttatttaaacacaggtaaatttcatgtaaactagagcattaagtaaacaaaataaagctgcatgtaaattagaataaaatttgggtcaatacgtgttggatattgactttaggaaaaacctctaaagcaaaagagcaacagcagaaacaaagagacgaattcaacaaatttaactacataaaaagttaggtgtaacataaaaaattcaataaaaattgaattacaaatgatgagaaaaaaggtatttgcatcatacatgataggccaaaaattaatataagtaattaatataaaataatctttacaaattaataataaatattgtgatccctagaaaagaaaaaaagattaaaaattgcagcaggtattttttttaaagtggtacaaaaattcaaaaaatacattaattctcattagtaataaatttaaagaccttttggcttatcaaactggtaagtaatttgaaagaaaaaatttaatatccattattagttagcatcctctgaaacgtgaatgttcagacattgcagattaggaaataaattggagtaaatattaaagatcttacattagatttataacccttgacccaatatgttttctatgcaaatttgttttaagaaatagagatgtgtaaaagcactgagatgcaaaactattcattagagaattctttataacaaaggaaaattggaaaaaaaaacagggattggctaaatcatgatacaaccaaatgatggtatactatgcagccattagatgtacaattttgaagagaagttaagggaatgggaarctgtgcataatacaattttaaaaggataaaggagtatatacttttatatgcctctacatcataatctaatttgtagttgttatttcctctcaggggttatgagtgactttcatttttttackttgcattttttgatactggttcaaattctctacaataatatgtattttatatttagaaaaaaatataaaatgttgccattgatatcatattaaatgagttaaaccatgaaatacacatgcagatggcctcaattatataaataaagatatctagaaaagtgcacagaaagaaagagttttacctcttcaattattttcatttttatttaatctggtgatccaatccatatccatggagctcaaattttgataccttgatctatcaacattaaactttatatgatgtctctataccctgaaagaccagaaatttgtggtcctctcctcctaatttttaagttgaattattttttgatattccattgtaatkattctaatcaattatacttacacttttatatctattgataatgattctaatctattaaacttctttatctggatttttcaacttcaagtctctatatcttgatttttcaactttaaacagtatcatttaattttccataatatgagctgagaatgtcagtaatcataaacttccctccacttctcatcctcatttttctcccattatctggcagctattccatcacttttactaagattcagaagattatcaaatgggaattgataatattgtgattatgtaaaagttattgatatatcaatagaacatactgcatatttgaaatccattggaaaaaatgtaattctttcttctttgcttttttctgagacagggtctcgctctgtcacccaggctggagtgcagtggtgtgatcttggctcastgcgctctccaccccacgggttcaggtgatcctcccacctcagcctgccaaatagctggaattacaggcatgcgccactacacccagctaatttttgtattttagtagagatgcgcttttgccatgttggccaggcttgtctccaactcttgacctcaaatgatccaccggctttggcctcccaaagtgctgggtttacaggactgagccgcgcctggcctcttctttgctttttaacaactttattgaggtataatttacataatacaaaattcattgttttttttttttttttttttttttttttgagacggagtctcgctgtgtcccccaggctggagtgcagtggcgtgatcttgactcattccaagctccgcctcccggggttcacgccattctgcctcagcctcccgagtagctgggactacaggcgcccamcaccgcgcccgtataattttttgtatttttgrtagagacggggtctcaccgtcctgtcgatctcctgacctcgtgtcgatccgcccgcctcggcctcccaaagtgctgggattacaggcgtgagccactgtgcctggcaaattcattgatttttaagtatataattcaaaggtttttagtaaacataccaggtgatgcaattatcatcacaattgagttttagaacagtttcacattttcattaccccagtaagatccttatgtccatttacagttaatcccctttcctaaccccagcccctggaaaccactaatctacttcatgactctctagatttgccttttctgcatttcatataatcggaatcatacaatatgtgatctcttgtgtctggctttttataattttaaaaaagttttttaaaaaatttaaacattcctaaattgacacaatgtacatatttattggatacatagtgatgttgtgatgcatagagtgtgtactctacatcagggtaattagcatatccattatgtcaaacattgatcctttctttgtattgggtatatttaatatccttcttctagctctttgaaactatgcaatacattattgttgattatagtcatcctacagcgttatagaacactagaatttatttcttccaagtatacatttgtatcctttaaaaaaattttttttaccaaaatggtgttaagatttatacatgttgtagtacacatcagtattcaatacctttttactgcagccacaaaaaagaatgagttcatgtcctttgcagggacatggatgaagctggaaaccattatttttagcaaactgtcacaagaacagaaaaccaaatacaacatgttctcactcataggtgggagttgaacaatgcaacacatggacacagggcggggaacattacacaccggggcctgtaggtgggtgggagcctgggggagggatagtattaggagatatacctaatgtaaatgatgagttgatgggtgcagcaaaccaatatggcacatgtttacctatgtaacaaacctgcacattgtgcacatgtactctagagcttaaagtatattaaaaaacccacaaatattagattatatgactataatgtgaacttgtttgcttctccttatagaagaaaatacgtgaacaatacatgaaaatcttgtagaatacatgaaatctcttctatgtattatttttgctttatgtgtttggaaactcgatttttatgtgcataaacatttgggatttttatatcttcttaatgaacttaaactctttatctttaggctatgccctttttatttcttttaataatttttgctttaaaatctacattttctgatattcctatcatgactccagtgttcatttggttagtattattatggtattttttttttttactacctttttacttttaatccatttgagcttttacatttgaagtgcttttcttatagaccagcatttagatcatttacatttaatgtaattattgacatgttaggatttaagtcttgattttttgctttcttgttttttcttctgttttttgtttctgttttctttcttttgtcttcctatcggttacttgagcactttttttttagaattttattttgattcatctatatctrtatttttaagtgtatttgtttaaatagctatttttratagttccttttgatatcaytatctatgcatagcttataaaaatctactgatatgtcattattttatcagtttgagagaagtatagaactctcacctcatttatgtccctttactctctcccatttataataattttatatattccactgtatacacttagaaccatatcagatgatataattattgcttcaacttttaaacaatttataaaactcaagaggatgaagaaaggctatgatatttacctgcatttttgcttactgtgctttttgttttttcctgatgtttcaagtttcattttattattttctttctgtttggasaatttcctttagctattgttttaaagaaggtattttggtgacacattcttttagtttttctttatctgttattgtcttagttttaccttcatttctgaagaatattttcactgaatatggatttcaaatttgacagatcttttcttgtagtacttgaaaaaagctgtgccacatctttctgccctctatggtttctgatgacaaatccattgtcactgtaaatgttttttctctataggtaagaatttttctctcactgctttcaagattttttcctcrtctttagttttcagaatcttcactacaatatgtcttgatgtggatttctttgggtttaccctatttgagatccattcatcctgagtctctaggtgtatgtctcttgccaaatttggaaggcttttatttattatttctttgagttttcccacccccctgcttttcatctgkyatcttttcatctggcatcccattaccttcactgtggtttaaaatttctctcaaagttgctaatctggggcaactatacagtttattctgtttgtttctcayaaggatactgtctcttgttgcctgatggctaatggcttgaaaacaatatattttgtctgctttctggctaatttagatggtcctcattactcaatcttgtttagaagcagaagcctgaatttctttttagtaagagtttgcaatgtgttttgcttcctgaatttgaattttcttgttttccactgattctggaatcgtcttaattgcttccttttcatatttttctgcttctgtattcaatctattttacacttctgaaaatccaaagagattgtgttagttcattttcatgctgctgataaagacataccgaggctgggtaatttatgaaggaaaagaggtttaatggactcacagttccacatggttagggaggcctcacaatcatggtggaaatcaagtcacatcttatatggtggcagacaagagagaatgagagccaagtgaaaggcttataaaaccatcagatctcttgagacttattcactaccatgaagacagtatggggaaatcagctcccatgattcaattatctcccagtggtcctccccacaacatgtgggaattatgggagctacaattcaaaatgagatttgggtggagacacacatatcattccgctcctggccccctcccaaacctcgtggtctcacttttcaaaatcaatcatgccttctcaacagtcccccaaagtattaactcatttcagcattaactcaaaagtccacagtccaaagtctcatctgagacaaggcaagtcccttctgcctatgagtctgtaaaataaaaggcaagctagttactttctagatatgatgggggtatgggcattgggtaaatataactgttccaaatgggagaaattggccaaaacaaaagggctacaggccctatcaagttcgaaatccagtgggacagtcaaatcttaaagctccaaaatgatctcctttgactccatgtctcacatacaggtcatattgatgcaaaaggtaggttcccatggtctttggcagctctgcccctgtggctctgcaggttatagcctccctcccagctgctttcatgcactggcattgagagtctgtggtacctatccacgtgcacggtgcaagctgtttgtagatctgctattctggggtctggaggayggtggccctcttctcacagctccactaggtagtatccaagtggggactctgtgtggaggcttcaaccccacatttcccttccatactgcccaagcagaggttctccatgagggccccaccccagcagcaarcttctgtttggacatccagatatttccatacatcctctgaaatctaggtgaaggttcccaaacctcaattcttgatttctgtgcacttgtaggctcaacaccacctggaagctgccaaggcttggggcttgcaccctctgaagccatggcctgagctgtaccttggccccttttagccatggctggactggctgggatacagggcacgaaatccctaggctgtacacagcacgggagccttgggcctggcccacaaaaacatttttcctcctagacctccaggcttgtgatgggaggggctgccacaaaggtctctgacatactgtggaggcatttcccccattgtcttggtgattatcatttggctcctcattacttatgcaaatttctgtagccrgcttgagtttcttctcagaaaatgtgcttttcctttctatcacatcctcaggctgcaaatattccaaacttttatgctctgtttcccttttaaaactgaatgcttttaacagtacccaagtcacttcttgactgctttgctgcttaggcatttcttctgttaaataccctacctcatctccctcaatttccaaattccacaaatctctagggcaggggcaaagtgccaccagtctctttgctaaaacatagcaagagtcacctttactgcagttccgaacaagttcctcatctctatttgagaccacctcagcctggatttcattgttcatatcactatcagcattttggtcaaagccatttaacaagtctctagaaagttccaaactttcccaccttttcctgtcttcttctgagctctccaaattgttccaacctctgcttgttacccagttccaaagttgctttcactttttgagtatctttacagcagtgccccactctactggtaccaatttactgtattagtccattttcatgctgctgatgaagacatacctgagactgggtaatttataaagaaaaagcggtttaatggactcacagttccacatggctggggaggccttacaatcgtggtggaaggcgaaagtcacatcttacatggtggcagacgagagaatgagagccaagcaaaaggcttacaaaactatgagatctcatgagacttattcactacaacaaaaacagtgtaagggaaaccacccctatgattcaattatctcccaccaggttcctcccacaacacatgggaattatgggagctacaattcaaaatgagatttggatgggaacacagccaaaccatattagacatgtacattaggaactttttttgtctttcttgacgtctaagttattttttcataatctcacttctgtgtctatctgtacattttgggcaatttcttcagatttttcttttctttttttctttttttgacatggggtctctctgtcacccatgctggagtgcagtggcatgaacaaggctcactgcagcctcaacttcctgggctcaagtgatcctcccacctcagccccccaagtagcagggactacaggcacacactaccatgcctggcttttttgtgtatatatatgtgtgtatatatatatgtgtrtatatatatatatatatatatatatatatatatatatatatatatttttttttttttttttttttttttatagagaaagggtttcaccatattgtccaggctaatcttgaactgctgagctgaagtgatctgcctgctttggcctcccaaagtgctgggtttatgggcatgactcatggctcccagcctcttcatatttttcttattagctaattctctttctgttcttaccttgtacattgaatatgtaatttcaatggttcttttttaattaaaaaaattctttttacttccttttcctgaatggtcctttaaaaaaatagaatatcttttattggtcatgttttgaccaataattttttctatttatttaaaatttaaacattgttataacttattaggtaattacaatacctgaaaaaagaaaaaaaagtaaytaatgagaaaaatcagaaacatagcaacagatattcataaacaaatgagggtgtggttctattagtttttgtctagtgactcttactagtgatgacttgattaactatgtgttttataattttgaattgtaagctcatatttgactagatttatctgtaagaattttaagaggtgtgtttcaggattcattsctccaaagaaatttgctttccttattctaggtaaccttggatgccactaacccaagatcattttaagttttgctgtttctcagacaaagctggtagtttaagtttaatcaaactcatagatggcagttccattgttaaaatctatcaaagaatgcttttattttgtttttcctctcctagagactaagctgagagagaacattttttcaggtatctcttggccwcacttaacgctttcttgtccacaaattgactacatgggtagccttttatggtttctatctttctgggaggaccttggtttcaagtcttcatactgtacagacccaaacccttattttctgtttcctatatactgattataatacaaggctgtagattactatgtttgataaatgtccttacaattctaatttttttgtccctgttcattttggacttcattttatataggttcagttatgcattcaaaataatatttattggaatttttccaatatttgaaaattatttttggtctggaagttttaagagtaccttagtctgcgatattgttcagaaattaagatattttctaaattattttcttgtcagtgaaaacataatgtacttttattatcaataaaacagtattttgtttttaaatattcttgatgaatttaatccactttttcttgaagccatatttttgatccctatgatttcttgttctcacctgaattgatttcttcctagcccttcttcacagatgctaacttgggattttgtttatgattttccattgctatgtttctgatttttctcattaattacttttttttcttttttcaggtatattaactcatgtaattatttttaacgagtatttgaatggtatgctttctgaatttggtgttctgaatgtgtcatcatttatctttgtcattgagtgatggcttactggctaaagaattaaaattattttctttaccatttgttacatggtgccaatgtattagtcattcttacattgctataaagaaatatctgagactgggtaacttataaagaaaagaggtttaattggctcatggttctgcaggctgtaaaggaagcatagctgcttctggggaggcctcaggaaactttcaatcttggcggaaggtgaaggagaagcaggcacatcttacatgaccacagcaggaggatggtgctaaaccactagaaatcacccccatgatccaatcacctcccaccaggccccacctctagaactggggcttatattttaacatgagatttgagtgggcacagatccaaactacatcagccaatataaccttaataygaaaaccaataaacctagtgacacaaatacttagaacaattttgcttataaataaggatgtagtttctaaacaaaaggaacaccagcaatgcataaaaacaatgattacaaatgatttgggaaataattgtcactaaaatctattgaataattacactataatgaaaaggaaaaaaatcaagtaatattatcaataataataagaactaataattattaagcaattattatgtgccagataactgttttaatttctttacttgtattaactcattcagtgcatgaacactatgaggagatgttattattatgctcattttatacatgaagaaacagacaaaaattgtaacttgtaaaaaatcacataattctttcagtgaaagaataaggattcaaacccaggtagtctagatttagagtatatgttatattacattttggcaatagtagatactaaattcattctatacatttttgtcaccattcctaataaaatattaggtaaacaggaatgaaggaactacttgttctaatagagataatttacctgactgtagagttaaagcaaaataaatggaaactatgagaaatgagggacatacaaattggatcattttttactgtatttttatgactattttctcaattttcccttgcagaacttatattgaatttttttgtaaactaacaaagaaaaatgatttgaattctctatgttaacagaagtaactttttgatacttcctaaggatgaagattatcttggtcaaggatttaaataataagctattttatctagtttattattcaaaattttattttatgaaacatttaatgaaatgattaaggatttttttctagtaagtgaccgaattagtataccttgaggtcttaaatatcaatgtgtgatagaagttacatagtgaaagcaaagggcaaatgaattgtagtattgaaacaagattcttagacatatacttaagtagaatagttctcattctttatttactttgcaatgttattggtaagctggtcaatgtgaggtcttgacatttcatgtcatatttagaaaatcatctgtatagcctcaaggacttaggtatcttgattcataaaataataattatagagtacttgctatctatggagatttttggctgcaatatttctttgaaagcagaacatagatgtttgttgactgtttcattaaagaaatatcaggtaacagtttattacatgaatatagctaagattacaaatgaaggcacagtgagggtaaaattggtactttcagggcaaagattcacttatttctgacaactctggtaaatgcttataggaatgaagttttaatttcacaaagctgtctgctagctaaagacattacattcagattgaattctggaaatatcttgtctgagaaaggaaaatggaagcctcacttgatttaccctcttataatttgcaaatcagaagccattttctataacattttgcaaaggtcctttttacgtacacattataactgactactagatagcatcagtgtcatttgnatagacatagtaattttacattggaagactaattgttaataatagttcccatttttaagaattagctttaaatctggagaatgtctctgtttctcagttttctcaactgttgaacaggagtattgcctatctcacaggcatcttgtaagaatttaaaaaggtaatatgtaataggtactgagaacattgtctgaaacatcagaaatattcaacaaatattggatgttattwccaatctttgaatgtctctaccttaaaactcatagtaacaggcaagttttcttgcaagaagaaataaaactacatctgggttttcaaacaaacaagaagaaatattgtttataagtatattttctatagcagcttgcagatagcaagagctgttatggtgctcatacttaaggtctgtgcttgtttcaaagaaagctcgccatgtgttaggagcttggcagacgactcagttctgattccttttatgtccactctctctcatttctcttctaaaatgcacaagccgcaaaccatcagtttctctcttgtccctctctccctttctccttctctctctcataaacacacacacacaaatctattcccttttccttcaaaaaacacacacacacacaagtgcatttacactagtttcattttatttattttttaatccccaaaggattcatagagcaggctgtgtgcagctgccgtattttccactggttaaattggcagttacctactgtgtggagttgctaggagaaggtgaataagcatgcttacagcatcagttgatgtacatattcttgcaataacaacctgtggagctgtgttcttctgtatggctttagatgttattttctctttgttatcattaatatttgttgcatttattgttagatgatgatacatttttaagtgttagtttcagatcaatttagagaaaaaaaccttggcatttaaacaggcacttttttttctcrtggtggtgctgctgatactggctcctaccatctgtttccttattacatcctgcccttgttctgttggtagagaggaattcagcttcttctggagcgcgaaagtcattcacgtttctcttgtgcataatagagctcgtaaactgtaggaattctgatgtgcttcagtgcacagaacagtaacagatgagctgcttttggggagagcttgagtactcagtcggtcagtagtacagtagcaggctcacatgtacggattgttcttgtgaggtcagagcatctgtttatactgctgtctgcttaggkgggtggtgaggtggtgagcagtggatatatgcctgtcaaagtcaatagcaaatctgtcagagtcttccctcagctttgtacatcagcactgttttgatagataagagaggctactgtataagtgtgtaagatttgtaatggactgaggaatgcttgttctagctgctgaaactgactgtaactgtattgtcttaggagcatcatcatggggtctagtgccacagagattgaagaattggaaaacaccacttttaagtatcttacaggagaacagactgaaaaaatgtggcagcgcctgaaaggaatgtgagtatgctctttgctttttatttccccccaaaagatttgactattaacgtgactaattgttggtgctatccgcctttgtgggctagtttcctttagaaagattttctctygaaaaataaaatgtgcctacctcagctaacaacttgttgaaagacgaatgattttttgtacttgcacatgttattaaagtaaggtaacttctggagaagtcactttactgtcatattacatggtttcttttacgcattctgtatgtgctgtttagatatgtggttcagatatgcagaaaggtaactaagaaagccatttgccgggatactgccacaaataaaatttccctcaggtaagcagagagagaaataagactgatacttctttctctgtgattagatttggaaaagcaatgagatgattaatatgataataaataattatactttattgtgcttctttttgcttaaatgatatttctataagaaaaaatgtttacgtgataaaaatattaacagcatatcaaacttattggagagttttggctttaaattaaccagttcacagttcacttctcctgagagtacagaatagtccatagtacataatagcccttagtaaaatgggtcaagaattatgcattatgtcaaacatgggatgtaattacctaagtcagacgttaattgcaatgctattcagcttgatatttacacccttacattttttttagctgtgtgtgctactagttcctgtttagtgtttcagcaccacactgtttgtatgctttatcttaattgtcataatttaaaaatcagatttaacatttggataaaaatgagaaatatgaatatgaattttacaggccrttgtaattgcttagtatatttgcagatctcaaatgaaaatattaatatatttgcttttctataataacagctgaaagaatcctacactatgcaaaatagagattttctaagatttatatctctaatgctgtatttacacactatttttaaaaattcagtacctgagtaaatttgatgtccctgtttgatatttttttaaagaaaattacatcaaactttgtttagaggtaaaaattccttctgctttcctccatttgattgtatttaatgatgtttgtgtatttaaatattgttctttgtatattttcttacttcttgaagtaatacatggctttacagtgcattagtgtaagagcacaataatgcaaagaacatatagcagagaataactttcaaaaaggaagccatctttacattatttggatgagctagaaatctgtttctaagatccattgaagatttagaaattacagctttttggtgaggttgttctctagcggaacaagtaatcctatcaaagcaaataacagctctcaaaattaattagcatagatgcaaattaaacattagcagtcagcagatgatttgtgttttagcctaatgagtggatgaacatcagtaccgggaaaattatgtctctcattacaacctattttagattttcttctccttagaaggatgttttgcttattttgttttgtttgcatttttctagtttcctgtagttacttgaatgtatgaagatgtatgctggtggatttatgcatatgtctttaagaaatttgaaaagtgattttgtgtttatttgatactttagggcaaagttactgactcactgtatcagttggtctcagagatcaatctgtcattttatttcagaaaagggtgatagagtcatccaacagtagatcttcatgaattgatagaaggatatatgaaaatatgtacatgcaaaattaattttgagttgtgtttatttagagccactaaataatcattaaccaagtttctttctttctttcttttaaaaatcattatctaactgactaaaatgactgctttttcattgaataaagaagaaattgcattttggtactatcactttaacttgtactttgacttagtacattttcagtgttcaaggcttagaattgtcaaagcgagaaactctaaatctaaaatctgcatgactaatgacaaccaaattgtttaattatggtcttttgtatagtttgcattcagagcagtgatatgagggactccctattccattgctgatattgtcttgtctatttaaaatgcaatattgattcaaacagaattttagcttatcaaaattgctggtactagaattctacacttaagttttggcaattaaaatcatgctactcattaaacctatcaaacaattgtgcaatagttttcttatttttgctaaaatagactaaagacctttagatatttgtttagaaagtgatttttaaaatcttgtactttayaaatatattgacttattttggcataatatactgtttttaattgagcttccagtatgtaaattttaaggttaaataaaaatagagacaaaggtgaaagtaaaataatgtttattcaattatgccttaaatgtagaaatcatgaaccattacaggtagatatttagagaaaatatcttatagggattgttatatgacataacattttagagagtcttttgagtccatagaaataatttttaaattttggaacacgtggaaaacattggtaactaaattaaaatatcaatgctgtctaccatttttgttttcttttattgagcttcttctaaattgtcttcatataatatttgagacaccatataaagttatgtgccaagaaatctctttttcttttgtgacaagaaaggtgaaacagtttcttactcccattctgatgtagacttctctgcattagtctattaattttcttcttatattacaatctttttatttatctttttccatattcaaccactaatttgttactcagtacaacaatttagattctacactacaagtcatcatctatgatggtggaaatatgggcaaataactatggcatcaggtctttcataaattagatttaaaaagaattatatacttggccataagttatcaatcgtttagggctggaaaacacttcctatttcttatgccatctcaacaccaaatgaaatttctgattcagaagtttcttatgaatttgggacctagacttcttcctacatactaagaaaacatagctattgatagtctttcaaagattgtcaatttcattgatttccatgtggaaagttggtttgaagattttacagtatttcacctatgcattgtgtttcttttccatttgaaagataaatgcctttttgtgtcatgtactgttgctttttttttctctaaacatacaaagagttccacacctgtggattttattaaaaaattaaacatttaaaaaacactggtgttgctctttccagttagtgacattgctataagaattcaatctaagaggtgacagcattttcagaaaactgaaaatgagcatttttcaggtagaaaattcagtgaaaacgacatgaaattatagggaaaaatctaaaacaaagtattatcttactcaggcattcaagagaagagaagaaagtatgaactgccagaaaccataaactactgacaaaaatgtaatactcaccacttcatagtacttactgccccagttccttcagtttttataaacatagtactagaatctatcacaatttcagttagaagytaactttatatctgatcgctaattttacacgtctcgacacatamctccttatctcccccatccygacgaatgtccagatattaattttaagacttggaattgtgaatgcaatgcttgaaagacattaagttaagcttcgttgtcttttttttctctgtgattggtagggtagtgaacatgactatcaatagtgaaggacaaaatgtttagaagcaaaaagtgaaggagagaagaattagatggtaatcttttaattctaagcaactgttattgttgaagagggcagtatgttgtgtagttctcagatggagttgtccaggcccttatcaccaagaggatgtagcagaaatatacatttaaaataaaaattagcaaaaaaaacatggaagtgacaggagctattagcatcatattcccaaattggaaccatactttaggatgaaggtgcattatagataagacacaaatttgatccttttactctctgcttaaacacctttaaagctttgcatccttcacagggtcactgtataccagcttgatctttggattctcctctaatgcctctccttctgtgacatgcctcctattcagacctagsgtcacccaaaagaaacattgcttaccaycccttttcctgtgctcattttgttctctcttctggaggcaactgttcctccgttttcctttcagccaggtttgctcttgttctatacgaagcttttggagttgcgtagggaagtttctggtggttgcagtgatggcaaggtgtttctgcatttagtgggcagcagggtccgggtaggctaaatgtcctrcagagctcagggcatttccttatcaggaggagttgtcccactcaaaattctgatagatatcctgttaaaaatgtgcaaagattgctgcttaaatttcacttgcaaaggaaattcttcctgaccttccagactagattagttttttattttcagctcataaataacctgwatttctcttctcgtaacaaaatccaycttccctattcaaccacagcttttgagtgcaagagctatgctcacttcattggatttgctcttggattccagcacatagcacagtacttagcacataggagataatgcaattaatattttaagtcaatgaatgaataaaattctgaatcttatactggctgtaactagaaaattagatcagccaggctgcgaaaatagtgactaaaaccaggtgggaggattggagatagattcacagctggaataaacatggagaagatggaagggtgtttgctttatcatctttatcatcatattgttagaattgtgcagatataacatatttgtattcttactccccaccagtgttcttaaaaacataagtctcttaagtagttatgcagctagtatctggtagaacatgggtttaaacatagatatacctagctctaacattatatttatcttgcatccaatacagaaaagatgacagtctcagaagacaccagaaaaggatctacaatggttctccttaaaactcaattcccaggcttggggtrggcagacttatcaccctccagaaatgtccacgtcttaatcccctgaaccaaaggatatgttacttcatttgaaagggagaattaaaggagcagatggagttaaaattgctaatcagctgactttaaaatagggagmgtatcctgtattacccaggtgagcctaatgtaatcacaaagattcatcttcctccctccctccctccctccctccctccctcccttccttccttcccttcctttccttccttcctttctctctttctttctttttctttctttctttctttctttttctttctttctctctttttccttccttccttccttccttccttccttccttccttcctcccttcctcccttccctccttccctccttcccttctttctctctttctctctttctttctttttcagataggatctcactctggtgcagtggtgcgatctctgctcactgcagccttgacctcccaggctcaggtgatcctcccacctcagcctcccaggtagcaagaactacaggcatgtgccaccacacctggctaatttttttatagatctagtagagatgggtttttgccatgttgctcaggctggtcttgaatgcctgggctcaagtgattcgctgacctcagcctcccaaagtgctaggattgcaggtgtgagccaccatgcctggccaatcacaaaggctcgaaaagtggaagagagaggcagaagaaaaagtaggagtgagtgacaaggacttaactcgtctgtgctactattgaagatggtgaaagtgggccacgagccaagggcaacctctagaaacttgaaaagataataaaacagaatgtgcctagagcttctggaaagaatacagtcctgctgatactagaactcagtgaaatttgcaccagatttctgagctacagaactgaagataattcatttatttcaagccactgagtttgtggtaaatttgttacagtagcaataaaaatctaatacatgccttctataccagaagaacacatcaacrtgaccattcctgtcctcacccaacacacacayacacacacacacacacacacacacacacacacacacacagaaacacacacacacgcacaatccctagtggtgaagccctgcctcactctatggcacattggattcagatactctttattcttagccattaactcactgtacctccatctaaccctgacttgcatgcccaaaacaccagtttcctcaccaaactctgagatggagggtatttactggattcatttcaaatgtcaaaagagaatgtgatctttcttggaaattgttgataagtctgtatgttgttcagtatgtgactgttttgatggattaatcaggcaaatcagttattaaaaatctgtcttttaatcataatcataatttgttttgaagaaaaccacttcatcaaaactcattttgatgtgtagacgtagtcttaatattcagtcctacataacattatgttatagtttatagaactaacattattaaggtggaataccttacagattaggtggcttagaaattgaactctaatcagatattttctaatattacaatactacctgctttttagctgagtgtccatggaaaagttattaatttacctaaacttcacttttcttatttgtaaaatccattaattgaattgatcattcatttactcattcaataaatatactctgattgtatactgtgtcaggtacaatgttagacacagaagctactgttcctgtagaggagacaaacaacaaaaaagtaaattataaaaagcaagttaatatgcagtaagaagtgaccagaataaaatgcacctttgggaaagtattttggatattcagggatgacttcttttaggttatttttcagctgagacatggacaaaactgatacctacctcataagatgctagggtgagaggaagtgctaatgaatgatacccataattcctgcccaagttcagaattaagagagagataggtttaggagtcccgtagatgaaaatcaaaatatcagctttattgcagattaaacttgcatggaagaacatggtttgggtgtgtggctaaataaaccagaattcctgtgaatycaacttaaccttcaaaactgcagaactatagaacaaaataaactttctgttgattctgttgatagtttcttttgctgtgcagaagctctttagtttaattaggttccacttgtctatttgtgtttttgttgcaattgcttttggagtcttcctcatgaaatctttgccagggtctatttccagagtggtattttctaggttttcttttagggattttataggttaggctttacatttaagtctttaatcaatctcgagttgatttttgtatatggtgaaaagaaggtgtccagtttaaatattctgcatatgactagccagttatctcagcatggtttattgaatagggagtcctttcttcattgtttgttatcgttgactttgttggagatcagatggttataactttattttggggttctctattctgttccatgggtctatgtgtccgtttttgtaccagtgccatgctgttttggttatagctttgtactatagttkgaagctgggtagtgtgctgcctctggctttgttcttcttgcttaggattgctttgactgttcatgctcttttttgatycaatataaattttaaaatagtgttttctaattctgtgaaaaatttcattggtagtttgataggaataacattgaatctgtaaattgctttgggcagtatggayattttagcaatgttgattcttcctacccatgagcatggaatgtttttccatttatttgtgtcatctctgatttctttaagcagtgttttgtaatkcttgttgtagaaatcttttacttccctggttagtagtatttctaggtattttattctttctgtggctattgtgaatgggattgcgtccctgatttggctctcagcttggatgttactggtgtatagaaatgctgtggggtgttgcagtcttacactattattgtrtggttatctaagtctttttgtaggtctctaagcacttgttttatgaatctggatgctccagtgttgggtgcatatatttagaaaagttaagtcttcttactgaattgaaacatttatcattatgtaatgcccttctttgtcctttttgatcattgttggcttaatttctgttttgtctgaattagaatagcagtctctgctcttttttgttttctgtttgcttgatagatcttactccatccctttactttgagcctatggttgtcatcacatgtgagatgagtctcttgaagacagcatacaggttgggccttgcttctttatccaacttgccacttcgtgctttttaagtggggcgtttagcctgtttacgtccaaggttaacatcgatatgtgmagatttgatcctgacatgttgttagctggttgttgtatagacttgattgtgtacawgctttatagtgtcaatggtctatgtacttaagtgtrcttttgtggtggctggtaacagttttttgttgctrtgtttagcactcccttaaggacctcttgtaaagcaggtatggtggtaacaaattcccttarcatttgcttgtctgaaaatgattttatttttccttgttttatgaagcttagtttggctggatatgaaattcttggttggaatgtttttcctgtaaggatgctgaatataggcccccagtctcttctggcttgtagagtttttgttgaaaggtctgctattagcctaagggagttctctctgtaggcagcctgcccttctctctagctgcctttaatattttttcttttacattgacctttgagaatctgatgcccatgtgtcttagggatggtcatcttgtatagtatctcacaggggttttctgatttcctgaatttgaatgtcaacctctctagtgaggttgggaaaaattttgtgagcaatattctcaaatatgttttccaagttgcttgctctctctccctctctttcagggatgccattgagttatgggtttggtttctaaataatctcatatttctcagagattttgttcattttraaattgttttttcattatttttgtctcactgagttgattcaaggaatcggactttgagctgtgagattctttcctcagcttggtctattctgctattaatacttgtgatcgtattatgatattcttgtagtgagtttttcagctytatcagaacagtttgtttctttcttaaaattgctattttgtctctcagctcttgaatcattttaatagatttcttagattccttgaattgggtttcaagtttctcttgaattgcaataattttccatgccatccagattctgaactctgtgtctgtcatttcaactatttcgtctggtaaaaaaacattgctgggtagctgttatggtcatttggaggtaaaagacactagatttgtgagttgccagagttcttgcattgtttctttcttatctgtgtaagctgatgtttctttaatctttgaagttgctgtcctttggatggggctttttgcttttatattctttyatgcacttgagggtttgactgtggtataagttgggttgagttgactggctttgtttttggattatttcagggggccaagtctcagctcagcactcctgggctgcatgctctaayactggggcctgggaccaggcccatgactttgttttatggccccttgaggttaagcacctgctgcactggaggggctgaggtgtttccagttcactggcaacaacattctgatggggagaaaggtgctggaaaaaggactttattgaggttgtagcagtggggtttgcatgtgcacatgtgcgataktggcggtagggtagtggtgaggtggtgggctctgtgtgcacattcaccagtgacaatgggatggtggtgtgaggaggtttgcacacatgcactggcagcagcagtggtgggatctgcctgtgcactggtggtggtggggcagtgtggtccacgcatgtatgttgggcagctgcaggacacatttgtgaacatgtgttggcaaggtggtaggggaagcrgcagatgggtgtgcactggcaggggcccatctgcagaagctctctgatggtcagacagggtctgttggtgaaggagctgtggtagtgtccactgggaagcaccccagttcagtatctgtgcttgcactgcaaatgggtgtgtccargcaaggactctggggagaggctggcaaacaggggggctcccagatcagattggctctgtctcatggggaaaatagccctgttctgtctagatttgagtcaacacaagccaaagcctgytagcatagcatggcaggccttgggagatggkcatccctggctgtgctccactatagctgttcccacactaaacccttcaggctctgtgcaggcttaagtcccacccctatcaactctgtaagaagctctccctgccagctcaaaagtcagtatgtgtcatggggtctcctgcagctaggattctggaggtctgtggtgagagtgggccactccccacctattttactcaccctggccccaggagctcctctggtccaggaatgagtcctggtgcttggcaatcccatacagcattcgcagcctcctttctcttcagctcagggtctgtttcctctgtccactctcaatgcccttctgaagatctgcttggagcgtgccggtctttttgatggtctggtctcttggtgagagaaggttttcctggctacatctagttgaccatcttgactctttccctcttgattgatttttcaattcctcawttttcttatctgtaaatggaaataatatcatcaygtatctcatcggtgttgagagaattaattaagttgacacacaaattatttagaaaagtatccagaattcaagaattcctagcttttgtcagtcattattattgctaatattaaatgcagaaacacaattctatatattttcatgtacttttcttatcagaatcaatgcacagagtagggttgtcaagatgcagaaagacaactttcttttagctcaatggaagtattctcactccccaggtttctcttcaccagaatcattatacataaggatttgtgtttccctggagcaggaactagggtatataaggagagagagctgaggagaagtgggctttgagagtttcactgatagaagaattgtcttgagggcatctttaagtcaacatcttgaggtagccttatagtggattttaggtctctataatcatgtttatctcagggctagacttattttcctgagtcactctggcttgaaaattattctttaggccttttcttattataacctgagcctggttcacaacagacttgacttctaggtaattgctatcatgtcccatgtccatccccttgctgactcattttagaaaatgctgtatttccattacgttatcagattttgtcatttaacatatttcaattagctagtcaaatgtaatatgtgagcaagtttgattatcatctggtaaaggactatgctatagtaggccttttggatatgaaagaaagtcttaattaacattattaaacagatgatagcgttaaagtctcatgagaatcacactattccacatatccagtctgagcaagttttaggcatgaatgactatagttaaggaaggcataacaatgatgatagctcattagaagcatatatatgaaacatgaccctttggttggtttctcctttcagctatactttcttgaagctttttaaaaagatcaaattttattttatattttataaaatatttaaaaacgtggacttttactaaataggccgacaaaaagctcagtcatgcagataatttttgataggcaaatttttgatatttatagttattcaaatatgtttataatgagtcatgaaaaaaatagtaaaatctctaagcaccagagtctccaggagaagaaacctgaggtcaacattaactaaactctgcataagtatggatgttcaagggattcttttaaaacaagttgtagataaatttaaaagaaaataaaaatgaacttattagaaaaacaataatgtactaattctggtccatttaaaactggactttctaagagttggttcaaaataagctgtatttggagcaagataagacaaagctgaacaactttggtatcaactacatttctggttaccttaaattgtttaaaaatcacctcaaaattgaatcatagtagtaatcatactttataattgttttctgcctgttactttctgaaagattttactttttatctgtatggctcagtacaattatctccagtctttcggatgagaaaattgaacctccaggatattaaaccacttggccactatttcacatttagtaaggggagggccaaattctgaggcccatacttattccactgaacactgacttagataattctacttaatacgcaaggctcagtataaaacctgacatttcaggaattaaaagctgttctcttgttttgattttttccacagtcctgccatctgtttgtctagttttgcgtactcaaagctgaataccaaatggagttatcatgtggcgtatggtttggatgtcagaaactccccaattttgtttctcttctctaggacatgtgctaccattaccttttaaattaatttatttaaacaatgattctagctaatagctacaagagaatttgatgttttctaaactcttttacctccttagagcttggacctttgcgaaatcactgtaacttatttggcctttggtacaccaaacaaccaagaaaaccctgcacagtaatgtctgggtgcccatttcagaagatttttttttaaccaatgaaaataaattcaagaattctaacaccacatattctcactcataggtgggaattgaacaatgagatcacatggacacaggaaggggaatatcacactctggggactgttgtgggctgggggtaggggggagggatagcatcgggagatatacctaatgctagatgacgagttagtgggtgcagtgcaccagcatggcacatgtatacgtatgtaactaacctgcacaatgtgcacatgtaccctaaaacttaaagtataattaaaaaaaaaataaaaaataaaataaaataaaataaaataaaaataatcaacaagctttaaaaaataaaaataaaaaaaaaataaaaaaaaaaagaaatttacaaatggctttgataccccggaaaatatctcacttctgaatcttggtgtttatactctgtgttaaaaatgctatgctagttttcttttttacttgttgatgtttatttgtggctccttaggtattctgttattcagtgtttacagcaaataaacaaagtcagtaatgtcattcctaaatatccacgtagagaacttttgcttagaaaacataaatgaattactccacatgccartttttccgacctaactcacctttcatttgtaaaccacttttaccttttttttttgtttttcacatgaatatcttttatttctttttcttatctggttagtctggctaagacttccagtactatgttgaacagaagtggtgaaagtgggcacctttgttttgttggtggtctttgatggaatgttttaggcttttcaccgttgattataatgttagctatcgatttgttgtatatggcctttactatattaaggtatatgccttatgttagtaatttattgagaattttaaatcataaaagaatgttgaattttgttgaatgatttttttgaatctattgagataatcataaaatttttatccttaaaaaaaaaaaaagaattctaaccattaaatctaggtactttatttttgcttaagctactactctattcttgttataacaaaacttaagcacataagaatgctcttccctgaagtcaaatgagtagtctttcttctgtttatttcagaaaaataatcttaatatagtttattctgccttacttcccaaacagaacttaaactacacagtatttttttcaagcattcttagattgcacttagagatggctagtatatggattaatgggttcctttctaacttttagaacttgaaaaatttccagtacttcccactggttgcagtatgaacaagcatctttatgtgtggctgttcaatacttcatttcctagcaaatctctgcttcaatatcttgagttttccaaagatatgatttatttattttccagaaattctatcatattgttgtttgctgttgcagtaatggcccaatttattcatgatttcctgtatccattctcttgamtaatctctctcatacttactcttggccatrcascttgttttagccagtgggcccttaccaaatgtgacacaatcaaaggcttagaaagggcttatgcactggagtttaagctctctggaaccctcaaactggcgtgtgaagaagcctggtgagacctattggaggatgggcatgtagggtagatataaaccactccagctgaggcccctctaaaccaaacagttaactaccggacatgtgagtgaggactacccaactttctcaaaattgtgagaaaacaataaatgtttattattgttgtccactaagttgtcggtgttttgttgcacaacaaaagctagttgatatgcacccacaatgatctcttagcttctgaatttttcacataagtctctggtttctaaagttttttttttctacctattactgtggttactactttctcatcatctactgtcatttatttctttgaactaatagccaattagtaaatattttagagcttacgaaaataaacattgaggtctctctttttagaaagatagtctaataaaattcatctacatattattttcaccagcaacactatcaatggcatgtgtccacataaaatatttcttccagtgcatgctccttcagcagctgtgtactgaacttgtattgctcttagatttctgtgaacaaatgtaatttcccaccaaatagaagagaagtatagagtaaagcagggaaactgcatagttgcataaaagaagatggttcatatcctgttaccctggcaacaggcactagaaaggccagggctccccacacatcctgttgccctgacaacaggtcatacagggcatgggaaggcccagttcccagttttctaggcctcctctttgcaaccacaaagacaaagaagaaagtgatgttgcatcttgttcctccccacctacatatttcttctgttatctgaaccattccagtataagattatctttccagatttaagaggggggcaggaaatagtgacttcaatttttacattcataagctctgaaacatttgctaatatttgattagttcaaaggagtaaatgataagaaaaaatgagagagaatcaaaatagtaatgagaataaattgtggaaaccagagaagcattaatattataagaacagtttagcagctgagagctgatttggggtatgtgtccattagccacactagttagcctttaaaatttttaaggagtcatcacaagaagtcacatctataaaatggctgtttatttggtcttattttaaaataagatataagttgtaaagacaaacggtatttcctacttataatcaaaccaattgcatagggaacaaagagaaacaggagaaaaaaagaattcgatcagattgctttcttacgaactctacatggaaagaaaagatgaatgacgaaggaaagaaaaggctaagaatgaaaaaggaaaaattttatatagaattgggaattcagttgataaaaacttgtatagcataacatcattttctgatatttagttatgcattgcacttagagatggctagcatatagattaacgggttcctttctaacttttagaatttgaaaaatttccagtacttcccactggttgcagtatgaacaagcatctttatgtgtggccttttgatacttcatttcctagcaaatctctgcttcaatatcttgagttttccaaagatattatttatttattttccagaaattctatcatgttgttgtttactgttgcagtaatggcccaatttattcatgacttcctgtatccattctcttgactaatctctctcatacttactcttggccatgcagcttgttttagccagtgggcccttaccaaatgtgacacaatcaaaggcttagaaagggcttatgcactggagtttaagctctctggaaccctcaaactggcgtgtgaagaagcctggtgagacctattggaggatgggcatgtggggtggatataaaccactccagctgaggcccctctaaaccaaacagttaactaccggacatgtgagtgaggactacccaactttctcaaaattgtgagggataaagtaataaaatcaaagtgcccaggccctgtgtctggcccagaataagcatctacgaatgatagctgttcctgtaaattacttttttggtatatctatgtgggaaacaatgtgtttgtttttccccattcctctgccaaatgttaagattgaggtaaaagtcgactctagataactacatagtgggtaggaggcagaagagatttaaacactgactgaattaatgaatttcttatagtccaaggttctaatttcctaagttctccaccacacatataccaggaaaactgaaatttctgtttcatgatgtagctgaataattaggattatgctgacagtatctttcagtgattagtgaacattctggcctcatgtggccttgcagcctggagaattcttagtgagtggagacggctgtgtgtcctgtgagagaaaattgcctgctgaagtttcccaattgcagtgagtcagacagggagataagctgactgaatttggaggcaatcaggctaaatactttagaattggcttccaggctacaacrtgttgtttgctactgagttgaagactcttcgcatgggtccttaaaaagaaayttacaaagcaaggtaatcttgaagttttccaatgtaattgaacaattttaacatttctcaagtttcatttttaccagacattcaagtccaaggtgtgtgatgaagcttggacaatagtcaccattttgaagctgtcacttaatttttgttctcagactttatttattctatcatgtgaaccaaatttcagttagggataaatactcatacagtgtttatcagaagatgcctctctgtaaaagttaactcatctatccaaaaggagatcatatatgcttaatcatatgtgcttaataactgagagtgttccaaaatgaaattcacaaccgaaataatacccagtttaagagattaaaatattcccagcattagtccccaaatgactttattatatatactttccaattattttacatgaggcaataatttttaaaattccttactgtaaattttatctttactaaataaaaaatgataaaatactaaaaatgatttcttgtttatctccattcttatgtttttaaaattcctaattctatgctaaatttgcataatacacactttctgtaattagataatttggttgtatctaccagtattacctgggaaacaagaaatcacatggaatcactttagcgcaccttggaattagaaacatattgctaagtaatcttaaattccttagaaagagaaattcagctcacagtaaaagcaaagaatgaaaagaaaaggctgtccttgatgaattcagattgttttgttaagtgtatgtcttgtgggtatagcagtaaacactaatgtrtacagcrtgagtcacactatggtaatcttagccactggttagaactatcttaagaatgagtgtcattcagraaaaaagttatagccaaattcatccagactatactgatacttttaaaaacattgagwtactttggaaagtagggttaatattcttttattaactcaactctgttgacttattaatacaacttaattatttgttcattctacaaatattcattcactggcgcatggagagttccagcattactctaggaaccagggatataacaataaacagtccagatacgatccctaccttcctgaagtgtatattttgatggtggggttrcayaatcaggcaaaagaatataatgtaattttaataaaacggtacagcaacaaactcytgggagtttcaaaagtctgtattttagaccagagtggtcaggaaagagcttctcgtgatggtgacttgtgaagaaagaccttaatgaagtgaatagtgagtgacaccaaggcctgaagcattggccttggtgtgcggagggaagcaagggcacacaccccaagcagggtgcacttggcctgtttgaagaaaaccagtaagagcagaagggctgtagtacaggtaggagaaagagtggaataattgaatgtggagagatgggcagaagtcagatgacccaagatccagcaagccttgataagaagtcaagattttatttcctgcatgatgggaagccctttcaccttaggagcatcagggtgggtggcagatctgatttatgttttaagaagacttctctgaccattttgtggaaaataaagctaagaagtggagaggcaaggaaggacaaaattaaaaataggaggatgtgtcacaaggctctgaccctttgtccacgtgaaggttctgtagctttggtgacattggtgcctttggaggtggtaagaagtatgaagatttgggacatatttgagattagagctgacagaatgcactgatgaaatggatatggggttaaaggatggaagagaatgaggcacaatgctgtgtgtgtgtgtatgtgtgtgtgtgtgtgtgtgtgtgtgtgtgtgtaagaaagaatggggagggggagagagagagagagaaagagagaacctgaacaactgggtctacagttccttacctgaaacctttgggcccagatgtgaaccaaattcacaactttccaaattttagaaaggtaataatgtgcctatttcaaaaatcatcacatattcccagtggggtttggggtagctccataggcacaaatctgcaacaaaacatataagtattcacttaatacatgctctcctctcagttcaggtcaggttttgctgtcagatgagctcaggtctggccaagttttgctgccaaatgaaaaaagtctgatttttagggtttttgaattttcagtgtggaaaagggattgttgacttgtactatttcctgaaatggggaggatggctgtggaaataaaaacctcttttaaatccatgcttttgggatgcccattagatgctcaagtggccttaacaaatacatacatagctggacagatagggggtcagggctgaacacatacattttggagttgttgatatatgggtgtatttaaaatcacaggactcaatgagaacgttcagggagtgaaagttggtataagtgagaagaggatcgagggctctctggcattctaacatttacaggtctgtagagagtaagaaaaacaatggagacacagatacagatacacagacacacagacacacacacaaacacacacacacacacacacgaaagagagtaggtgagcagtaaggggacttatgtctttacctctttcagcagtcacctaagtctaggagcagggcggcttatctatgatagcaagagggaagacagaatgtttgggaacatttgcagatagataggtgaaaactctggttacttttatttactcagcgaaattaaagaagaggctatttgaagaggcatttgaggaaggaggagaagatggagtcacctgagaggagtgtggctgaggacaggaggtggacagggcaggcagtctgagggcctgccagcggtgtcgtatttaaagtcagatctgtgtccctgtgtgccttttttcctgttacgttcagttcagctgtttccatgcaggctcagaggttcagggcagattcagaactaggtttacagagttcatattttgccagaaaacataagtgtgatggatgaagagagggaaaactggagcttgagggcctctttaaaggacagggtgttaaacctagattgaccatgagatctaagttgggtagggagagaaatgaggacatgggaggaagtatggacagggagaaagtgggtgaggtcaatgaattggtggtagagaagacggtaatgaattgctagaatagggcactagaatcagtgaccttttcttcttaaaggcacaaaatgatataataaacacatattgaattagacaagcttacacaagaaatataatttgtgaaatgaatatatggtaggagattttattttcctctgtagaagacttctgtgagcacctttacatttcattaggaggctttctcttcaaaacagaagaggctgtttgaaagcatggctattcctgaaaagaaaacaaagcaggcagatctaatttttaggatgcttttccttgaccacagcttttaaagtattgcctatacaacaatagaagttacacttaaacagtgtcatcaaaactcataacagggtttttccttcaccttgctttagtgactgagctttattctttgtggtgttgatggtggtggatggcaaatttaaagtatggatcagtagcaacaggccaagcatgcaatgaaggactgctgtgaaatatgttattaaccagaaggatgtgatgattatgtcactatataagggtcgttgtgcctctattcacagtagtagtagtttcagttgacttaaataattcaggccttcaaattccatctgaaaagccaaattgttttgtaaatttgcacatgctcagcaagcaattaattgttcctttttctgatgattttgttaccaagactgaagttcgttttggttgaaattttataacaaaatagctacacacatacacacataaaacaatgatacaaaattatgtacattggtgtagatgcaactgctattcactaactacaatacagtgttgatcaggtgtgaggagaagtgaaagtcattgtttattttgatttttgtcacaattagtgtcattatatatagaatttgctgggtcacaatgttaaacagttgtaagactgccatgttgaggtcactggatagattttacatctacttttggccttttggaaatggaatcttctgttttcatgcaataagctaatttggggataattatatgtgagttatgtcaatatttaaaaaaatcttttgaagttttggttgaatttcttatttggcattggagggtggctcttatttgaagtttagtgtcaggctgcttatcccaaagtaattcttgcaattcttggacccttagtgagatgttcccatcagtaatactttgcattttttggctgatagattaaacttctttctcagctcctggagatcctttttctgcttttccttatttttaaataataatttaatgttgttgttttttgatttatctattttaaatattctttactgatttcatataacatggatgaaagttgagcatttttagaccaagctcctgccaccccctcctgactgaccctcctcccaatgtagttctatgaccacttcagtgaatcagtatttgaggtttgtagtcttatgactgaattggcttcacttctgagccaagtagtaaagtatgaatatgttcctatggagtataacttcttgtttttcctggaattaataaatatctcattttaattgttactttgttggacttgattactgcaaacctatcactaattctttctgagttcaccgaaagaagtgcaaaacccttcaatatattaccatcatgtgcttcttctgtcccactcttttccttagagacattttgtttttgttgtttttaattggtrttgtattgtttttcaaatctttgtcccccagctccaactgggactcgctaaagctggagacacagccatcccctgggactgccctttgctttcattctgggaaatccctccagcactctcatgaattgcgtttgctgtttcctggatctcatcctttcttgtttaccctgtttaggggatgagcttctccaatagttcctgagatagggcacttgagaaatacatgtgtaaaaatgaattcatatgtgaagatatatttattttgatacaggttagttggttcaaacataagtaaaagatactttctctcagaattttgcagataccagttcattgccttttaactctcggtattgctatcaaggagcctgatgcctttcagtcttctttttgtgtgatgttcttcccaaccctcataagccaggaatttttcttatttctgctgttcgggaatttcgtgataataaccttagtccgggtgcagtggcccatgcctgtaatcccagccctttgggaggccaaggctggtggctcatttgaggtcaggagtttgagactagcctggtcaacatggtaaaatcctgtccctactaaaaatacaaaaattatggctaacatggtgaaaccctgtctctactgaaaatacaaaaaattagcggagtacagttgcgggcgcctgtagtcccagctacttgggaggctgaggcaggagaatggcgtgaacccgggaggcggagcttgcagtgagccgagatcgcgccactgcactccagcctgggtgacagagcaagactccgtctcaaaaaaaaaaaaaaaaaaaaacaagaaaaagagaaagaaaatagcctggcatggtagtgcatgcctgcaatcccagctacttggaaggctgaggcaggagaattgcttgaacacaggaggcggaggttgcagtgagctgagattgcaccgttgcactccagcctgggtgacagagcaagactcaatctcaaaaaaacaaaaaacaaaaaccaaaaaaaccttagtagggtcatttttttatttttttattttgagatggagtctcgctctgtcgcccaggctggagtgcagtggcgcatttccgctcactgcgaactccgccttccgggttcacgccattctcctgcctcagcctcccaagtagctgggactacaggcgcccgccaccgcgtccggctaattttttgtatttttagtaaagacggggtttcaccgtgttagccaggatggtctcgatctcctaacctcatgatctgcctgcctcgacctcccaaagtgctggaattacaggtgtcagctaccgcgcccggccttagggtaattttgatactgggaaattgactggtcctttcagtctggaaatacrtgcctttcagtctggaaatacatgcctttcagtatggagaatatttcatttttttaatttgataactttttttcttatttttttttctttctgggatttttagtttgcacctcttggattaagcctgaaattttcttatatttttttctcctcttgccaatttttgcctttttaaaaaaatacaaaactttaacatctatctctcagcctttctaatacttttctgagacctgataacattcttactttgattcttatttgtagcattccattcttttgctatgtatataataatttttatagctctgaaattgttttagttgattaacaattcttcttctatatgaatagactttttctctggagtgccactttctttgtgttcacttcagtgtatctttcatgttaaaggctttcctcagaggtttggtgattcttggctgccttctcgcattgcaaagtgagacactgcagagctcattgacattcagtgtgaatggacagtgggcttcataacagtgtggtgggtgctcagtcttttttttttttttttttttttttttgagacgcaatctcgctctgtcgcacaggctggggtgcagtggcgcgatctcggctcattgcaagctctgcctcctgggttcacgccattctcctgtctcagcctcccgagtagctgggactacaggtgccygccaccacgcccggctgattttttttgtattttttcagtagagacggggtttcaaggtgttagccaggatggactcaatttcctgacctcgtgatccgccgacctcggcctcycaaagtgctgggattacaggcgtgagccaccgcgcccggccgggtgctctgtcttttaattgggtggttaccaaatgccggtacctgtgtccacaggtctttctttggagctatgtattttctataagggcaaataatctaatatcctgtctagtatgtctaagcctttttgtgtctgttctagaacggaatgaggaaaaacgttggggccataacattcattatgtagtttttacttattaagaatagaagtttaacctctctcacctctgtggtttaatttcacaagaaaacaaacaccttgtttcccaaagcgacatgggaacaatagttaccaggtactgaggaggaaattaaggacttaccttgtctttacatagccaaaaccccactttcagcaccactctgcttccctgactgctgtgatacctggtgccttcaattcctgcatcttttcagggatctttagggtgaaacccttgtttctgctgtcatcctttgctaaggtttcyacccctccacctagtttccacactcccgaaaacgaattgattctcttggattttgttacttctttcctattcacactgtccttttgagggatttataacatgttttgtttttactgtcatgttagtggagttttaggagataacaatgataaatacatgtattcaattggccatggttaaaagagatgcactaaagtttttcaataatttaaaataaattaaaattttttttcactttaattgtctggaaaactctgtgaagtaagaccatataccaactccatttatcatataaggaagccaaaataagtaaccttaaagtaattgtatcatatagggttcagtgcaggaaagaaaacccactggtatttgaaacagaaagggattcaatacaggaattagttgcttacaaaatcacaggaatgtctataggagccggaagtcagggccactactggattagcaagttaaaagcttagctgtgattcagtcaggaagctactgcctctgggctgccatcactactgctgctatcagtccgctgcctctagatacctatggagccagtggctagacatgcaaaggcaaagtccagccaatacaattgtctcatgaccttgtttgtcagccaaaatagcagcagaaagatggctcttcctcactttgccttccaaatgctttcaggcccctttcaattggcagtacctaattcacgttagaagcctagctaaaatggcccagggatatagattttagctttcaaatctctccaaatagaatgagtcaacctaaattatctatcataataacggtttgtgacagagctataaccagatcccagtttttgtcactttcagtatttttatttctactgcttcttttcgttaagaaaataataataaaaaagatacataaccacattacaatttgttttccaaatggaatgattatctaaaatacaataacaatgtgatcaacatgttttccttttaaggctttttttcctagcagtctttggtagtatttaaatgctggacaatattttgtagcctagtacaatattttgtagcctagtttaatattatctcttaagtaatatctctgcagtgagtgtatgaacctgtattacatgtttaatattaaactaggttacttaagagataaaaaaataaaagacagtctttcctctaatagggtagataaaacaaattcctattaattgggggtacattataaaatttggaagatatgtgtttttctttatggttgagaggacttatatctgttgtatgtcagcaactttgtatttgttatcccactaaatctccatacaagccttgtaaagtaatattgcctttgccattttgaagaacagtgcattgacactccagattagataacttcatgaaattatactgacattggactatagagtgggatttaaatatttttgctctttcttttatatcagtctgtctctcgaggagatttcagatgaatcttaatgaagggtaggatttggatggagagagggataggacaggcgtctcaaactcaaattctatcaggggccatacttgaaggagcgggggtggctgctgactgtagcagctcagagactacttgttgcctcttggggcaggaggctaaggggcctttactttctyttttagaggaaagttaaaggtccatattttaaaatatataatcctttgatttaaaaatgttagcaaacaaatcacagcgttaaaaatcactgattgggtcaacactatgaagactaaataaaacccatgtgttacagcatgttaaaatgggattggttccattttagccctggctgaagcactgaaggccaagaaaatttcaaaaggtgccaaccaaagccagattctacatgctggaccacccatagaggatagctaagtgagtgcaaaatgggttctctagcattagagacaggcctcctctggtctgtatcgaatgagatactgaaagggaggatttcaggatttatttgaagtgagctctgtcagtatgcaggtacccttaccaccccaaggaaaaggctaaagccaagasactgtgactggagctgcctttgtcagcaaggagaaagaagatccaatgggcttgtactaatgtcaggggcacgtgtccctctgccggccacgtgcaccttagaaagaagtcagcctggaccaattcaagagatcctgcctaagatgactgcctggaagtgccgagcacccccgacagagtggaccactgaagctagggatgagaaagggagtccttaatggtcaggtagaggatagccttagaaactgcagtgagaagaccacagaggaaagagctaaaaaaatccaagaattctgttgggagaagggaatctcacaagagacaaattcagcatctagaaggaaccaacacaaggaaccaattgcatctgctatataaaagtgtgctgtttctcctaattcctttcccctggagcctagtaagttggagagttggagaggaagaagattccaagtggaagcaggcctgggcttgggagggagggtaaggcttttcagattcttcgctttgaaaaaaaaaatggaattctgattattacattggtcgttgggcattttgacttctgagatgagaaccatcttgtgactaaaaggagccagaatgtctgtgggaggtggatttcatccaggggtggagacaaagaaatccagagagtgtgaagggacaatgggaagaaaaccataaaagacacaatgctgacatcagtatgtttcttaarcagttactcatgtctgcaagccaaaactgtgggctcgccatttgtattatctgggctaagggatggtggttgggcagaggggctgagcattgggtgtggagagtatgatcaattatattaagtaacagaaggtataaatctttctgtgtagtccatagtctgtttctttttcttttctttttttttttgtagaatccaaatgatcttgtaagcttactacacatttagatgagagaacaaaattgacagttctaaggcttttggatatgtagatgataaaaggttacctttgctcaagagacatcccrgtaaagaccattcaaccttcttcaaattataataaatgactcagttgaagactcagttaatgattttgaatgctcctttaaagcctacctcgattgttttgaatgtacatttctgaaggacttaacaaagccaccaaattaaggaacattatcattctctgtttatataattgttcacatgccatgatctggaatttcttcaaacagtggtaaagcatgcattgcaaaatacagtccatgcctgggctcagtggttcacacatgtaatcccagcactttgggaggttgaggcaggaggatcacttgaggccaggagttcaagaccagcctaacatgtggtgtttggtttcctgtccttgcaacagtttgctgagaatgatggtttccagctccatccatgttcctacaaaggacatgaactcatccttttttatggctgcatagtattcggtcgtgtatatgtgccacattttcttaatccartctataattgacagacatttgggatggttccaaatctttgctattgtgaataatgccgcaataaacatacttgtgcatgtgtctttatagcagcatgatttataatcctttgggtatatacccagtaatgggattgctgggtcaaatggtatttctagttctaacactgcatgttctcactcataggtgggaattgaacaatgagaacacttggatacaggaaggggaacatcacacaccggggcctgtcacggggtgaggaggcggggagggatagcattaggagctatgcctaatgtaaatgacgagttaatgggtgcagcacaccaacacggcacatggatacatatgtaacaagcctgcacgttgtgcacatgtaccctagaacttaaagtatatatatataaaaaaagaccagcctaaccagtatagtaagacactgtctctccaaaaaaaaaaaaaaagttagtcgagaaagtcctcttgccgattaaaatttatgcagttaaggggtgatttaaaaactaggtatagcaaggcatgctttgactaattgttaaagtttttgttttgtaagtttctggtagtgttttgttgtttggggtcttacagctgttgtaatgaytaggatgatgtaagcacagagtagatgttttatgcaataaaagaagtgtggttgaaaagcctgctggtccctgccctttttttttttgccaccataattgtacatgtgggcattacactgacactgattctaagcctggaaactgtgtagttccccacacgttttagtatgtgcatagcaaaggaagtgccaatgactttttagtatgtggatatctcttgtcacagaatctytctgagaatcagactttataaaaacatgtttcactgcatcaaaaaaatttagttagccttgttttaaaaatataacaataaacaaaagtttatkgttcacaaaagctcatgacagaaaagttgattcttctctaaagctcatgacagaaaagttgattcttctctaagtgaaactaattcacaaggtgaatattttactcttcatccagagttgttttaaggtcagataggcaaaagtgataatttataatatgattctataaccgtaaataattttcatcaataggttggagctaagctcagaatttcagraagtttgatagaatcttgctattactaaaaattttatgtgatgtttagatttgaaagccaaaagtataaagagatccatttatcatccatcagttcactcattcacaaactcactcacctgttcaaaataaaatgtactgagcttctatcatatttagagcttgatgcttgcttttttagatggataaaaatatagttgtaaaccttaagaagtcgagcacttaaaagctagtatgagagttagactttgacacaaataatcacataaataattagatattggtataaataattatagtgtagtccaatktagtatgaaataggtagaggagaggaagcctgaagttttgtrgtcaagactggaaattatcccactggacaaaaaaattcacaaatctaaagggatttggtcatggggcaactgtattgatattggcaaggcaaagcaagatgataggaaatgatcagactagcctctaaaagcaatgatcaagcagtggrgcatcaggtcatggcaataataataaaggtcatgagtgcatggagtttaatgggcygaacatatgccaactcttaagcaaggaatcttaatgttactgttagacatctgaatgcacaatgtagaatgagataaaaagcctgagtggtcctctgcaagtgcatagagaaataagaaacaactggtaggaaaagtggcatttacctggtatcttgaaggattttattaagtagcaataaggagaatgatagtcaaggaaaaagtatgagaatatgcaaggtagtaggaaaatgtaaagtgtttgggaaaaataacattctatctcataaaaccacagcagacaagatcaggtgtattgagagtggtatggctgtagatcgtttagggctattataaacactaggaaacagctttcccatatttcgtctttcttcttaggacaaatgtccagaagtaagtatgctgggtcaaatctaaatttcaagtgaccaacttttccatcactgcctcctattttccagcgtagtccttgtagcacctcaactacagtagtttttcttccctactgggacctccaattctttgtaccttcacactgcctctctcattcctttctgctcctcccatgtgcycatgtccccccaagaagcttaaatgccacagtccattattatatccctcacttgcatactcactaaactcccttgtccctctcatgtatagacttcccgaaaaatcttattcctggttaaattccactctgatcatttcatgcttgcattcatgtagctgattgcggttggagaaaaacacactattatactgactgctgttaccctaaacgtatgaccacaaactgcaagtgcaccctatttgttgtccaccaatytctgcacttcctattaggttggtgccaacatagttgctgttttaaaagtaattaaaatcattaaaagtaatggcgaaaactgcaattacgttcccatcaacctaaatataaccatgaatgattattttaagccttttcctgcctcctcaaacctcagayrcttccttcccccctgcttcctactttgttgagcaagtgaattactaaaaagagcccttccctacyatgtctacagccccacatatctcttcctacacyttgcattattttctgctatagtcaatgaactgtcagtgygcctgtctaagaccatcccctacttgtatactaaagtatattgtcattcaaggacatcactcttaaaattgtgcctgctttagcttgcattattttccctctctagtgtataattctgatcagcctataagtgtaccataatawtttcaggttaaaaaaataaaaatcttggctgggcgtggtggctcacgcctgtaatcccagcactttgggaggcccaggtgggtggatcatgagttcaggagatcgagaccatcctggctaacacagtgaaactccgtcttcactaaaaatacaaaaacaaaattagctgggcgtggtggtgggcrcttgcartctcagctattcgggaggctgaggcaggagaatggcgtgaacccaggaggcagtttgcagtgagccgaggtccagccattgcactccagcctgggcgaaagagcgagactccgtctcaaaaagtaaataaataaataaataaaaattaaaatcttttaacctatgtcatcctcctgtaagtcaaagttctcctttacagtaaaactccttaaaggttgactactcatggttttcacttgctctgcttccatctgatgttgaatccactctaataatttttttatatctccctttcyacactgaaaytgctgttgttaaaagtcattgatggcctccatattgccaartcaaatgttcgcttctccatctttatctctcttggcccattagcaacatttagcttaaagtttctttttggaacactttctttactgcttccagaataacactttattggttctccatctatttcattggctactccttctcagttttctttgatgatttctccttatttttacacattggaattttggaatgtcccagtgctsaattctcagattaattgtctttatctgtgctactgccccgtgtgataacatccagcatcatggtgctatattccatcaatctrtcatgctctaccgattagtgccacatttatatctgcagcctggacctctccagacttaactacagtttatccaacacctcttgttgctcagactgaacatttccaaaaccaaattcaattttccccttttgtccttctggaaaactgtctcttcctgtagatttcctcctctaggtcaatgacaactccattctgtcattttcttgtaccagaagcttctaaaagcttgagagactttcactcacagccacatccaattcatcaggaaatcttgtggaatctaccttcaaaatatatctagaatccaatcacttcttaccacatccagtgcaacctccctggtccgagctgctgtcatctctcacatctggaatactcccacctgccatggcctgctacggtctccctaatccactcttccacctctgctctttttcacgcagtgtcagtgatccttttacagaggaagctagatcatgtcacttctctgtttgagagctttcattggccctttatctcagagtaaaatcaaacatccttattctttgtaattcggcccttctcttccatctttttaacttcatgtccttttcttttctcacacactggctccatccacactggctttcttgcttctccttctaaacttgaggcatgctcaggccctagggcttgtgaatctgccctttgctcttcctggtacactcttgtctgagatacattcatagtgcaccctctcacctcctttagggctcaactcaaatgtcgtctctcagaaaagctctctttgaccactttttataaaatagctcccccaatatcagtctgtacatttttattctatcttagttttatttataaacttttcaccttctgacatactatttatttgcttaattgcccatgcccattagaaagcaaacttcataaaagcaggcacttttactttgcttttgaacatgctctctttccagggcctgaatcattcctgcaacacctggttgacatccactgtttttcgttgactggacaaatagcatctatacattcaaattgttgagtcatattatcagactgtgttttacataatttctgtaagggcaagtttcatcacacacttataggcattggatattagttttaatttttgataatttggtgggcaaattacaatagaatatttttgattccttatatattcttccttcatcttcacatttcatgtatttacaattttcaaaaactgttaattttgcagaagscttcagtagataracaggtatttatcattgttttagtaatagtatagtgttaacatgtgaatcaacactacagtacaatatctaaatggaaataaggcataacaaaacactttgaaatatctaatttgccaaataaagtggatatctgaacttttattatatgatttgctttttcatatattgcctcctagatatcattatctagcttatttgtaatcacttatttgcttttatcttgagtcagtgtattcagaaggtcgcagttgtgaagaatccactgtagcccttggtaaattaaattttgacatagggaaaaagagaaacattttcaagtgctatagtcattttaattgaaccaaactggttaatcacattttaatattgacagattacaaattgtgaattgtaccctagttataactttctgatttattaaaacatatcagtgtgatggaactggttttgagaacttttcagaaaaaaatgttagtaaaaactgtgaaactacacacattatgtaaatccaaaattatgagtgttctattcaacttatacttttttgttcaatattgtaaaccactctgataagatttacttattataaaagaaaactataaacagtggtatattcagatcttgacacatgcattgaataattatttgatattttttctgacattaatgaaccccttttgaacatattatgcatgagtctttctgctacaggatatctttcattacaaactttcttaggaagtcagctccaagtaaaagtttttggtttaataatgacagttttaaacagatttgttaaggcataatttacatatcataaaatttatccttttaaatatatgattcagtgattttcaaaaaatttttagagttatgcaatccttaaaagttcccttgtgtcaatgtgcagtcatggcccactcctacccatccccacaccccaaccacaggtaaatgatctatcaggcaatatgcagttctcagtgtttttgtagtggatatcagaacttcattcctttgaaattcctttttatatctgaatagttttcaattttatagatgtcatattttgattattaaataaccagtggattgacaggttttgtttattacaaataatgctgctgtgaacatcagttgacaagattgtataaatatatgtttttaactcctttgagtagattcctaagaatggaattgttagatccaaaagtaagtgttggtttaatccattcgtaagctgctaatcttccagagcggccatacaactttatagtctccccagcagtgtatgagagttccaccttcttcactttctcgctggcacctggtacggcagttttaaaaaatgagaatccttctagcaggtgtggaattgtatctcattgtagttttaaattacatttctctaatgaccgatgatggtgaacatcttttcatgtgcttatttgtcctttgtatagcctctttgatagaatatctattcaattcttttgccaatttttaagatgaattaaatccatattttgagttttaagagtcctttatsaattctggtcacaagtgctttgtccaatagatgatttacaaatattttttctcagtttattacttgtccttcattttcttaatggcatcttttgaagaataaaggtttttaattttaatgaagtcaaatttatcattttcccttatggattrtgcttttagtgtcttaatctttgcctaatctaaggtcacaaaaattctctcctgttttctactagaagtctttgtaatattagctcttacmtctaggtctataatcctatttgagttaatctttgtgtatggtttgaggtaagggccgaaagtcatatttttgcatatggatatctaattgacctggaaacatttgttgaaaagatcatccatttcccaatggtagctttgttaaaaatgaattgatcaaaaatctaaggatttatttctggtctttcaattctgttctgtttgtctatatgtcaatttatgctagtaccaactgtcttgattactgtagctttatagtaagtttgtaacttcaaagtgtaaatcctccaactttgttcttttaaaraattgttctggctattctagatcctttataattccctctcaagtttagaagcatatttccaacttctacaaaaaaagcctggtggggttttgatagaaatattattgtttctgtagatcaattcttgggaattttcttgttaaccaatattaagtcttcatcataaacatataatgtccatctacttttatattctttaatttctctcagtaatattttattattgtcagtgtacaaattttacacttcttttattaacccattgctaagaattttacactttttgatgatttttgaatagaatttcttattttcatttttgaatttttagttgctattatatagaaatacatttgaattttttttatattgatcatgaattgtgcaaacttgctatattcatttaatagtatctagtctgtcttccttttatagattctttaggtttttctacctaaagaatctgtagtctgtgaatagagttttacttcttcctttctaatttgtatgcctgtaattgctctgatttgtctaagtgtagtgggtagaccttccagtttgataataaatagtagtgaagcaggcagatgcccttgccttagttctgtcttaagtgggggttgttcaatgcttctcttagatgcccttgttgatgaagtttctttctatgctttgtttgttgaattttttaaaatcatgaatatgtattagattttgtcaaatagtttttctgcatctattaggacaatgatatgcttttctgtcctttattctattaatgtgatgtattgtattaattaatttttatattttaaacttgtctcgcattcctgggataaatctcayttggatgtgttgtatcattcttttatatgttgttagatttggtttgctaccgttttgttttctgcatctttcacaaaaagtggtatattttactgctttaatttatatttgatactatagctttttaaaaaaacttttattttaggtttgggggtacgtgtgaaagttacataggtaaacttgtgtcacgggggtttgttgtacagattatttcatcacccaggtattaagcccagtacgcaataggtatcttttctgctcctccctctcctcccacccattgccctcaggtagaccccagtgtctgttgtttccttctttgtgttcatgagttcttatcttttagctcccgcttgtaagtgagaacacgtgatatttggttttctgttcctgtgttagtttgccaaggctaatggtctccagctgcatccgtgttcctgcaaaagacatgatctcattctttttatggctgcatagtatgccatggtgtatatgtaccacattttctttatccaatctgtyactgataggcatttaggttaattccatatctttgctattatgaatagtgctacagtgaacatttgcttgccagtgtctttatagtagaatgatttatattcctctgggtttatacctagtaatggaattgctgggttgaatggtaagcctgcttttagttcttggagggatcgccacactgtctttcacattggttgaactaatttacattcccacaaacagtgtataaacgttctcttttctccacaacctcgccagcatctgttattttttgatgttttaatagtatccattctgactggtgtgagatggtgtctcattgcggtttttatttgcattctgtaataatcagtgattttgagctttttttttcacatgcttgttggctgcatgtatgtcttcttttgaaaagtatttgttcatgtcttttgcccactttttaatggggttgtttgtttttctcctgcaaattagtttaagttccttatagaagctggatgttagtcctttgtcagatgcatagtttgcaaatattttcttccattttctaggttgtctgtttactctgtcaatagttcctttggctgtgaagaagcttttcaatttaattagatcccacttgtcaatttttgttttgttgcgattgcttttggtatctttatcatgaagtcttcgcctgttcctgtatccaggatggtattgcctagattatcttccagagtttttatagttttgggttttacatttatgtctgtaatccatcttgagttgatttttatataatgtttgttactattttagtaatgattttttggtatatgtttatgaaaagtattgttctatagttttcttttcttgtggtatctttgggtttgaatttatgcaaagagttgggaagtgttcctccacctctagttgatgaaaaaggttgtgtaggattagtattatttcctttcaaaaacatttatagagttcactagggaagacacctgggcctgaattttcctctgtgggaagaatttaattgctaattcaattatttacttattgttctattcagatttttgtttatgagtcttttgtagtgatttagatcttttaatgaatttgtccatttcatctaagttgtccaattttttggcatagagttgttcaaaatattctcttatagttcttttaatttctgaagaattcatagtgatgyctactctttcattcttgagtgtaacaattgtgtcttttcttggttaacatagctacaggtaaaatagttttgttgatcttttcaataagctaacttttggtttcattgattttctctattgttttatgttatctatgtaattgatttctggatctttagtttttccttccttttgcttgcttaggcttttctttcctaggctcttaaagtagaagtttggattatttatttgaaaaatttttttagtatttacattgacagctatattttctttaaaacactgctttaggtatatctcatacattgatgagttgtgtttttattaagttcaaaatgtattctaatttccattataactccatttatctgtgaattatttagagtatgttgtttgttttttatgtatttgtggagtccctaaatttctttatgttgtcagtttctaattgattattgttgtggttgtggacaatacctgaatgatttcaataattttaaatttattgagatgtattctttggtttagcatatattrtgtgtgcatttgaaaataatgtgtatttcgctttgttgggtggagtgctctctgaatgtcaggtctagttgattgtgttgttcaagtcttctatacccctttattttttctgtctagtttttctatcaaatattgagaatacagtattaaaatatacaactataattgtttaattgcctattttgcctttaaattctgtcagttttagctttgggtattttctgtctctgtgtgtaagtatacagctatgattgctatattgtcctgatgtattggccctctgaccattatgaatgatcctctttgtctgtagttacatttattgtttcaaagtatttttgtatgatattaatacagccacatcagctccctgatggttatacagtatagctttttccatccttttattttcacctgtttatgtctgtatctaaagtgtatctcttatagacagcatttggttggatctggtctttgcgtgcagtctgataatctgccttttgattgtagtgtttaagtctagttacagctaattgacatggttggaatctgtcatgttgctgtttgctttctctaactcacatgctttctgaactccatactctgttccaaatcaagtcagctacctccagcaatgaagctgctggtttcaagaccagtgccactattgtaaaatatccatgttgacccagtagggcagtggatggggataatagcttcaggctggaattccgcagactcctactgttaactgacattccatagtttctggtgaatacatgcttctcaatttgctgtttgcccgtggttgatttctagatcctggaattattgtcctgacaatgtgatccagttgtatagctattttcattttttttttgtggagactgtttgtgatccttttactccttcatggtcagaagtctctaacattttgaatttggtaaaatattttgatgaaatgtgggctttctttttttgacaaatgaaaaatgataactgaaaaactccataatcatattttttcttatactttaactagactttaaaaattaagttaaaggtttttggaactataaatttttctcaatactgatagattgtttgtcttatagcagtttaaaaactaggtgataacctaaaagttatataaatcttataaagtctcaggttttttaaatctctactttttacttcctacatttattaatagagtgattttattttattattgcgcttaatcaattttgtcagactctaaatttaccatggaattaaaaatatacagactgttaataagaaaatagtgacaatgtgtaaatttcactttcttgtgaataggtagtgaagggaaggaaaagacagagactatatgttagaatcaggggatctcagaatgtaaaggtatcgtatatctccagttctgtagctgagataattacattggtcactcagctgccaagggattgagctgattcaaacccaagttcacctgattctaaagtcaatgctcttatccaactagtagatgcctcttatcagattagtatgggactttctcattctgatttactgtaacttaatagagcactggggccatgtgccatctgctctgcagggacaaaatctaaaagaaaagagacgagattggactataaggcaatgttggtgcttttctgtaccttcccccacatattcatttttcttgcattccaggacaccctcagtcactagctatttccacaatctgggatttttgtactgkgctttaaatcaggtccttcctccacaagaacagaaacttccaacctataaattccttcatgtttctctatgatgatcaaatcagtcattaccattttgagttaatggaaattctttcctttttctgtagttagaatgaaatattttcagcatttgggagattttttcacttcagacttcatagtcaaatgttagagctattcaaaaaaatggattagacttcatcagtatgctagtgagctctatatgaatggaggtattcaagcacaggttccatgacagrgaggttcacttgttgaagactatgataaatgctattgtattttaacaataatggatatgtaagtggtttcttgaggcctaaacataaaactgcttttttacaattgtccctagttatgttattacactcttccttttcacacaaagtagtgcccccctttaaaaaaaccagtcttgtttcaaaacttttcgattgcttttgtttattagtttgattctttttgtttctttaaaacttcatccagtttattttaaagtatgacccttatatccggtgtaaaactcttcacatccctctgcaaactcgaagtgcaagaatggaaggagcagtcttctctatttttgtcccaccttccttcccagcaccagatccttggaacctggagagaggacagaggaggtaaaggtttctgcaagtggctacaaagtacccgttttgactccagcagggagggaagagaggaaatatcccttccatgaatgcagcctccctaaagcatagcctccttcttcttcctatcaatcatctttttagtaggtgggagtgtgtttgtgtatgtacatgcacatgtgtggcagtacagtcatccctcattatcgtgggggattggtttcagaacctcagaagatgctcaagtccgttatataaagtgtcatagtatttgcatataacctacacccattctcctgtatactttaaatcatctctagttacttataatatccaatacaatgcctacacatcacttcatttgcatggattaagtgtagtactccacaggtggaaaattaaaattttattatttggaaccctgtggaaatttttcccaaatattttccatccrcagttggttgaatccacagaggtggaacccagagatacagtaggccgactgtatttctggttctgttaactgaccatttttcagaaagcctttcaaggaggtggctatctctaacaggctgggctctctgaactttaaatatgttctttatatatgatgcgattgcttccaactgtaggttttaatcaccatgtacagtttctggcacttaataccgttgtgttttaggagttaaataaaatgagtgttatttgaccatatatgagttagtagcatatttttgtaattgggagagaatatgatattggattctctttggtagaaaattgttgtttttgtcataaagaaactcttctttgctttagcagtcatacctgaaaacactgttgatcaagatggtaaagcttttttgtccatttgtttgtttttgtgattactgttcttcaccataatggtgctgaatgtttaatagaaaaagtcccttgtatttgagagaggaaagtaattggtactatgatattttaggaagttttgttctccatatgaaacagatatgatagaataattttcaacagcttatcattgacaacaggacagaattcatacttagtcctttcttcctatgtacataaagaatcaaatgacttctgcaggtaaagtcttttaccaggacctttgataataaaataagtaaaagcaagaaattgtaatgcaagatatgtatttatatagtacaataattactatttctattatgtatgatttatactttattatgtgctcaacaaatactagaggcagaatatgataaagactgaaatgctatatatatttatcttttaattttttttttacagtctttagtgttgtcacaatctgcacattaacgcatttttatcctttaggactagatcaaaatcagtcatgtgtcctaagtctggctgtcttccttcctgcctgtcttccttcctcccttccttcttgcctgcctgcctttcttccctatttttcctttttatgaagaagagggtaaaattatatctgtgagtttgaaatcaatgattctgttaattaggggttaaattagagctttcacatttcaacataacttgtaatgcccaaatttatccaagaattgttatgattgccaacgtggtaagctgtcaacataactatcttttgggtgaacttttgagtgggagtaaatgtaatgacaggcatattgcttttatgcatccttaagatgcctacaattgctgatttttatagaagtaaagttcacttttcctgatttgagtttgtctaagaaaatcctaacactttctatatagactgctctataaacatgatctaaaaggattatccatttgtaggattaatattcacatatatttgcatttgagatatgtaaggcttttatcctttttcctcacttctaactaaacaggattaataagggaatatcatcaatcatatctattgtgttttgaagcaagatggtatataaaaataatacaacaggacaggagtcatttttcagacattgtgccattataattttagttttgagaagagaatgttgttatagtcaagtcacccaaggccagattaaggggtctagtaacctttttaaagtcataagctagatttataaccccttcatttcttgcatgatgagagatgtgaagtgttcactctattagcctccaaatatgggatctggggcatgaaaagttatatagaaaaatgtcaacttttacacactaagaaaagagtttgtgctagccaagaaattgcacaaaattttggaggcagcaggacaaatgtattggcagtgatatccagacatgatcagtccaggtactatgtttgacttttgtgttgtgatttttccaattaaaacctggtctgaactaaaaggtatttgcagggataaatgacatgaggaaatacagtaggtatgaaggtgcccctgaaataagagtggtatatatgtggcttgcatatgtagtttccccattctcagcccaggtaagatactgttcatctattaaagcaccttgtcctactgaggctggacattgtcctcaatgcagtgctccaggaattcactgccaatccaagrgaatgatagagcactatttttttttttctgcatagcaggaataaccagctcagtatttgactcagaaatacctaatggatgttttatcataaatgtattgaacaagatggttgaaaatttataaaattccattggtgttttggggattatagcaagtatcgagacacaaagaaatacatctttagagttacctgtttattttcaaaattctacttaaaagaaacactcatcaaagaaacaaaaaaagtttagcaatggatcgttttcacgttggtgtatactggtttgagctgcttctttttgagatgagtttcatctctgcctgcagttactctttcagctctactccatgttgacatgcagctgtcctttgtcayggcaagaatgtgagtcaggctccatggctcctgcaataaaatcccaccttttcttcctacacacctggaatctagagaatgaagatcccccagtcctccacaaaagagacgtgcatcacttgaatgatgtttttgtgattgggttgtgagctatatcatacagcttctgtcaaaagcatgaaagggctctgggctttcaaactttgagtgagttcgtgtgtcgtttaccgtaactatgcaatcttatgcatctttggattcagttttcttattcgcaaaatggagatcactgtgataatgctctctatgtctaggatttgttttgtggcatgaaattaaatatgtgaaaatttgtgtgcagtttcaaacaaatgccagttaaccttcaaccctacacgctgtgttttctagaacatggcacttaccatatgtggaggcaggacagcagagaagttgacaacattgtctttgaagccaagcacaccagattcacatctcaatttcaccattcactacgtgactcaaggaactttccttgacctttctgagcctcaatttcttcatttgccttgattgaaatggactgttataattaaattgtcaagtgtttaaagcagctgtcatagtcacttgttcccagtaaatagtcaattaatggcagctattataatcaataaatactagttgacttaatgaaagttataatccaagacatgctaaccagactacatttttctcttttaccctcaacatgagtcagataattggaaggctacatatatgaattattttrcattaccccgcagtacacttactgctataggttctcaatataggatatattggcttcttattgatgttcttttgaagtgatggaaatccatgaatgcctttgacttacgaattattatgctgttccttttgttttttgatgtcatagcccatatgacaaactcttaacagaatttaaatattagaataaacatctttcttttgatttattgttgtatcttctttcatgaggcaaaatgtgtcatgtataatgcataacatttccctgtttactttggctgccaggaagctcagagtttttttttttttttatgaaaaccttagccatgtaaaaaattgaaaccttcttatataattgttgcttcctagtcacttttattattggtcttttattctttcatttttatgttactatattccagttctgtatcttcattttcagggtaaacttgcccaagctccttttcaaataaatggatcactgaaaattagaaaactagaaaaatagtgttatttaattctgataagctttgattctacttttgctatcctgcaacattccacattaattttattaaatcagaattaattttgacactcagtaaatgtcctaatcagcaaagcagtgtactgtctattaatcaaaataatgtgtgcattatgaaataacatgctaagatgggtaacactacttttatttaattaatttatttatttgagacagagtctcgctttgttgcccaggtttgagtgcagtggggatctcagctcactgaaacctgtgcctcctgggttcaagtgattctcctgcctcagtctcccaagtagctaggattacaggcatgtaccaccacacctggctaatttttgtatttttggtagagacggggttttgtcatattgaataggctggtgttgaattcctgacctcaagtgatccacccatcttggcctcccaaagtgctgggattacaggtgtgaaccaccccatccagccttaattttaaaaatataattaattctaattaatagttaaccaacctgtggatacagaacatacatatttattgttgtgatatttcacctttaaatgaaaattggtcacaatataaaaataacccttttaaaattaatatagtatttctttttgtgctcatgtataaaatttagcttttaatatgttcttttggagaaaaaatttaaacatttgttcttttctcatatagccttaagtgcacctagttttaattttttatcaacatcctacctcctcaaaactttttctgtgttatcttaaaaacaatgttaaaaactatgttatctcagaaaccagtgaacagaaattcattgtataacattttggtaaacaagcagttaaggattttgaaagggctccatttccattctactactttttgctgagtatatggcctaaggaaactgataaaacagttttaatgagtgaaataaaatgaagttgtatattaacttcattaaaggcaagagagttgacaaaaaaatctggtatgtttgagaagtgttttgtggtccttaatgttggaagaaagaatgaatagcccgtgcttgtttcctaagagataatttcagtcacaaaaamtataaccctagctctcccagaatatattggtaataacaaactattaaagtaataatgagaatggtaaagcatakagtctggctgtggattccagccctttggagctgcttggaatataaatcacttctcagtttgcaaatttattcccctcagtgagatactgtatataaaacacaatgtctgatttgaagagtttgggcagaggaatggggagaccctcaatttcttcacttttcttaacctgtcttgcctccattagtggggctatcaacactgtatcacctgatggccttagtctgcacctgttgctgctgtcccagatggcrctcatcttggtcttttttcctgaggtctcatcttgacagtgctgatgtggaagacatcccattcctgaagtccattgttgccatgcttgttgaagtagtggaaggctctaacttcttacttggctcctgaaagtgtctaagcttttactttactttttcaagaaggtatagacaagtccttgagatgagagaaaaagctatctaaagagaaacacagagagctacctctaaaagtgctgtgacaagggataccccagaatgatgtcragccacactgactcttttctctcagacatgatccatttcccatttagagagagactgtggcagtgtttatcttctcttttgtgaggagttttaatttctgtatgtcttagcccagttttctacataaattctatttttctgttggaattctatgttgtctttgtgtaagtagagctttacagcatcagcttgggcagttgagtgttcttggtcatcgtcttctccttaatctttttggaaagagtaagccagggagttttattagggtttatgtatatataattgtcctcatattctatcttttttctgtattattgaggaaaagcagtaacctgatagaacttgtatatatcatcaagaggactgacctaataagcacctactatgtgctttataataatctcgtttaattctcacaaatccttaaaaattaggaatgtgcattttatatgttaaaaaataccagggttcagaggagttaagtggcttgatcaagatcacatgctaattatgaatggagtccatgttcaattttggtgcattttgttggaccccaaagtgcatcctctacttctagggcagcttttggcctccttgagtaaatgacttctccactgctgaatagcctactttgctgctgcacatgacgcctgaggcattcctgttgggtcctttcatttgataaacatgtttacaaatactttttttctcactctgaaagagcctttcttagctgaagcgaaagagtaaaactttcatcatagtaaaatacctagacccaagtaaatatttactcttcatggttacccatcactttacacaaagtaggttcataatatatacacaccaaaaaatgtttatattgaatttaaagaacgcttatatactgttggtgggattgtaaattaattcaaccattgtggaagacagcgtggtgatacctcaaagacttaaaggcagaaatacgatttgacacagcaaccccattactgggtatatacccaaaggaatataaatcattctactatagagatacatgcacatgtatgttcactgtagcacttttcgcaatagcaaagacatagaatcaacctaaatgcccatcgtgatagacaggataaagaaaaggtggcacatatataccatggaatattatacacccatgaaaaagaatgagatcatgttctttgaaggaacgtggatggagctgaaggccattatcttagcaaactaatgcaggaacagaaaaccaaatacctgatgttctcacttatatgtggggctaaattatgagaacacatggacacatagagggaattaacacacactggggcctatcagagggtggaaggtaggaggagggtgaggatcaggaaaaataactaatgatactaggcttaatacctgggtgatgaaatgatgtacacaacaaactgccatgacacacgtttacctatgtaacaaacctgcacatgtacccctgaacttaaaagtataaaaaaagaaaaaaagtgcctgttcatgtccttcacccactttttgatggggttgtttgtttttttcttgtaaatgtgtttgagttcattgtagattctggatattagccctttgtcagatgagtgggttgcgaaaattttctcccattttgtaggttgcctgttcactctgatggtagtttcttttgctgtgcagaagctctttagttgaattagatcccattkgtcaattttggcttttgttgccgttgcttttggtgttttagacatgaagtccttgcccatgcctgtgtcctgaatggtaatgcctaggttttcttctagggtttttatggttttaggtcwaasrtttaagtctttaatccatcttgtggggttgaggggggagggatagcattaggagatatacctaatgctaaatgctaaataatgctaaatgggtgcagcacaccagcatggcacatgtatacatatgtaactaacttgcacattgtgcacatgtaccctaaaacttaaagtataataacaataaaataaaaaatttaaaaaaraaaaattaataaaatttttaaaaagcttatgtatgagtctggatactaaaggtaggatttaatgttaaagaagttcttctcmggctctaaatgtatttatttaaaaaaagttttgtttttctttttgcctaaagaaaatctttactgtgagaaatgacaaatcagattttgtttagaaggtctgtgaatttaatagcagttgagctagagttgattatgtggaaatgagcttttttatttgtatatattcatgggtacaagtgcaattttgctacattgatgtactacactgtcatgaagtcagagtcttcagtgcatccataactagagtaatgcactttgtacccaccaagcaacctcccatcattcacccctcctcatccctcataccctttcaagtcttcattgtccaccattccacacactgcttcaatgtgtacacataatttagctcccacttatgaggagaacgtttagtatttgtctttgtgtttgagttgtttcacttaggataatggtctccagttccatccgtgttgctgcaaaagacatgattttattctttttttgtggctgaatagtatttcattgtgtatatataccacattttctttatccagttatccattgatggccacttaggttgatttcatattttgcttttgtgaatagttctgtgataaatagacaagtacagatatctttttgatataatgatttttcttttcctttgggtagataccaagtagtgagactgctgaatcatatggtcattccttctttagttctttgagaaatctccatactgttttccataaaggtggtactaatttacattctcaccaacagtgttttaagttcctttctttccacatcctctccaacatgttactttttgtctttttaatattagtcattctcgttagtgtaagatggtatctaattgtgatattaatttgcattcatctgattattagtgatgttgaacattttttcatatgcttgttggacatttgtcttctttaaaaatatagtctattcattgccctagcccagttttaaatgggattatttgggaattttttgttgttgagttgtttgagttccttatacattctgtccccttttggaaatattttctctttctaaatggattttaaaataaaaaagtttagaggaagagtgtcttatgaaactcttttagccaccgtattgctgaaccattgactttcttgttgacattcactgaagagttggaacactattcctattcaagaaacttttctacaaaaaaattcttaaaaaagaaggaaatggtaacgtaaaaattctctttccaaagtacagtgtaataaagtggtgtgtagtacatagcatcttaataggtaaaaggaattgggttggtatatcttggagaagaaacacttagaaaacttttaccttaccttctatcctacactcaaaaactagtttcattttagtcaaaatttgagaagtcataattcaagagacttctgtattttgctttattataattgggcttcttgtgagaacatcaataattatactgtgtataaaaggttcttcagaacatctaatgattgtgggactaggtgaggtcaattctgtggtaggcatagggaaagcttcttrttcatatttttcatctgcctgacatataatacctttgtgatatattatccattttattaaataaacagttattgaaatgtatctcttctttataacttctaagtgttctaaagccacatgactatggattatagctgatggctttagataatatttttgctctagatataaatgtattggtctgtagagcaagttgactttcatgttaccacttaaaaaatttagttcactaaattttgaagattgtcatttgcctactctcggttttttagataagtgtatataattttaactatttgaaatgttattccacctacatgcagtagttaagcacaaaaatcacttagaacacagacaaggtaattcatgaaaaacaaattgctatatcaaaatagtcatagtatctctataaaaatgtgaagtcaaatgtcatctcccactggattgagcctaatgctccttgtgcaaaacctttcttctaagtgttctgtaacacagttgagattctcttcactccatgactgtgttcgtatatagtacctatttgctgtcccatgaacagtgcatactgtctcttgcatctaccctcatttcacaggatgacttcttcccattcttaagatctcaatgtacagaaacccactttcagaataaatcctggattgcaagacagtagtggaggcccctccactttgaatatatagcttcctgtatgtatttactgacttcacagtgttatcatatctttattgaaatttcctatttctctctcttactaaactataagttcctagagaggaagaactgtcttcttgtttactgttaaatagctatttctataatagcttttgctagagaatagctgctcaattaatatttggagaattgaattataccgaacatttagaatgctagaaagcattgagattaacaccattgagtttgatgttagctgtagtttttcatagctgcacttaatcaggttaaggatattcctgctaagctctagatttctcagcttttattatgaaatgttggtctattttgtcaaattctttcactaaatttactgaaatgattctataaacacctcatttcattacacttggctttactgcacttcacagatattgtgctttttataaattaaaagttagtgggaaccctctgttgaccaagtctaccagtgccatttttctaacagcgtgttttcacttaatatctttctcacattctgataattcttgcactatttcaaacttttccattattattatatttattgtggtgatctgtgatcaatgatctttgttgttactattgcaattgttgtggggcaccaaccacatgtaaataagacagagaacttaaatgttacatgtgttctgattgctcctactggccagctattccctctctctctcttcctctccttagcctccctgttccctgaaacaatattgaaattagaccaattagtaacctttcaatgacctctatggcctctaaggcctctaaatgttcaagtgaaagaaagagttgcatgtttctcactttaaatcaaaagctagaaatgatgaagtttagtgaagaaggcacagtgaaagccgagataggctgaaagcttggcctcttgcaccaaagagtaagccaagttgtaaacacaaaggaaaagtattgatgaaaattaaaagtgctatcctagtgaacatatgaattataaggaagccaaacagacttattgctgatatggagaaagttttagtggtctggatagttgatcaaaccagccacaactttccctttagccaaagcctaattcggagcaaggccctaatcctcttcaattctatgaaggctgagagaggtgaggaagctggagaagaaaagtctgaagctagcagaggctggttcatgaggtttaaggaaagaagctgtcttcctaacataaaagtgcaagatgaagcagcaaatgctgatggagaagctgcagcaagttttccagaagatctggctaagattattgatgaaggtagctacactaaacaacagattttcagtgtagatgacacagatttctattggaagaagatgccatctaggactttcatagctagagaagaaaagtcaatgcctgacttcaaagcttcaaaagcctgggtaactcccctgtcaggagctgatgaaggtggtgactttaagttagagccagtgctcatttaccattctgaaaatcccagagcactgaagaattttgctacatctactctgcctctattctagaaatgcaacaatgaagctggataacagtacatctgtttacagcaaggtttactgaaaattttcagcccactgttaagacctactgctcagagaaaaggattcatttcaaaatattactgctcattaacaatgcatctggtcacccaggagctctgctagtgatgtaaaaggagattaatgctgttttcatgcctgctcatacaacatccattctgaagccatggaccaaggagtaattttgactttcaagtcttattatttaagaaatacatttcatgaggctatagttgccacagatagtgattcttctgatggatctgagcaaagtaaattgaaaaccttctggataggatttgctattccaaatcccattaagaacatttgtgtttcatgggaggaggccaaaatatcaacattaacataaggagttcagaagttgactccagcactcatggatgactttgaggggtttaagacattagtggagaaagtgactgcagatgtggtgaaaatagcaagagaactagaattaaaaatagagcctgaagatgtggccaaattacttcaatcttgtaataatatttcaatggatgtggagttgctttttatggatgagcaaaggaaatggtttattgagatggaatctacttctggtgaagatgctatgaacattgttgaaatgacaataacagatataaacttgtacataaacttagttaagaaagcaatggcagagtttgagaggattgacttcaatttcaaaagaagttctactgtcagtcaaatgctatcaaacagcatcacatgctacggagataccttttgtgaaaagaggagtccattgatgcagcaaacttcattcttgtcttattttatgaaattgccacaaccaccccaactttcagcaaccaccgtcctgatcactcagcaaccatcacactgaagaaagattctctaccaggaaaaagagtatgattctgaagactcagataatcgttagtatgttttagcaataaagaatttttaaattaaggtatctatgttgttttttaggcataatgttatttcacacttaataaattactgtagagtgtaaacataacttttatacatagtgcaaaaccagaaaatctgtgtaactcattttattatgttagctttattgtggtagactrgaactgaacctgcaatgtttctgaggtatgcctatctatggttttctctctttgttcaagtaatatggctaattacattgattaattttcagatgttaaataaatcttacattcctaggacaaacatctctttggtaatgatatataawcctttttacataatgctcaatttgatttgctaatttatttttacagttttagtctctgttttcaagtgrtattggtctgcagttctcttgtgttatctttgtttggatttggaatcaggataattctggcttaataaaataaattgggaagttttttctaatactctactctctgaaagagtttctggatgatagttactattttttcctgaaatgtttaatataattccccattgaagctatctgggtccaatgttttccttttgggaaggttttaattacaaactgaaatttttaaatttaatataaaactactcaatttttaaaaatgttcttcatgtgatatttaggaatttcccctttcatttaggtgcaaaatttattggcacaaagttgtttgtaatatcttcttcatatcctgcaatttccttattttccttttactgtccataaaatctgtagtgaggtggtctctttcattcctgatattggtaattttctttcctctctccctctttctcttcctcccctcccttcctctctccctcccttctttcattcttctttttttcttcgttatttctttccatcttttcttttcctttatcccttccttttctttctttctccttcccaagatataagctatgcatacactttaatctctagctgcctttttagtctggtgagcctagcagctcaaaagacaaatcttaagagctcctcttagtatacccgtatgggaagagcagagttgatttttctctaggcttctattcagctaaactgtgtccatgccctgttgccttttcaaaaataaggattcccttgagaagaaagaaggcactagttaggaagaagaatagaactttggtttacttcacaactctaaccaacacttccacctcctgtataatgatccatttgtgtgctctttttggatgcttcagtcaagagcccccactcctgagaatggagtgatgaatacgagtaacaccccttctttgaagatcttactgtttatagaccagtgtacatagctctctgtctagtattctaaatcctcttctctctggtcttcccaactttccaatgttctatttcactgtttccatcctcacctctccaggtgagatggtttactattttgccaacatacttcgtggacttatgttactataccttcacatttgtaggaccatsccactcctcaatttccccaatttctagtttctctacattttctaggagaactaaagcccagagaggtggcagaagttatcaatgacaaacattttatttaagagaatgagaaaagaagacaaatgtagggtttttctttcctagctctaagagtttgattttagtctgatgagaaataggatgccttttaggttcctgggaaggtaactcttaggaagaaaatgtggtctgggaaagataaactcaatatctttaaatagtaggatagaagatgaaacttgtggtaagtacaagagtaaagaggactgaggtattcaggttagttcaggggttgtgagacaaagagaaacgtatgcatttaaagacattatgaagaaaacaagtgacaaacacattcaagaccttaggaataaagaactggcaggttacacacacacacacacaaaagtgtaggcaacaccttaaaattctttacttatattaccctaaattgtatcattgtttggtatagtaaatatttatgtaattttatttatttttacaaatattttttgaatactactcttttccggcatcactctagacactggggccacaaaagtaaactgtttatttaatgaattgacatgttctcatcatcaaaatggatatgtcaaaattttattaaggcttttagaaaaaattgattctgaatagttatgtttaaaagatgaagtaataatcgtgatttgggggatattaagaaatatcttccatgtttgtctgtggataactaaattcagcagayktgaagtcagtaaatatttgtgtctactggacaaaaattattgctttaaactgcatcaaacatattttaaggttaatattttatggagtaatttagatagtgctactctcaaacattatacttgccaaaggacagaataaagaaaataaatgctttctaaaccaaagagtatcttattttctacttaaaaaaatttttaattcctgtggttcattaggaattctacaactcttaattgaatgtatcaatataattgattgaatgtatcagatttaaaaaaaaaattaaaatttttttgagacactgctctgaactsttttttgaatcaaagtaagcagaggttctcaaattccaattcttttgtatgcatgtttggaaaggaaaattgtaaaaattcttaggcatagacatttacaatattattggatgaaagcaaagctagttattccactgtgatttgaaaagtaaactttaggttagattttaaatatttggtagttcaaaattgtcatctcccattaaattattattactgcagtccttatgaaataaaggcactgttcctttcgctagccatcacagtttattttttataattgtaaaggattaagtcaaattaaaaaaactgaggcaatgtcaaattaacaaaatagaggtagaaaaacatacttttaatattgttgtattttaacatacagttaatattttttaatagtctttaagtctcactcttcaattaaatattcattcaaaaacattgattgagtgttcaycatgtatcagtarttctgcttagcgtgaggcatacagcgatgaaaaaagctaaagggtctgtgcacaatggtgctttcgttctggtggtctcagcaccctggtctgacttgagcaagattcctattaggttggtttagccagaatccctccttactgctgatgtttcccttcagtgattttctattcactgaccaccctgaccctgatccttggctatgaattcccacttgcctatgctgtattcagaattgagcctgattctttattgatgtttcttttctctctactgcaattgtcataaattaaatctgttattattattattttttttaccatgttaactactatccagctctggtttttctttgacaaagaaaataaatcagctatagaatagaaataagaggttgatgcatagtctattttagatagggtggccaaaactcctactgagaggtatttggtcagtttaagcagaattctccttacccctaatatttcctttttactagtttctcatgtattgacctgcactctgctttttggctgtaaattttcactcatcgctgctgtttttggagtttggaatagggtatttgccttataccccactgcaagaccctgttgcagtggtccctatgcctgtcacaatggtcctaagtaaagtctttcttaccatgctttaacacgtgtcattgaataattttttcattaacactactcagaatttcgggtgaacaattgtagaatctccatgayatcagtagcctaaagaaaacatagaaaattttgggagttctagattcttggcatggcttggtataggtgaccaggtcaggatgggggagagagctttcatagagtagcatagccatcactgtggctctgaatacccattcacttatctaacagatagagtgagaagtggggctggcatagaagcagttcttccctcgtcattaccagcttcatatccttgccagaagtttctttgccaggagataattctgttaccatgggctcctagaagtgttctttggcagccctgggtgaatctgatttcatgcttatgcttttccacagcttgtacttgtctatgattttgaaaattaactctgaatttgtaataagtggtacatattttgcatattattttaaccttacagggacttggacaccaattatcttttatagwtttgttaatcaatattaacaaaacataaaatttttgccttgcaaaatgtacttgttcttcctctcgtagagccatatgtgagtggaaagatcttgaattgttcctgctcttcttgacagaagaaaataaaagtatgtcttccacaactcttttcttacggtaaccattcttgtttgaggctatcaaaattgcagcaggtgatttcttttctagttgaagtacaatgcagcataaatattctcttctttcacacaaaggagtttaaatcagagtgggcttgctttctaaatctaagggttgaaggccgagggataacgtgtgtagtatatttgttgtgctgtgaatactgtagcattccagggggtgagagtctaactttgcaatacatatttgtttttttaattaactaatattttcagatacattgagacccttaaattttttatttttatttttattattttattttatttatttatttttattttttgagatggagactcgctttgtcacccaggctggagtgcagtggcgcactctcagctcactgcaacctccgcctcctgggttcaagggattctcgcctcagcctcccgagtagctggtactacaggtgcatgccatcacgcctggctaattattgtatttttagtagagacggggtttctccccgttggccaggctggtctcgaactcctggcctcaagtgatcctcctgccttggcctcccaaagtgctgggattacaggtgtgagccaccgcacccggcctacccttagaattgtagtcattttattaatacaatgcagaaaattagtcataagaaaaatataattagcatttgaccttaaaactcataaaacagattgtgaataacatcatccctttttacttttattttaaaatttcaaaaaataaaaaaaagtttcaaggttttgatatttttattctgaatttttaaaaaatcagtagggaaaaataatcctagcatttcttgttggggaggggacatatgtgtcccctctcactgcagtactgcctctagggctccctgcttacacccttttttttcccttatccttctcttaaggtggaagtatgttaatttgactagtcaatatctaagaaaattgttgagaaccactgcatgctaaaaggcagggcccatgctctgttccttttttttcccttcttcatgcacagaatgagtaggttagcctaaacgtggctgtccttgtcacttgtccctctccacaatcaagcctaaacctaacagactgttaaacaccaagagtctggtttgagggtgctgatcagaactcagtcctgcttttaagatatacatatgtatatatatatacacacacatatatataagatatacatatatatatatacttttttatatgtctattcttttttttattatactttaagttctagggtgcatgtgcacaacgtgcaggtttgttacatatgtatacatgtgccatgttggtgtgctgcacccattaactcgtcatttacattaggtatatctcctaatgctttccctccccgctccccccaccccacaacaggccccggtgtgtgatgttccccttcctgtgtccaagtgctctcattgttcaattcccacctatgaggtgtttggttttttattcttgcgatagtttgctgagaatactttttaaagagaatgarcccccttggtttaatccagcaagcattgtctatctcgctggattaacagataagcatgcaacccaatcaaagctataagacacaagagaaatttttctggggcttctgggaaaaactagtttatatctttcttctrctggatttgtgagtgtgaagaggtgagaataacctttttgctgccaatgagatacaccatgaggatgaggcttactgacaggkgaaaggacagctgagatayrcagaggaaacaaatcttgatgagattatttgaaactctgaatcaaaccatagctgaagaaagcaccagcactggaatcttcatttataggtcctacgtatttcctgtctttctttaagtcaggttgaggtctatttctgtcacttgcaacatacaggacgctgttacaggggaatgtaggagggttagattgtgcactccatcatgggttatgatatggctggtgagggattattggtttctggctcaactaataatgatgggatattttgtttcctatttggttattattcccaagcttatcactcttggataccttatatgggagagagatgggagagtcaaagtgaatagcagggcagattcagtattcctggttgtaaaactgtgtaggtggatcagacatccatgctttatcatgaataacctggcccaaggtttttaaaatttttcgatggaaacaatttagttgacagtattcaaattttttttaatggctgtacaatatattatttcatgtaatgaagtcatatgtgccagagtggaagtggttgaactttactttagtttttcgtattcctttcagattcctatagttctatgctgtagaataatatttgctaacgaatacacctcagaactccaggctcacaaacacttcatgagaaaaagattccatggccaaataagtctgtgaaatgctgcatatgaggtcaccttctgaccactcatagggtactttagtatattaaaaactttggcaaatagtaragaagcttatttatttttccttagttcatttgaccatgaattctcttccctcttagccctccaccttttgttttccttgtaataccaagtggaggagagtgggttaaataagaatgctactcttaggttggtacaaaagtcattgcagtttttgccattaaaagcaataacaraaactacaattacttttgcaccaacctaataaaatgataacattctctctcattgaaaacctgatattttctaatttgtagttatagttattcagcagaatggcttattccttttgttcaaatacagttgaacattagaggctctattctttttagttactcttgtttatgcatacttaatccaattctgtccactaacaattctacttgaactctggtttcatacatgaaagaaaagtcatctttagtcgagcaaaggaaacaaggcaaatgcaatattaaagttacatacaggttgcaatcagggtgcggtggtgcacatctgtagttagtctcagrtacttgggaggctgaagcaggaggattctttgagcccaggagttagaggcaagcctgggaaacatagtgacaccccatstcttaaaaatgtgttacatatgggtttcaatattccatgggatcagagggcttttactgtttttgaatgaaaggtcgaactggtgatgggaagtaacactggggaagtgaggcttgacctgtcttgagggttgaatgtgcacctgtcaccgaagaggctgctgggagtattgaaaatgagaggacctgtgactgaaggcttcaaggtatgagatattctcttgcctctgagggacaaagataacaatagttggattgatggattttatgcagatttgtatttttaggaaagtcactcttgtggtaggttggaagagggattggaatgaatgagcaagatgttaaaagaggtagtatcaattgtggccatggactaaataacaggagtgaggaagaaggaagaacaaaagatgacttggcagttgtcagtgaatggagattgaggtggctaagaagtggattatttgaccttaagggtttaaagtggaataatatgataaaagcaacttagtatttattgagctcctrtttgtgctaggtatggtgctaagcacaatggggaagattactattctctagaatctcagcgttttgagaaaaaaatactgaaatactgtgcatgctacagtggatatttgttaggggttttttggctgctcacattctaccccctttgtagcattcctcattgaatgttggtagttattcctgttatggaagctaaaggtggccagatattccctctccttcttcacttcctggcaactagagtttctttaggggcctaggcttagtcaactgatgctcttgagcagattcagaatgtgaagttactgatgggaaggcattgagtagttagagatcatttgtggattaagagtgcaaccacccagtatccttttagtaaattccttttctgaccaagyttcacctgacagatataaacacaggcgttaatgaattcaaggcagaacataaaacttgatttaggagaataagaaagggagaactttaaagcttgctgttagaattgaaggaaattcttattgtccaacttcctctcaatatgcactggagggagccttctcaagggggaggcttataacattccctcctctgagaacttagattttataggttctctgaacttctctcttaagatgttaagcatttagtgctttgtattaggacttctgtctttgatgttggtgcttcaaattttcattaactaaatattaatcttttacaagaaccctctacctgtttgttgagattaatttaacagccagtaataggtataggtattatttatcttagagatgaataaaaattgtgataaaccaaatgtattaaaatcataaaatacttcatgagttatggcaacagattgctattgtgtttattatgttaatgtgaagtgcttttactatattgtgtaagaataaaaaagarcaagagaagatattgataagcttaaggagtaatctttagaatatgatagatgaaaagctggaccacaaatggctagaagagtggattggcacagttatckgtgtaattatcagggcacttagcaacattttaattagtgggaatttatgatggcttaagttgtttttgctgtccagtgtttttaaaagtggttgcctacagctttgacctcccccacattttgctttgttaagaactcttcagataagcataatttcccaatcagaggcagggtgataaaataaaatgagtataagattgagttgggaatgctgggacttagtcttgagtctgctacttcctgtaatcatctctgagctttagttttctcgattacactcaaatgaaccctctttatttgctttagggcattattgggaagatttaattaacaccagctataaaatatcactctgrtcactctatatccccctcacatagcctgttaattcctacagttcttattgtacctgacctattactgattttttcccatcctgagttagaatggaagctccatggacacagggactttacacattttgttaacttcttttttttcaaaagcacatggcagtgcctgccacagacaatgtgctgaatacaattcagataataaggaatgaaaatattgctttttttgtttttttattatgaatgcctttcttgggaggcttgttacagattggggttagtcccaaagtgttggatttgaggaagccttctcatatttgattgatgatcttagtttgtttgtttcccattgtaccatggttattacacattatctcaagacaagacaagtggcattctcctaaaattttcattcaagctacttgctgtaactactgttgtaaatatgtatctcaatatcatgtattttttatgtacatttgctaatattgatgctttatagaggagtgtttcccttatcaatagaggatgtatagaaattttggcttaaacctaagcataaattttactttgcccaacacaagtcataaataaagctacatcttaaatagaatctaatgaattgttaatgctcagtatttatcccttcattaaaccaaacctattcttactgtaaccattttaaatttctcccctttaccatagctgttatttatccagttattgtatgtggagaaatggtccttcacacaatatcaaaacaatatataagtctaaagcacttcctagagttatttttgctaagtactgcttgtctgtacatgcttttttgtaagataatttacttacataagaatgaagactttctattttgaggtttgccagtcatcacactattctaatcatcactaccaaaaccatacatcagcattaatctactttggcattatactgtccaaaggaccttttcatagaactgtagactttcagagttggaagttgacttgaagaatctagaatgcttaattaccatctacaaacttaattcttttcctgagwtttttatctaatktttttgtttacacacagattttattgtttacaggcagatggctgaagaaatcttgcttatttacagttttctacctgtttaactaagtgcttaatataaacatatatgataattgagaaaaatgrcctactatatcatatgcaggtaatttcatgacaargtcaataaaataagaggccaccagctaatatttaggaatattttagagtataaaaattttgcaaaaagaatccagcagggcagaaaattccttatattgtctgaatcagtaagtttctcctctactaagaaagtggaattgtttcttgagatggagcacacctcgcctggaaacrtgtatgcatcctaacaagaaagggaacgtgtaccaacttaatcagtccagactgtctggttttcagtgttctcaaaggcattcatacttactgttaggaaatgtttaaaaatgctgggggatgtttttatgcttgttccaatgattaaccacaggcatttagtgtgtgagatgctatccatcctgcaatataaaagattgtatttttcctgcaagaattttaaattcctcaccagacatttgtgtaggagagaacctgtttatattaattggagcatagagactaatttgattttacatataaacacacacgcacattttttggcagttgtagtatacactgattttccaggagtgctactattgtacatattgataaaagattgaggattgtatttctttgtagtttaaaatttcccagagttactcagttgtatcacatcagtaatgtgatcatgatatttttgtcaagaatctttcactgccctccttctctgcatgtgtagctgttgtactcacggtgattggttcaattgtttcaatacttcagaatctctaagtgtcatcatgcctgaatgctaatatagagaaattaagattattttattgtactacttttatttaggcattacacagctaaggtattatattgattcaaaaatttatatgggtaagttacgtcatttataaaatttaggctaataaggggagcactatgaaatagttgttatttaaaagatctttgtgtcaatacagtgactttgaaactagtgtgcattggagtctctagaaggtcttgttaagatccrtattgctgcccctagcaccaccacccccaacagtttctacttcagtaggcttgggaaggggggccgattgtttgcatggctgataagttccctggtaaagtggatgctactgatccagggaccacactctgaaagaactagtataatatgttagagaacccgatwagagctaggtaaccctgatgaytagttgggcagcattttacatccacattgagttcacatctatgtggtttcaaagatatgaattagatctgaattttcttgagttaatttgaataaatgcataagtttaatgtgttgaaaataatctaaatataatttactttgaacagtcagcacacacatatttgttagcaaattcttctgtttttttttttctcttaacctgtttattattattatactttaagttttagggtacatgtgcacaatgtgcaggtttgttacatatgtatacatgtgccatgttggtgtgctgcacccattaactcgtcatttagcattaggtatatctcctaatgctttccctcccccattcccccacccacaacagtccccagagtgtgatgttccccttcctgtgtccatggattctcattgttcaattcccacctatgagtgagaacatgcagtgtttggttttttgtccttggaatagtttgctgagaatgatggcttccggtttcatccatctccctgcaaaggaaatgaactcttcattttttatggctgcatagtgttccatggtgtatatgtgcctcattttcttaatccagtctatcrttgttggacatttgggttggttccaagtctttgctattgtgaatagtgccgcaataaacatacatgtgcatgtgtctgtatagcagcatgatttataatcctttggatatatacccagtaatgggatggctgggtcaaatggtatttctagttctagatccctgaggaatcgccacactgacttccacaatggttgaactagtttacagtcccaccaacagtgtaaaagtgttcctatttctccacatccactccagcacctgttgtttcctgacttcttagtgatcaccattctaactggtgtgagatggtatctcattgtggttttgatttgcatttctctgatggccagtgatggtgagcattttttcatgtgttttttggctgcataaatgtcttcttttgagaagtgtctgttcataacctttgcccacattttgatggggttgtttgtttttttcttgtaaatttgtttgagttcattgtagattctggatattagccctttgtcagatgagtaggttgcaaaaattttctcccattttgtaggttgcctgtttactctgatggtagtttctttttttgtgcagaagctctttagtttaattagatcccatttgtcaattttgtcttttgttgccattgcttttgtgaagtccttgcccatgcctatgtcctcaatcgtattgcctaggttttcttctgggtttttatggttttaggtctaacatgtaagtctttcatccatcttgaattaatttttgtataaggtgtaaggaagggatccaktttcagctttctacatatggctagccagttttcccagcaccatttattaaatagggaatcctttccccattgcttgtttttgtcaggtttgtcaaagatcagatggttgtagatatgcggcattatttctgagggctctgttctgttccattgrtctatatctctgttttggtaccagtaccatgctgttttggttactgtagccttgttgtatagtttgaagtcaggtagcatgaygcctccggctttgttcttttggcttaggattgacttggcgatgcgggctcttttttggttccatatkaactttaaagtagttttttccaattctgtgaagaaaggcattggtagcttgatggggatrccmttgaatctataaattaccttgggcagtgtggccattttcacratattgattcttcctacccatgagcatggaatgttcttccatttgtttgtatcctcttttatttccttgagcagtggtttgtagttctccttgaagaggtccttcacatcccttgtaagctggattccgaggtattttattctcttcgaagcaattctgactgggagttcactcatgatttggctctctgtttgtctgttattcgtgtataagaatgcttgtgatttttgtacattgattttgtatcctgagactttgctgaagttgcttatcagcttaaggagatttggggctgagacaatggggttttctagatatacagtcatgtcatctgcaaacagggacaatttgacttcctcttttcctaattgaataccctttatttccttctcctgcctaattgccctggccagaacttccaacactgtgttgaataggagtggtgagagagggcatccctgtcttgtgtcagttttcaaagggaatgcttccagtttttgcccattcagtatgatattggctgtgggtttttcatagatagctcttattattttgagatacatcccatcaatacctaatttatggagagtttttagcatgaagggttgttgaattttgtcaaaggccttttctgcatctattgagataatcatgtggtttttgtctttggttctgtttatatgctggattacatttattgattttcatatgttgacccagccttgcatcccagggatgaagcccacttgatcatggtggataagctttttgatgtgctgctggattcggtttgccagtattttattgaggatttttgcatcaatgttcatcaaggatattgcaaattcgtctgttaaagtaatttcctgcacacagatttttttttttaatgaagaagttcacaattcttttggaaaataagtagaccaaatcgggcatcatgtgtccaatttggctatggagttgtcttgttgactttttccaggactgagaaaaaaaatggcctgcatcaagtggtatcccaaaaagctttttgagctctttcatcaccgtatcagcttcataatgaatgactaataaygatagtgccgaaacaaaggaattaccctaatgaggagtcttgctaccaccatgctttgctgaggtggacaatgaaaacttgagcagaaactataatttatctgatcatttttaggccataaaaatacgtcaagtcacttctggtcacatgaaaaaatagtctcagtaatgatatgcctagttgaatgaaataaagtatctatcttcatttaaggtgaaaggttttctaataggtcagcttggatctgtttgtgcggactgtccatggcaaaataaaaaagtgcaagtgcagtcaccatctgttcttttttcttggctagtacctatttacagggctgcttcatgtttgcttgactggatgtggagtgggaagaaaaaggtaagggcaggaaagttatcccttgattattctggttttgccatggtgtttaaccactggcattgcagggctttagcagacttaaatggagcacatttgaaggttactggctctcgaactcttcttctgcaagtcttactttgatgggcctccagctcactgtgaaacatgaggcaagttgtcaccttttttgcttggggcttcagtagaaactgagatggtaaatgcttcattgcaacaatctgttccagtaaaatgtagtggcattgttcactgagcagaaaaaagattttgtggattagtggtgatcacagaatcaaggtgctggaagttaaactgaacaaatcatgaacaacaaagaaaacaaaacaaaagcttcaaggacatatgcaaatgagacaggaatttaatctttgttaggacagcagacttctagcatgcacttatcaatgtttttcagtcatcccctacacatatgtgcacataaacacacacatgaacacattgaagatatttccttcaggtgcatgtaaaatatgctgcttggattgaaattcaaatgggactgatcaatcaaataacttgagacctcacagtaatgttcactcttaaccttagacacctatgcagtcatgttggtagcgggttacaatgttacctcagcaccacagtttgtttctgtacttgagttcttamgtacagaagatagaactgatttaaatagcatagtatatatcattttctggacttttaaaatttattcgagacctcttgatgaaatggacatattatatatttctgccacctggattttcctggataatttgatggaatattttaagtttcagtaaatcagaacaataaacaaactcagataaaaaaaaaaagaaaatgtgtctgtctttttgctgctatggaaccagtgcccagcagaagttctagctcatgtttggcactgaatggtgaatgagagaaaaaggaaaaaaggaaagcagaggtgcttggaggaaagcagtgcagagcagaagtagtaagaaagacaaagccgtggaggcagtaggagagaggggcagctcagagctgcatgggaagcggtactgcacaactctgagcatcctcagtttgcttctctttcggtgttcttggtaccatcaaaagtttaagcaactagagtataggttatgcaagtttgcattgacatgtgagctcaggtccctgattatggcttgaaacaatagcagaattcttactggtaaaagtatataataaatttcagattaatttttataaaaaaattaacattttaaaaaaggcttaaagagctacttacacagttaagtaaggtacagcattttctgatgatgccagttaataacagaaatagatctggggagtgtgcgtagttttgtcttttcatatgtccacatacatactaatactttatgcatttgtatagttaaaatatttttttttttttttttttttgagacggagtctcgctctgtcgcccaggctggagtgcagtggcgggatctcggctcactgcaagctccgcctcccgggttcacgccattctcctgcctcagcctcccaagtagctgggactacaggcgcccgccactacgcccggctaatttttttgtatttttagtagagacagggtttcaccgtgttagccgggatggtctcgatctcctgacttcgtgatccgcccgcctcggcctcccaaagtgctgggattacaggcgtgagccaccgcgcccggccctagttaaaatatttttaataaaaagaaaaatatctttcaagcatgtatttccatagcattggtcatctaaatgagactcagaacccaactttcacttacttcaatgggaattacagaatacaggcttaagttatttgtaaattagatttctcagaaggaaagaacttgtatatggtgattcacgtactttgatattctctattgtttcagaaaccgatacaacaaacagtgccagccgtaaatagctgcttttttccctttatagtcagtatacattaatttttgcaaatgtgagaaattctttttttttttctttgtgtcttttttatacatagtgaaaagctaccaggtcatacagtgatattcatgtaacatnnnnnnnnnnnnnnnnnnnnttttatagaaaaattaacattttaaaaaggcttaaagtagctacttacacagttaagtaaggtacagcattttctgatgatgccagttaataacagaaatagatctggggagtgtgcgtagttttgtcttttcatatgtccacatacatactaatactttatgcatttgtatagttaaaatatttttaataaaaagaaaaatatctttcaagcatgtatttccatagcattggtcatctaaatgagactcagaacccaactttcactaacttcaatgggaattacagaatacaggcttaagttatttgtaaattagatttctcagaaggaaagaacttgtatatggtgattcacgtactttgatattctctattgtttcagaaaccgatacaacaaacagtgccagccgtaaatagctgcttttttccctttatagtcagtatacattaatttttgcaaatgtgagaaattctttttttttttctttgtgtcttttttatacatagtgaaaagctaccaggtcatacagtgatattcatgtaacatctctctgatgaagaaattataatttccaaagcatggctctttggaaatttgaaaaagaaaacaatagccttaaaaggaacaagcctgatttgatcttaaccagtctttatttaatcaaactgcagggaattttcattgccctagtaatgttggtttttttttttatgaaaacatttttgaggactagcttgatgtcattggtatattgtttcctactgtgagccaataaattcagtttcatgggcaaatgcttacattttggcctctgggctaactgaggcacatgacatgaggtggagtcataaattggccagccctgaattctattcatggaagatttcatagcttattttttcagttggaaactttctagctcaatgtggcactttatgtctccatttcttccattcttttcctttgtccattctctctttctctctggttagtaaattttgttggtgtcacagccttttgaaaatgtgatatgtgcttgatggtgcttttgtttcctttggtattgaataaaagagaaggcagttagcagtaggagtaattaaagataataccagtgatgatgatgatgatgattaaaaagccaacatttattgagtgccatttactgtgtgccaggttctatgctcagaaattaatatatttcttttatttaatcttgacagcaacctaaaaataattttagctagcacattttatgttgtagcattataaatgctttacatggatgatccaagttggtgtaattgagtttggtataatagctgaagtctagtccttaaaaaaatttaaatttaaatgctacatatactatagaggggtcaaaattcactctgattctcttcagttattagggcagccctatgtagtagttattattctcaagcctattttagtaatatgaaggtgagacagagagatattcagaaaattatccagtgttgaatagctagtaggtaatgtaaccaacattcaaatatgggtctttttcacatctgattttatgaatactaggactttatgatttagtagaattatagaaatagaagtagaaataaaggtaaaaatgccaaagagtgaatgtttagtgtctctcagaaaatgtggaaaataagcctgtatggcataaaaatcagacaaagatactttctcctttcaacttgaaatgttgttgacaatatttgaactacaaacaccctcctttggtgaaggagtataggaagaggtaatgaggtgagggaggttattcttatagcctctgctcatttttttcactattcatgatacagaatgaatttttccatggagctgttattttgtgttattttgcccgctcgtcctccctccctcccttccttccttccttctttcctttctctttctctctctctctgtctctttctttctttctctgtttcatttttggtaaagttgagttaattatgttttcatttgcttttcttttttttggtatattttttctgggtcagcctagatgtttgggaaggatacttccacagttagataagctatcattttgtgatgccttttattcacaggtttattacaaggtttgacaagactatcctaagaagatttagaaggatttcctgggttttgtktktgtgtgtgtgtgtgtgtgtgtgtgtgtgtgtgtgtatgtgtatgatgtgatcctgtagtggtacaattctgttaatctccaatacttattattttaaatttaaacgtatatctttaaatatagagaagaatcaattttaaatttgtaggctagagtaaaaggatattgctttagtatgtcttgtggtctcagtttccccagaggaaaatagagtctgaaccaaataatctctatagtacctttccacaccaacaccataacttatgtttgtatctgctaaaaacggaatcacagtagattaagacaactctgtagtgttagtttttaaataaaaaagatcatttagattttatccatcaaactgcactaaattaaaccaatttggaactctgctgaaagtgaatacctttgttggtagatgaaaattggctggcatgcacagtcattagcagtgggtgatagtttttttggatataatgtggaaagaacagggagctgttttggaatgcctttgaagttttttctttcagttctaaatatctgagattcttcacaattttcacagcagaatggtccataacccaacatttctgttgggttctaamacatcgcatatactttacaattttggagtttcgggatatgtgtaaatcagacttcaacaagggaaacataagttaaaagaataattcaaaggtaattctaaactaccagtctttaaaatctgctttcaacacaagaacaaaaaaaaatctaaatgataagactaagcaaatgatgtgattttgtttattgattagaaacatgtgctccaaaatggtttaaaataaagaagaaaggagtgagaaaaggaagggagaatttaagacataaaatcaaaagttactgagcacacccaatgtgccaagcatgagtgttagaatcttgaaatgttaggaaagccaaagacttgcaaattaaaagaagtttcactgagcctatcctgtagcactaaaatgttaaaaatgcagcttgtcatcataaggcatgactgggatgtgggaaaatagcagtaacgccagggttgtgaaacaagatcacatagttaaggagataaagccagagctccaagaagtttgtgttctagccccataatgtcaaaaagttgaccaatgtttgtgctcatcagaaacatccatatgacaggctatggatgaaactctgaaacgcaagcctgtttaaacagtttaggcacagttcaaagggagacatttgatattaattagttaattaattaattaattcagaaatcacttattatctgaaatgcacagaagcctagtagggaaatgtgtcatggacataagaaactataatacatagtagaaagtgagccatgccataggaaagtatagatagatttatggttgttcagagggaaagagcagagagcaccagtgaaaataaggttgaaaatatagcctttgagatgggctttacagggtaggcatgtgtgccttatagaagggaycccttagtctccaggcctacaatagcatcatccttactgggaagtgtgaggacctttacttgttggtggtctacagcctgtttcttctattcctctttacttgtggcacacattgccatcagcaaaaagggctcctcatgaactgagctggtaatcaggaaggtcactggaaagtgtcagaatttggcaagaatgggaagtagagggtccggtgtgtttacagtctggaaaatctctcagtagattctgatacggtcttatgtggccatgtcccagcttcatctgcttggaaatgattgctcatagatgacatgagatattaggacatcaaaactaagtgcaacattatctaggaataatgaggaacatgaaaatttataaagggaaatataataaacagtgatatttaaaatatgaatagagtatgtgtgtttgtgtgtgtgtgtgtgtgtgtgtgtaagtgaaaaaaaagttctcaaagtaaacattttcccagtggccgtccttttgaacttaaccaacttgtaagtgtaattctggagtttaatgtatagattaaaatgacaaaacaaaagattttgtgcaggtttactatgtatcaggcatttgtctatgtggtctatatatatatatatattatctcacttaaaaaacacagaaatcccatatggtggtgatgattattttcccttcattgaagatgaggaaatttaaccttaactattttaaaaaattttctggggatcacataccttgttagatgaggagctgggattctaaycaaagcaggccattccagagttcatgctctttattctctaccagagaaggctgcttaatcattgaagggcacataaacttaatatttaatcatttgaactcaacagtccacatgtgtaatgtaggtaagttaattaaccaaatgacaatattagcaagtttgttaattgttctctccatttccatttacaaagcaaattttcaatctgaatacatgctctttgcttcaaagcaaatagatatctgtcctcagttcttaaatctgacattttagacacagaatacttagtctcagtcaaggtatgttgtagtagccactcctgaccaaaacaggagactgcactcaatttaacaaatgtttaatggcagtaaaatttatctccatcctctgacctgattttatttggggtaaacagcatgcctttatgatatcaatggctaagataagtttatctttgtcctatgttaattgaaccttgtgagagctttgacttcactggtatgctgttctaacagagctgagtggtccacaatctcttctaggcaggagatgtggtaattatgcatgcttttcatctggccagcattttaagatactacaaaataaccctgggaaaccattgctgaccactttgctttgtaattaatatattctggctattatatttaaaatcttaatataatgatgaaagctgagatggtgaaaacacaatgccatccctatgatttaagtttaaatgaatccaaaaaagtgtacttggcatttttatcttgcatattagcattttaagtagtgayaaatactgaatattcatggctcagcatgttacctcatttctatcataactaattgcctaatgagaattggtgaaattctcttctgatgccaaagtaccttgacaatatttaagtatcatgaaaaataattttaaatgtcatgattgagggttaaagaacatacttctaggaagcatgtgcggttttatgccaacacactaatctttaaaacagcccaagtatttttaagcttcaataatggaaaaaacaacaatatttggcagggatgaaactggaaatgtttacattggtattgccctaggcagaaacttttccaaataataatattaaaagctctatggtatttcagctcttaacattgcctaaatcattgaattatagtcctgtgttaygtattttcctcttttgtatagctttcacgttgaagctaatttaatttttattggcataaaatattttcctttcaactcccagatcagctctctaaaacaatatttatcagtttcaactctcctgaaggaaatcaccgacatccgtggaacctagaaaaaataattctgtttagaagcaaaacaatgtcatttgagtcaatgtcaagtgggaaaatggaatgtttattttgaggcgatagctcaaggcataaactatttactctaaatgatttgttttactgttgtttttctatcaataaaaagctgactttaggcttacattaaccctgtcgagatcttgatatctatacttagaaggaagttcctttataattcctcattgtcttttggaaatatttgtgtttctatattttcagtaaatggtgttaagaagtaaaacttttctttttgcctgcataaggcgtaaatgctggggaaaatatgatcaatcactttccagaagatataaactcatttagtcgcactgaatgctcaaccatcacatcatgcatttccaaacataattatagtatggctcaacatggtctaaaattccattttctacagccaataaaaacaatttttggcccagatccaaagtatgccaagtttaacttgtgtatctcaggactgttttagcacataaaaccacagaggattagctatcttttccactctttttgaagagttctttttccttgttctattcaaaaagaagaataagagtactaaattaagtactgaagtacattcttttgggaaacatgttattcagctatatatgcatacatgtaagtgtggatagatgacgatttcttttttagtagataatgatatatagaagctaaggccttggtgctaggtatgcccattactactgagctgccattatttctaagccttctcagtggtctcagcaagaaagagagagagaaagagagagagagatatattgatagacagttagatggatttctcttcaaactcaaaattcataagtagcattttgctcaagtacaatatagatatgcatttattaattgccaagctactttatacaagacagtattaaagaaatgtatggaatacaaagatgagttattctctcaatactgtacaaaatgagacaggaaagttacagttaatgattaatgaaaagaagtataagygctattgtratcatgctactgatgatttgaaactggaagtaaaaatacacagccacaaagaagggacatctatctcagatgtgattctcaaggaagacttctagaagcaagagatacccatacccatactgagggttaaacatgaagccagaaatggctgggggaagaatttgaaggaagcatattctaggcaaaggaacttaaaacttcttggagggaaaatgtaatgatttaggtgaactgaaagtcgtccaatattgccaaagctgggaccatgtgtctatttagtgaatgagtgggtagggagattttgagagacctagcctatattaggctgttctcatattgctatacataagtacctgagacttgatagtttataaagaaaagaagtttggccgggcgcggtggctcacgcctgaaatcccagcactttgggaggccaaggtaggcagatcacctgaggtcaggagttcaagaccaacctgaccaacatggagaaacctcatctctactaaaaatacaaaattagccgggcatggtggcgcatgcctgtaatcccagctacttgggaggctgaggcaggagaatagcttgaacccaggaggcagagtttgcagtgagccaagatcacaccattaaactccagcctgggcaacaagagtgaaattctatctccaaaaaaaaaaaaaaaaaaaggaaaaaagaaaataaaagaagtttaattgactcacatttgcacaggctgtagaggaagcatggctggggaggccatacgaaacttacaatcagggtgaaaggcaaaggggaagcaagcacatcttcacatgttgacaggagagagacagagcaaaggaggaagtgtcacacactttcaaaccatcatatatgagaacacactcactatctcgagaccagcaagggggagatccgcccccatgatcaaataacctcccaccaggtacctcctccaacaatgagaattacaattcaacctgagatttgagtgggaacacagagccaaaccatatcatagccagactatattatatatatgtgatttatgaagcttaaatatataatattttatgtaatataaattaaacagtttgaccatcataagagcatctgggagccactgaaagatttttaagcaaatgggagttttatccttaagggttttttttttagttgattctcaaagataatgtgtgtatacataattattatccgaggtagaaagttttatatgtcctaggaaaattagaaaaacaatggcatgtgagttaagagttgtatgattagttctacttgaagaattcaggtaaacctcagaagggggatttacctgaacccccttcagggtgaagggggaatattttggttgggtttattactcaacatattcacagattacccatcttatttattacggattgttttgttttgtttgtaaatcactgtgaatagagacaatacacagatgtcattctcccagagttgttaaccttgcttctgaaatatggcatcacaaagttttgatgtagcaaaatttattgtaagatacaacatttcaagatgatgctaaattatacatttcctttgaccttttaaaatctataatttctatatgatttaaaaattaaagttgcaacaagttttaaaaaaattttcaaatttagtgtaattttaaagttgcaagaatagtacagggaagtccaggaacaattgtttatgttttgccccatttatcattgtctttattctctttattcatgtataattaaacatgcatataaatattgtttattatatgaatagaataaaattaaatatgtattacacaatgcatataatttttatcacacatttgcacatatatagcacaaatgaaatcaaataatttaatacaggtaaaatactgtttaatctgcagttctttttcaagttttgtctttgtcccaatagtcttttatatctatgtcattcctaatgtagaaggaaatctaagatgatacattgcatttagttgtcagttctcttgggtcttttaatttggagtggytcttcaacctttccttgtgttttttgaccttgacatttttagagtacaggccaattatttatagacttcccctcactttggttatgtttggtatttccaagaaaagaattagaaatttttatttctacaaaaatgagtagatttgtttttgtgatattgggtcaggaggcacataattaatcctagtttgtcctaatagtgatgcaataccagtaatattcccatttttaatttttgaattaattagaaatttatagaatgatatattgaggatgtataaatatcctgcttctttctcaccaaattttcacccartggttttactattcactgattttctagctctatcattcctttggtatttatcagttgatgttttccagtaggaggacctttattcctaatgtattcattcatttattttttatcagaaatgactcatggattctgattttattcagtgggcaataagacataaaacattgctatcattatttattttgatgctcagattgtcccagatttgatcaatgaagcctcttcaagctcatttgtatgttcttttgatatgctaccatcattctttgaatgcatccttaccttctagtgtgatgtattccagatttatcttgcactttctctctccccagccctggattcagcctattatataaggaatcttgatcactttcagtagtgaaccttatatagaaaacaaaatttgagtgctaggtgtgctaattgctactgttgtggcgttgtttcttgctcctctcactggacatagctagggttgtatatattatatttataaaacctatagtttataccagtacctctaacttctagccaatgccatggtacctattttagttcttcccctttccatatgtgaaattccrtctccaatcatgagcaatctggctcctattatcctcaatattcttttgctcaaataaataggagatttatacatataaaatgattatatataaaaataaatttatggagaagaataaacatactgatatggtttggctttgtccccacccaaatctcaccttgaattgtgataatccccatgtgtcaaggatggggccaggtggagataattgaatcatggkggtggtttcacccatacagttcttgggtagtgaataagtcccatgagagctgatggttttataaatgggagttctcctgcacaagccgtcttgcctgctgccatgtaagatgacccttggctcttcctttgtcttctgtcctgattatgaggcctccccagccatgtggaactgtgagttcattaaacctctttcctttataaattacccagtctaaggtatgtctttattagtagcatgagaatggactagtacacatgcattagtatccaaaaaattttcgtggtaaggggaaaaataaactgaaggaagactgttattactcagtgcttaggcatactaaaagctacagtaattaaaccagtttggtgcttgagcagaaaaatcaacagaaaagaagagaaataaagcaaaaaaaaaacccatgaaaattaaatgtataataaaagtaacattttaaagtagaagagaaaataaagaatattttaaacacataatattgggataataagcattttggataatttggaaaaatccaattataatattgagaatatgccttaagttttatgtactgttaattcatttctcaatagaaaagtattttatttagaatatatcttgttttaataatgcagaaatgtcaagcatttattatttcttcttcataaatgaaaacacaataggcatttgctgcagttgagtggaagtatatgatgtctgcatatagtcaggaagaatagacagctatgtggtatgatttaaaggcatgcctataactaagtagcatcccattggtctgccacagttactttctgttagagtttttgataattgcrtcccagaatgtaataagaggaatttgtcatctcctaatatattagcagattccctttcttcctcgggtcagctggctcagagtaccattttgagccaatgaaacacagaatatgtgagtttctatagaaatcagaatgggaagaaaatatgtagactagtgaccctagatgattgcttcagtttgagatttgaacttccagaaattaaaatgagagcactgggattctggaaatgaatcctgaaaggaagaggaggatatatgagataatctgtgtttgcttaaattatatgctctgggacagcagtgtcaccctttctacgtataccataaccaaaaaagattattcaagtgaattccaactgaggaagacacaattagggcaacttttcttttggtttatatttctgttgtgttcctacacatgtcctcccaaaagaaaatatcctcagaaactttaaatcaaggcattaaggtaggaaacaacaacttgctcgaagtaaaatgttgtcatgtaaacaggtagccatatgtactttttctgtgacttcaaatatttgtacagttagcccatatcttcctttcatatttatttccatagaaacaattaactgaagtgcttgttttgtgtgcctaatcagaaaaattctcccaaccttaaaggttttcttggtttcagaactttttgtcttactgaatatgggattgttccagcacagaaactgccttaattaaggccaccagtggcttccrtgctgccaactttactggaaatgtttagtggaaatgttccactagtctttctgactgctctgcagctttggtaccagtgacatctttcttccrcttgacgccctctccacttctgttgtaggacaaacttctcctcctgactcccaattctctctgacatctttgctgaatactcgtccctgtccatctcctcaattgccagagttttgttcttgggactttacttctgtaatctaaatgttctctctgagcaagaccatccacgttcataattttatatttatgcaactcccctcccccacattttatctccataactgtcttctttcctctttcatcacactacccccctgcaccattcaaatatctaattgcccattaaatatcttcacttgaaccatcttttggcatcacaaattcactatgtgttaccaataaacttaccattatacttctttcttcttattaccaatctgggtcttcttacaccatcctcccagataacaaatcagaaatctaattattatcttagaatcctttttctttttcattcagtacaccttattatgcactataacctatgtactatcccrgttaatatctcttgaatacactcttttttgcaattaatgcctttgccttacttcaagttacagtcatctttcacctagactactctaacatgctttttactgatatccctatacccatacttgtaatcctaaaaaatattttctacattgttcagtgacatcttccaaaactgcaaagtagaaagtatcatttctctgatagtagcccactagtggctccccattgcctattggatatagtctcagctcttcagtatggcatatataatttggtctctataatttttcagattcgtctcctgtaatttctcctcatatttttacctttaagtcgtgccaggataccttcctgaatactatggcatttcatgattctgcattactttctaccatcttttgactgaactttctttctctgcattgtctttctagtaaataattttcccctgatgaacttccaagcactggctaaaccttgctaaaacagcataatttcctctgtgagtcttcctttctctcccctctttgcctcttttgttccttttattttatgaatgcacttaattgtattaaaattacttttaaaaatagaatatatttcaagatttaaaaattaaaatcaaaatttacctttccatatgccttagaggtggccccattggagaccaacataggacttcttagtaagctgaacgcagccagttttccctccattcttggagtagattgttgttttttgattgtgtattggctaaataacttggtataagaagtctctatctttaaatacaagtagcatttaacaagatgaaatgctcatattatgagaggtcttaaatttggagatcaggggaactgtagatttacttttaccagctcagggatacttgagaggtaagtgctctctgagaggaaaaacaagaggagttctgtaatggctaggaaggtgaataacttgaccttgaaaatcccttcagattccagaagtctatgattctatttataacaaataactcattacctcaaggtcaaaaaattgatgttcatgaactatactgaaacaatgtgtacattcaaaacagcagcaatgttctgtatttgcagaacaaccaagagaagtgaattcagaatctccataaatttaagataagaaccagttaataatacacttgatgcttatcactggaaaagaaaattatttatgaaacagagcaaaagaaaagagtgaagataaaaatataaaatgattgtaagaaacagagagaaagaatcaaagtgaatcatattagatggacccaaccttacaaggcactaataattaattctgtggactctggtgaaaagcagtcccaggttcaaacctttgttttgtcagtcccagctgtacaatattagctatctctaaaattaggatactaatattatcccatattgtcatctggggaattcagtgtaataggttctgtagaatcctcagcagtgcctggtacatatgtgctctgtaatggcaacagctcttttattggatataggggctaggtaatttcataggtaactcttagctttacaagtctatgaatggagcctatctagccttttcagtgaaggtgaaacatcttatgaagtgatttagagaaaaggtagagagttttarttaatcaattaattatttttacggtttgggtggttgcaaataggatttcaaagagaaaattaccttacagacacacctttgtgttggagacccattctgtacgttggggatatatatcacaacttcatttgcacatttactaatctgattttttccccaagagtttctcagtgatgttttgaccagaagttttgtttatccacttttgttcaatgaagattatacagcaaacaaatggcaaaatttaaactttaaagcatccaaatattcagtcttctgcttttcatggttcattgatccatccacatgtaaggcttgtattgtgagattgacccaaaccagataaatgtgtctctgaaatcaagtctcaattcctgctagggttcaacttaatttaaattatcagagaattataattttaaaaatatggttggccaaggtgctttttaaaggctgttattaaaactaagaatatgatcatggagaggcagtgcaatatgttagtaagaacaaagaggtcagcatcagaaagactggattcaaatcctattactgtaatatgcgaactatatagtctttggcaaattatataacttttctaaagtctagttgccttgagtgtgaaatgaagatatgcgattctaccttttgggtgtgttatgtagaattaactgaaacagggcatataaagtatagtacctgacacagttaatgactgccaaacacatgccaactttcctccctccacattttccattgggtcatgtaaagagcagatgagggaaaattattattttctagtaccatagagcaagatgagggttcataatgttgaaaaagatgcagcatttctaagatagacttgatttccagtattctcttctggtatcgagccatgcagtagatgatgcaataaataatatgtccagtatggggcttgggaaagcactactgaccagtttaaatcctgtatggaatttgaattttgagtttaataaaataaaagtacaaaaaaattatggtaactatggcatgtcatagaacaattaatagtaatgatacattgatattcaaaagaagatagtaattccaaagatgagattgccaaggatagattattacagtgcacttggagtggagggagtattccatagaagcaaagagaaaagctgaaactagaatgagttttttaaggagtgagggtacaaatatatgtggtattgattttctctgttaataactcatttttattttagaaaggtaataagtgttgtaacctatttctatacatttggattatttacacagaaccttaccaaacacactattggaagtctggcaaagtcagtggatggttctactcagtcagcatgagtcatgattatctctattgctgtctaattctcaaagcttagagaagccaatagtttagcatttaggaattttccattactgacattgattcaattcatttcttggttgtagctctgaacatttattcataagcattactgaaagcttaagcagacttaaaaaaattgctaatccaatttagcattatattgaagccaaacttaaaatacggaggaaagctggtaaggaggactcaatattgaagttaggttgttgattttgtgatggacttcagagtttcagagaaactaaccaagtctcagtatgcagctacttttgaacagctttccactgactgaagaattgcagataagaatatttttggcatgtttggggagtaatggaaacctctgaatcagatgctttaaaactttgatatcacatggaacatgtaattgttccctaattacaacccctctttttatgtgatggtgtgagcctctgtaactgcaggcgaatgccgcatgactgacaccacactgcttcacccaccatgtgcacttgaaatcacgtattattgcatggtacttagggcttatgaaacactctgcttgctcttcttcttatcctgctagttgaatatctattcatccttccaacccctgttcagccatctcctttttagacctctgactcaaagagaattttatattaaggagacttctttttgcaatgttcctttaactacctactatacaaaagccatttcctttaatagtagatttgtatgttygttgattacacactaagcaacggatgtttggctatgagaatctgttttaaattatttctattgttgttgttgttgatgatgttttcatataatgttacactacttataggaagttttttgatgggcagcacttaaggctgtgagaagtggtgggagtgctaattggagccaatcaaactttaacctacctactcctacacttcagtgacaaagaggaatttcttctactttgtgacatagaaagccttgtttctgatggatttaaatgaccggggagttagccaatttggggaacagcttttctgtcactagaaattataaatgtgaacattattattaattaatctaagaaaataataattcttgtgtattttgttattgaatttgtggccaatgaactgagtctgatacacaaatcaagggaatctagtataaagctattgagtgaatagaaaattttcccctgaggtagaaaacatttctggtgaggctgagaaccattttcaaagtgattctcagttgtattgttaattttacaattctctttgctgtggtttgaatgtgtcctctccaaaattcaagtgatttcggtgtggtagtagaggtggggacttttaagaggtgattaggccaggagggctgctcccctcttaaggggattaaggccctttcaggaaaaaaaaagggcttcattttcagttagctttcctttctgccttctgcctatctgaagatgtagtaaaamggccctcactaaaccagaggctgacaccttgatattggacttcccagcttctgtaactgtgaggaaatgagtttctgttctttataaattacctagtctcaagtattctgttacagcagaacaacatggaccaagatgccattgtatttgctctcgtttatgtaaagttccagatttgaagaagtgtaatggcaaatatgaaacacgaatgtaagttttacaaaatgttttgaagcattacaagagatcactgagtctgtttttagggtcttacagtcacatatatgagaaaaaatatatttttggtataacttgactaggtttatttttatagtagtcagggtaagttacatgttctgatcttttcctcagttattgtatcctgcagaatggatttattcatgcattgaacagatacatttgtgaataaaaaattaaacagattatgatgcacacagattatgatacttgctgagggaggaaaaactgcaggtacaggtacatgaaattcaaatagagttgtcaggagagtcacatctctgaagagggacactgcaatgatatctgagcaatgagcaggatgaaaagcatttcaaacagaaggaaaagtatgtacagaaacagcaggataagagcgtgaagtgttcaaggcacaaaatgccagcacaggtagtggggaatgagccaaaggtcagggttttgagatgaagggtacaggtacacgagggccggatcaggcagaatgtggatattgtggtatgctgtactcattatgcacccaatgaaatgaataagaaagtttcatcatatatagtgataatgtatttgtctatcttccattttgatgtgtatgaccagaagcatgggtgtgggccagttttgaaaacctaaatggaaattttgagcccctttaagacaatatttctgaaagccagactttgttcacaccaaaaattatttcttaaatccctgaagctctacctgatatacatgatcaagggctgtagacttgaacattgggtctgttatagaccatggatgaaaggtaygcaggagataaattaagaaagcatttcttctgccctgatgaagtacagaaaagagaacccccaaaagaaggtgttttgtgcaaatggtcaaagtattttgacttctttcctataagctgaaatcccagaggaggagcaggtttggttgaaagtgaaaagctaaagcagagtgaattttgctgtgatttagtgagttagctatgacagagtaaaaatggtggtatggtgtggccaatcccaagtcttcctcagtgcctgtgtgggatggagtctcaggaagttctgctagccctgtgaggatgtcaaaagctagctgagatggagcagtgtatctgtcatgagcctgccatgaccacagtaggaggctgggggtcctagacagatgccaaaggtttaatagcctcaatagagatccaggtggaggatgtggatgagacttagaggatattgaagtaacaaggaaggctgagattggctcaatccatgacaaatgaccaaggttcccaaactgaggcaattgatcagagaagccctggattttagctgtagatgtgtgcagggaaccaagtgacaagacagacaagggacatagttgcagagaccagaggacataaaggagatcagggacctgcaggtttggggctgagaccacttctttcctgccacctcaaggtcagagaaaccctcttccttataaactcaggtgtctccttgaagaaaaacaatgggctggaggaaatatgaaagattacacatttaacagatattactgagtttttagaaaaagaatatgtatttatataaaaagatgatgagatagcattaatgatcactttgttcatgtattcattcacttaacaaataaccagtgagcatcttttatatactatgcacagggaatacaacagacactaatccctgcctttccagagcttagtgagggtagttcctggttgaagctataaggaaaataacaacaacaactacaacaacaacaacaacaacaacagcaaagctcaatttaaaaaaagatactttaatttattttcacatttgagtagtgtgctgtatttttaatcctacaacaatggggatgaaaagtattctggtggtatgcatgaccttgttgtggttaaggagagttaaaaatgactacagagtttattcttggttggacattaaatttaaataacttaacattttatcatagggttagtcagagaggcacagaattttagagctggaaaggatcttagaggtcatctggtccaacctcttagtttgattagtgaggaaactgacatacagggagttgaagggaaacttgccgctaaagctggggtttaaatatatgttctttgactttagtctagggatctttataatagaacagaactttcattcatatcttagcaggagataatctataagcctattcaattcaccttgatatcaagtaaaccagggccctttggaaatgtttctagggctggtgtttttgtaggtattgggaacataattggcaatgttatgacacttgagtagggtaggcggttagaagaagaatagaaactctctggagtggtaagttgtttcttctttttcccaatagaatgttaaatacagcccagaaagatcctgagtgaccccagagacagagtgcttgccaagatgacagcctactgtaaggagtaaaagcttgggctcaggaatgagacatctgagttcaaatcccagctctatcatgtatctactagcttcttagtcagttgtaaaacttgtagcaagaaatgtgttataaagaatgaacaaaatgctgagagttgtgaatgacttaccttggaaggataaatcagatttaagttatctcgaaaatgattctactgtcactcacttatatgcagtagtttttcctctagaggtaaagcggtaaagttatggttagtttatgaggaagaatttacaccctgccatttatctcatggtataattgaccaagtggtgttccactttattgatgtgatattcctagttatgacaaatgaaaattatagtagtgtttgcatttaatgcccacgttttactcttcatggttttagcaagaccttggaactttcctgggggaggatcacatgcacactttatctttcatgtatgatatgtcaaaaaagagaaaagattggcaacaactaaactggagtttaggtgtgtgaggtactctaatcatacacaaggctagctttaattttggtgaatggtagagaaggaagagtaaaagaagcagtgttgtgttttttttttttttttttttaatgtttttttttttattatactctaagttttagggtacatgtgcacattgtgcaggttagttacatatgtatacatgtgccatgctggtgcgctgcacccactaactcatcatctagcattaggtatatctcccaatgctatccctcccccctccccgaccccaccacagtccccagagtgtgatattccccttcctgtgtccatgtgatctcattgttcaattcccacctatgagtgagaatatgcggtgtttggttttttgttcttgcgatagtttactgagaatgatggtttccaatttcatccatgtccctacaaaggacatgaactcatcattttttatggctgcatagtattccatggtgtatatgtgccactttttcttaatccagtctatcattgttggacatttgtgttggttccaagtctttgctattgtgaatagtgccgcaataaacatacgtgtgcatgtgtctttatagcagcatgatttatagtcctttgggtatatacccagtaatgggatggctgggtcaaatggtatttctagttctagatccctgaggaatcaccacactgacttccacaatggttgaactagtttacagtcccaccaacagtgtaaaagtgttcctatttctccacatcctctccagcacctgttgtttcctgactttttaatgattgccattctaactggtgtgagatgatatctcatagtggttttgatttgcatttctctgatggccagtgatgatgagcatttcttcatgtgttttttggctgcataaatgtcttcttttgagaagtgtctgttcatgtccttcgcccactttttgatggggttgtttgtttttttcttgtaaatttgtttgagttcattgtagattctggatattagccctttgtcagatgagtaggttgcgaaaattttctcccatgttgtaggttgcctgttcactctgatggtagtttcttttgctgtgcagaagctcttttttaaattgagataatatcatatatgtgtcatggtaaaacctaaaatgccatctaatcctttctttcttgcagtttcgtttccctcctgcacttaacttgaagctcattaaaatatataacttgtaacactgtgtttaattaaatgttgtttaacaaaaagaacacacatgtggtctcacgtcctatttgactagacttacrtgcttaaactgagaacctgcagacccatgcattttccagtgcttgggatggcataatatcaaatgacctttttgccattgcatgctttggcacttgtgtattacaaacacagccagactataacaatgaagaaaatcaggaaaagaaaagcttaccttttctccatgatgcttaatggaaaataccatgacactcttagggtacttttggttggaaaagtcacatgggttgatctatgtgttttgtcacacaaaatgagttggttagatggaattcttggtgtgtttcagctgatttgtgttttagaaaattaacatatttattgagcaccagttaggacgatttctaacagcactgagtcgggtagggtatgtgtgtgaacgtgttagactaagtcagcctgactttgtttttccacaacaggaaaaataaaaacaccctttctgacccccctcaggaaaaaaactattcataataaattatagtctattgtatagaagacttggcctttttatttatgccatatattttagtattttgcacactacagttgtgttaatgtaaggaatatattttagtaatttaattaataatcatgaaatctttgtcttattgaatactacattaaagttgaataaggtgataaagccaacttttttccaatgttaaatttaartgttctttgagaaaaagctaataaaaacatttaagaaatatatatttttctttgtgcccagtgaatatttaatttactggtatcatctgaatgctttatagggtctcagattggttttaaatatagtgctttccataaagtgaatctaaactttctaacttaatcacagaaagaaaaaagaatataaacctaaggtaatgaagtatgttatggatttcctatgattaacaactttcagattcttcagctggtaatcaagcctttggacttcaagctatatttcatacttgcttgccgtttgaactgtaccttggctagatgtttattagtatttatgttgagttccctccattgtgttcatgtagaaattgtctcacatttccaattcaaaagaagacaaaatgaaagttaatttttaaaagttgatgggcttattattttcttgaattttccctcaggaggaagatttatgctatattaatggtaatataggtaaaccatgactacagaaattgaatgctacccacaaacgcaaaatccctcccagaagacctgtacaatgtgttatttcttatgtgctttcctaaatacaaagaaagccaaagcatatggtaataataaagcatctgcttcaaagatctgtatctaagtttgtttatacatggtcagtatatttaactgctgtatagcacacatgtgaatttatcattggtacttattgatcataaagagaacagtgacatagatgtcactacataactatgtaatatctatataaatatgttatacataatataaaatcatctttttatttatagcttccttatttatttataacagtacataataagtgtgtagtttttgaagtatcaggcatcataacttctatggcagtttctttgcaagaagcaggcgaatcagatttagaaataacatgatagtaccattaaagctggaaagaaatatagaattcaattaatattataatttcattttacaaacaagaaaatggtctcagacaggtcaagaaatttgcccacagtggcccggcatatttgcaatagaactaggactagaacccatttattttatttttagttcartgctctcataatgattacatttcctagtttggattagaacggctcgataaaatccatgattcccttataactctcttctccttccttatctctcctcagggaggaaaataaaaaggtgatctttctccctggaagtatttggagagtgccaataactacagatagtatcctcctttgtgacatttgatctttatttttatggatcattcaactaaaggcatgcacgttactcatttttccctttttattacatgtatatattaaaaacattctaatcatgctttgaaatgatttagtttattacaaatctctgacctggaatcttatgacattattgactgaataggaactttgttagtgattcagatacaggaaggtctccaaaataagttacattaaaatacgagcattccctttatctggagctagaataagagttcccgcagtgtaaatctgtcttctaaaagaaaacaatttttaatatcatttattttcagctgttcacaaattcttttataccttcttttctttccttttacttttataaatccaaatttcatcacataatatataaaccataggctcccaggcactttggaggggctttttgttaaaaaaaagcatgtggatgtgtgtgtgtgtttccatctcttttttgcaagagatgtttcctcttagttggaaaccacatttgggtacagacatctgggtataatgtcaccagtagaaattagcaatttttgtttttctaacttttgtagctctggtcagcttcgcatgggcttctatcagttgatatggcatcttcaacttcagccaagaggaggttattagattataagtgctaaaaatgatgagtcrtctccacacttcagccagcatgaatacaagcaagattgtaaaataattataatctgaagcagagccagccatgcaacccgagcctrtctttcttcattaatttgtatacagttcttattttaagagaacaaactttcagagggtactcacatggggctgctgaaccagctgtacaacttttattttgaagaaaaaaagttgagcctcagaacagtctgttttaaagacagggagggacttagcctttcggagcttgaccagcatgtggaaggagagctctcatggctgcaataacttagggagttcctacctggatgacactggggtaggaagttttctgtttgttttgttctgtttcggagggtcccgtgcacttctcttgcctggatcaacgtgactcttggtggtttttgcacaccctgctctgtgggggagtgccccaacgtgcctgtcttatgtggcctctatggacacactgctcagctggcagagaacagggaagttttctcccagcacccaaaaagagaaagaggaaactactttttctttctgggctccttgcagcacaatagatcaggataagcttccacatttcctctctggagtttctggagtggtttccaggaagaagttaaaccttcacctttaaatggatgaccatgtcacaatcaggaagaaacatctccaaagacccatctttaggtaagtaatgctacatcgcaggtggctctagggctgtcaggaacaatagtttctcccttcatccttaatttggggattctgccactaagctacagcagagcaatcaagagtgcttaaagtttaacttcaggcatactgagggagcctttttgttttctgttttctgaaactttgtgcacaaactcttatcaactcctgaaaatacattttacaaaatcttaactattcaaacacataagtgacatagtactggaaaaactttggaaacgttatgcaatctctagctgtttctgtaggctgttgcacagccctctaaataggaaacgttgtgcttagttctttcaactgattacaggcaagggcagtgtttcagtgctgtgaatactacacctttctggagtgaagtgtcgggagataaatttgaacttgatagctactttactagagtgcacattttacagctcgctcaggaatatcagaccagcagttaaagaaacaacagggtgataggaaaaattttacactgtggtggaatctgtgaccaggcaaaatgtagatacagtataatggattgagctaaagtttaattttggagggaggtacaccctttctttaagaaagcagctgtttcttcattgactctttaattctggattctttagttacctattatgtactttagaatttaaaataaaaaataatttaaaagtatctagaaattgaaccctatttttgcccctcaaaacagaagatttttaagaaagtcagttatatatcagttttgtctttccacaaaataatattctagataaagcagagatactacatgttagcaatgttaaggtcaagttgcaaccactggtttttgtctggaattaaatacaggatgataaaacgtatgagcaaaatttctctgtggtttctacataatgaatgagtagacctcgaggaatataattatataaaatgtggccatttttactgattaaacatcattactgaattattaatagcaacattatacctttgtaatgcttaaaacaagatgttagcttgaatctgttttaaagtcttcctttgaacataaattatatttaaattcatatatatggatttaatattactatccccctctacttaaatatgtttttgtgtcttatgcaatgatgttggtaaataaccaaaaatctaaaatgacccccaaaatatattcacctaccatatttcctaaaaagttcttccaattgtatgtagtatctatattctcccaagtgcaygtgcgacttcaaaaaggtatgatagttgcccagatgattctaaactcaacaccagtgaggcacaactcacagagggcacccacagcagtttggaaaggcaaggttgtgttggataaaatcagatccacctagccatcatctttattgtattacccctttggagagctgtggggattgaagcaggtggttttcaccactgatttatgccaaatcctcatttcttcctaattaattaattatatgcttaggtgctatggggaaggtggattgcaacttaactgcacttctgtgcttatttatgtaaaaaatagaactttgtggaagctgagattctttgcccagataattagaataaaatttgttaaattcaagtgatttgcttcatgatcctggtgctctcatactttcaccagggaattgttacaagtaggtctagaaatgggtctttgactgataacagattaaagctgtatgtgagagcaggatttattggtcatctggcacattgacagttggcattgcttttaccaggttatgattgtgattagggaaaagggagatggagaatatcttaaaagattcaaataactaggcttaattgcacagagaaagtttggggctgatttccataacacagacttcccgatagctagttgtacttttagggaagctggcagtgggttaagcttgcttttgatgcattgcttcttatctcatgcctcacttcgttttcttcgtcagcctcctttcttaggcaccttgttctcttaggctttccctaggctgtctggcatctcacattgagacatctttctcaagcctgacttttcagagacccatgtactagacctttccttctcagtatgtacttgtaactgcaccccacttcctaggggccttgcacactggatctcaatccacttgacaggcaaatctgtaccagtgtgttttgtgtgctagtggggccagttataagcttaatggacattttatgaaaatagtatcttggctgtttaaaagtaattcatttaaaatttcagtcattaagaaatatttggccgggtgccgtggctcatgcctgtaatcccagcactttgggaggccaaggtgagtggatcgcctgagttcaggagtttgagactaccctgggcaacatggtgaaaccctgtctctactaaaatacaaaaaattagccaggtgtggtggtgtgcacctgtagtcccagctacttgggaggctgaggcatgagaatcgcttgagctctggaggcggaggtcgcagtgagctgaaattgcgccactgcactccaggttgggctatagagtgagaccccatcaaaaaaaaaaaaaaaaaggttaatccaggatttttttttttgaaatatttggctcattgacatagtttcaaatttctatatacaggctaatttcccctataattgaagctccagctttaattctagtcacctggccttcactgattgactacaagtgtccacttctgagttcatggtgcttgagagttcagatatggggagaaaaatacttatgtgccctcacgtgacatatcattgaggatatacctagataaatgtgctacaggcaggcaatgggtgccataaaggaggtgataacatcctgggagattgaaatggaagagacagatttcaggaatgactcattctaaacacctaagtgacctgaaagatatgagagcaagagctttttttccaatttaattttcaagatttaattaaaatcagtttttcatcagyacagtcatcctaagtttcagaaagtaaaagtcatccatcaagtggaaaaagttactgagaggttttggagtagatggtgaacgttgaaattttgtagctggctacgatattaggaggcttgggaggaatcttacgtatcatttagatcctgcctctaagaatgtctggggctcctacagtaaagattccaaatcatttcctgtagttaggttatcaaatctattttttaaaaaatttccttggaaattttaggtatatattttcgtatcatgaggttatcaaatctattttttaaaaaatttccttggaaattttaggtatatattttcatatcatgtcaatgagggaaggaagaaaggctaagtttcttttatggccaaggcaggagtttatattatctcctttatggctatcatgtggaagtgtggcatcaatgagactatccagccctgagcatatgtgcatggtgagtgccttttgggcacgctgtgattctgcctgcacaggctcttccagctcagactggtgttgagaaaacacgatgctccttttcctcaggagaaatactttgagttttataattttctggaaagaaaacacaatcacaaaactatattaatatattttcaatcaataatactaaggtcctcagcatgtaacaaattactgtacatatatctttaaaatccaagatgtgaatcaacacttcatatatgagacctcacatagatacattcctttaggcttttgaaaacctttgtttctatattcccagagatctttatctctggtaattataataatttgtctctttatatgactatattcattaatttgtgtttcaatattaaatgatgtaacatattcaaatgaaggatctttatataactttagtaaaataattgttgaagacatttccaccttattgcatactcatcttgcttagtaaactttctatattcccttgtgataaatcaaccttagactatgaggccaagaaaaatctgtttcttctagtaaaattgcaccagtaaaagtatttttctgaatttcactgcctcaaaccatttaagcctgggcttttgttacaattattttctcttacttgatattttgttttatcaaattctattatatgtgcattttccccatttgtctctccaaattctttccagaagtaggcagtgaaaaaatgaatttaaaaagtaaattgaaatgattcttatatgttaaactttagtgttctttggaactgacaactttttgaagctctttcatggttcagaagtgattaggtcacttttgtggtaattttccattagaaataaaactaaaaagccacaaacaaaatcatgcaaatagttccttattaggcctgtaattgagaacaagtctgtacatccaggatcgaagacactaaaggcagccaggtttcaagactagtgaacatcatattgggatcttcacagcattcagatcacgctgtttcttctctttacgtcttctcagaagctttattttcgcaagtatctgttagcagaggagttctgagtgtgtatttggcrggcatattttcttcatttaataatggagaaagcagtgggatgaaataggaaagcctagaaaaagaaaagcacatcctaattttgtttgtggacctaatgggtatggttaatacctattgctgttagtaacttactgatttttgaaatgtattaccaagatcaaaggaaaacaaataaacacatttgagtgtaaggcagataatgtttaccatgaaagaaaatttcagacattacagtgccttgttatttttccagttgtgataaaagtagctctaatttttaagaggtcatcactaatagataaactatgatttgttatacattttaatagcaggaggtaaatttaatgccaggcatttattcctgctggtattatttcacccacagtcagcacaacttaaattatctccaataaactagcatcataattatcagcagcagtagcaagtgttgatattaacaccaagagggaaaattcatagaaaacttggtgtatttttaggcaagctatatgcatgtaatcttttggataactccatgaggcagtattaaatctacaattaataattttgggtatagagtcaggaacagggtacgattaaaatgtggggaggtgtcttccactcaggagctacacaaatgtcgttttctcagctagagcagcttgatgacatgtacatttatcttagacattggtaagatttagaaatggcttttcaaagatttggaatgatcaaaataaggaaaattaagattatgcaggtaaaacaatctactgggattgttagtgattttatgccatctggaaaattttacatttatagtagtcagactacttcacatagtgtttaggtaaaaagcaatgaaaagaagaaacagtcatactgatggatacttgtttaaaagacgacctgtaggtatgtagagatggaataaatttaaagaagtctgcagtatttttgaacctagtcttctcagttctgtgactggacataatgtagttttgacagttagttctcatgggaaagcttcagtttatttatgtatttgattacggccacttggacacaagctataattgaggaaaattcaacatttcctgagttggagctgctggaaatgtacggggcaagttccagtgcatttgaagtaatagatgataatacttccagatttattatctttgtaatatccaagccagctgcactgaagtcttacgttttgttatgtagaagcattagttctgagtcaagttggtatccacgtttagtgttttggtgtctccagcctttaggattttaggatattatttttgaagagtttttacattaaaccaaaacagatatttaaatattaattgtatatgtattaaccagctgcttataggtttgaaaagttatgtgcttttattatgaaaaccatcacttcagctttaaaatattaatacttaatttgacttttttaaggatcaaagagcctggaacaaattgattagaaaccaatggtaatgaaaaacagtagggctgtatctttgtcatataaaagtggcagttatgtcagttccaactgaggtaggaaaagaaaatccccaccaggtcaagtcacttttaagttatatcattaaattaaatttggatgaaaatagggatatgtgatgatctgggcccacctgtttgttagagatcactaacagagatgccaaagacatatctattctaatagtgatgtttctgtgaaaaaaacaaaacaaaacagaaaacagaaaaaaagagactcttgctaatttttggacccattaggcatttactgctcagtccagctgcatccaattattatttctaacagcacagtggcattttatctgcacctcttctgctgtgcatctctctcattctattatacttaagtaattaattagtattaattatattatacttctattataattattataattctattataattaattaagtaagggtatcagctcccctacgaaactataagatccctgaggctagaatcaatactgaattcatctttgtatttctcataacttttagtagaatgtattttataagtaagaattcacccaagtcttcaacttaaatacctacagggaccacactggtattgtaaatatgtgaagtaggatatggtgggaacgtagtaggtgcgaaacaaaaggcatgtagtttgacattttaaaaaacactaaaacactaaacaggatctagctgcagactgctagctggtgccccttgaaatgaatgaatgaatgatagaatgaaaagtttgttttgttaggtccacacagtcgtcttctctctattgttrgggtgaacaaatggccagtagagcttagctgaaaattctggcagttacatccaagaggtatactaggaggatgagtacttggttcttgtttctaatccttattaaagaatgagaaaatcaaattagccggatgtggtggcacacgcctgtagtcctagctactcgggaggctaaggcaggagaattgcttgaatccaggaggtgggggttgcagtgagccaagatcgtgccactgcactccagcctgggcgacagagtgagactctatctcaaaaaaaaaaaaaaaaagaaaagaaaaaaagaatgagaaaatcaatatactctacagcataactgtactgataacttgtatataattttgtagcattaaaagaatagatgaagtatataatccttgaatgaataaaatgcatttgtgttagcaccaacttgaattattccagtgtcaggaaattcattgcctataggcatttcaaatttgaacttaacttgttagaaaatactttcttaaaatgaaatctgtcttcctatcagtacaatgtttttttttttttctcttttagtggaactggaacaggaaggatttaaactttctcttgcatagtttagctctttaaacattgaagacaattgtatcagcgattgcagtttgtaaatcttcccaaagcatagtggcttaaaatgatctgcgcccgtgggtcagctgaatgtttctgctgatttgtgccaggcttggttgatatcagtgggtcttttccatgcatctgtggccagatggtgggttttctgtgggccggcttaagaggaagaggaaactcacaaactttttcaaggttgtgattaagtttgattgagttaagttgttactgtcccatttaaaaaacaataaaaaagccacgtggccaagcccagtgttggtgtgcgagggcataaccaaagggtgtagatatgaggaagcatttgcatttggatcagttaatgcgattattctgctcttaaaacgcttatgctttttttgattcttctttcccttactccatctgcagttcattccgctgttgaagaaaaagcacatagtttgatcttcatttcatgttgttaagtggtctaagtgaccagtgaggacaggaaaaaaatatatatgaatgaagcagtgtagtccagatgactctcatgtgacccaagggtcaaacatggttcacctgactccagggttatagcatgcctgagattcctggtttaagaagttttaaaaagttaaaaagtaaaaacgtttcacctaattgccctaaaacatgagctattacacccgtaatgactgcccacattttcccagttctttttcaataattgatttttaccaagtgtcatgctagccgacttaatgaaattaattattttaatagaagctgaacataattaattacataattttgggcaattccattccaaatacactaaaactatgacagggaaaggaggctttggaaatcgtaataataaaacagagcttccttatgcatttgaatctaatttgagttctagctataatgtgtattctcttgggacttaaatttattatcttaaaatttttttatgggatagatttatgataacgttttctattttgaaccctcctaaacaccactataataggtaaatatttttgtaatacctgcaaattatataacgtttattttgaaacagtgattcacaaaatgaatttttttttaaattgacattagacttgcagtttacaaaaacaaaaacaaaacacaacaaacttctgcatttgtaaccagagattttgattcgttaactctgggggtagaaaggtttgatgtattcctacaagctgtctgattcattgctagatttgggacccatttccttgatgatataatttacactaggaatggaaaggcaaaataatttgtaaaacattttgataagattaacatcataattggaaatataagctatttttttctttcatttttcatgaaaaatctctgttgggtacagtggacttctgaatatgaagaaggataaatgtctcctctaaaaaatcttcaatgcttttttaggatatagaacagagacaaactaccatgaacttcaaagcaacagttctcaatattggctgtgtcttgcactcactggggaattttaaaaaatcccaaaaattaggtggtatttcagacctactatatcaaaatctctgggtaaaacccaggaatcagtgtttttcttaaattccctaagccacacttgaaaaccacagacctaaagagaagcacacataaagtacagtgacagaagaagggaaaacacttgcaggtgaacactgaagggtgaataggattctgacaggcaactggaagaaggaargaacattagcaaagtggtataacatcagctaaggcgtgggaatctaaaagtgcataaagtgtttgggaaagtctcaggaatagggagaattcttcattggccagccaagtgctgagcatctgcatgcgaagggatgcgtggctcagtttggtttgggctagagagtccagggccatacagtgtgtgtctattgcgtgactgtgtattgtcacccatgtggcatgatgttgaaactgacaaatccaatgaactgaatcttgagctcagcatttccaaaatactgtttggtcgtaggtcaccattcccctgagatactctgaacaaaagcatcaaatgagtttgggaattacttccagtcacactaatttccctcttagagatttacaaagcatattagaagttttgtagtaaaactcgtttactctaatattttcctaaacagtctatttatgtataatgcttattaatatccccagaaagtagtgttccaaagaaacatattttagttttcctaaatttctccaaaacatgccttctttatttttctgaaattcactgtgcttcagctagtcttttctcctcctttaattatttcttttcttatttatgttttctggaagatagcctgtcctcaagaaacttctccatagttaacatttttcatctcctcttagagaagtcaggcaaaaaaatgttgcctagttgaaggaatagttaatgttttattacataactgtgatgatgtgagtttaaaaaaaggaagaagaaatattttgaaaagattgggagaggatgaacgatgtcacattattgaaacagctgagcgtaaattaagaaataacagatggaagttatgtgtggattatcacacccaggtgtcactgtacacccatttggcagcattttaacttgcctttgtgtcttttcccttgcttcatcctgaagagatttttaaaaaatcatcgccctgaaattcacacttagtgagaaatagacagttaaacatctacgaataatgccatgttgaataatgataatttgtaggtgtgtagaatcccatatttagtttatattttttaattttatacatctgttatactatttgcttgcacatttgccctgtaatgaaaccatatagctccccatttcatagatgaagaaattgaagttcagatggtcacaggaagttagagaaagagacacgggacactgacattaagaacaggcagattaagtgtggcttgccattacagatttagtttttatgacaaatatgttaggagaacttagtgtgcatgccaggccagscatatggttcttctttgaggtataacccattctcagtagccaaggaagtgatttgaatgtccttaaacattgtttttagctacttagagttatttaatacccatgatttccatgcaagtttccttttctagacatggagagagaaaaaaagttgagataagtaaattatatgttttcagtgtcatacgatttactgtgatgactgcacaaatatagatttaacatatcacatatgatacacttactagaaaatttagaacataaagaactgtctctagaagaagtaaagacaggagggaaaaaataaagttcaggcagttgctttgaaagtgtttctaaacagaagagatttgttgctatcataatataaataacattttcctagacagcagaaagatgtagatcttgaaggatatgacttctaggttgtacaagactagaactggatttcatgatttcattaatagaaatgattaaaatataatttgacagccatcctattaatctatattttcagacattgttttccatcaatttcctagtatccaaaatgctaaaaattcattgttttattttaatgtgtttgagaccattcttgggtgctatgaagcttgcatgttttgttattttaaaatattttacttattgtgattttctgaaacataccaagaatttattttctgaagagaaaacatattccacagttggctaggcaaacaacacaaagccctcagaaggctattttctctcttttaggaataaaatatttagaaagtctttattgaaggcaatatattttatgtggtacagagtggtaaagacagaattttttttaaaatgcttctatctgtagggtagaaccattatttcatgatgtttacttcaataataatctatcccaaattggtgcttacttaaaaaatggaaaatactttccgactccagtctaaggagctgaacagttgtaccaaatgaccactgagctaaacattatgtraaatttcttttcaattattctgtaccagtttttagacaaattgatgtagaatttgagctgctaaagttgaaaaattttgatccgtgtgtttaatctggataatttgttctgctttatccttcttcctgcctaccaacacatcatttcccactctctctactagctcagttggaatttagctcactcatccatttaatggaagcaatgtcaacactgagctaatgaaggaccttcgcttgaatctttttttttcttcatttagatgtctagataacaatttgatgctgccccttcccactgccctctcttttctttcatcctttctcccttgacagaaaccagaatgcctaatattttctatgtgagaacaacttgctgcatatccagaaaacaagtgtttatgccagttactatgctatcctgaggagttctacctacctctgtaaacaaacattaggacattgaaggtcaccttagatctgtgagtttatatctgagcagatagtggccttaggactcctaggtagatgttgtttctgggttttcccttaaagaatgagacccctgggggggtctggaattccacatttaagactcagactagaatgcttaggtgatatcttcataacttattgagttacttgcagatgttcattctattcattctaaaataatttcctcttatctactccatctagttacaattcagtctcttccttccattcatttrtcttcaaaatgtagaccaggaatcgtcctctgcttccatgtcttcccattaacttcttctgtcctttgtgaatacacctcttctcttaatctcaactgtcttctgttaggtgatcctcaaatttacatgtgcagatctcaactctattctgagtgccgattcacatttctttacatttcttaaacatgtccacctgatgacctcctgatacccaatactaccaatactaatctctctgaaagagatttataatgcatgtataataacaataataataagttcagaagcacatgcttatctctccaaaccttgtcccttgtaacactagtgcaccatgagatttaatagatttatcacacacacatatgtgcaccctaacataaacacacagacacacacagacacakgattacaagaggatttcccagaactttataacgtttatgttaagtgtaaatatttaaggcaaagatatgatatttagtgtttcctaaattgacagtggaactttctttgtgccaaatatctataaacatatgaaagttttcagtaaattgttgtttcagaaatattgcttagaggaacaggttagcctagctgctttgagcctctttgttgaaaactattaaggacagcataaaacacttccctgtacttttaatcctcttgtcatttagatttcaaatgtctgttatttttcatgcttctctacttcttatcattcttaacaaaacaattatcaagtcctttcatttatgtccttagaacatttctttctctactcttttctttgtgcttctccacttcaaagccctctagcctcccatttaaaatttaatgatatttaaaaattaatcttctagtcttcagcccctcttccacagttccttggttctcaagttatcagattagtctttaaactttgtcatggttatgtcactcctttcatttgtaatttgccatggccctttattttctaccaagtgaaacatggattcttctgagattgcaagcactttatacctactctccatctattccatctctttcctcctttcacaactcttatgctacggtcattctgggtgacttattgctcctaggacctgtcttacgcttcccttcctaagcctttgtctactctgctttgtctgcttttatgcttctctctcttttgtctgaactggtctctgtcctcgtccatgcttcaagtcctaattcaaatgccactgtctttatgaagggctccctgattgttccaaccaaaataagcttttattcctttgaacttgcatggcagtagtactttatttgtagctctgaatttctgagtatatttctcagtaatttgtgtcattgtttaatgcatgtcctatttccccttcttagtgtaaacttgatggctaagaccctgtcatatccatagaattagagaataatcaagttagaaaaaccttgtatctagtgtaactgtcttatttcatagataaatgaaaaactctaagacattaagtattttgactaagtcctcacagctagttagtggtagagtcaggactagaacacacatcaactctcaagcccgtgctgtttctagtctaatttatttgtgcctcttgttcttatagcccatggcagtaataaccattgagcatccactacatgccagggatcttacctacattatatctaattataacagtaatactgaagtatgggcattagtatccccatattatggataaagaaactgaatttcagtgagcttaaataactttgctgggtagaagaatttggagtcaaagcgaggtccacttgatttcagcaactatgctctagagtcagatattgaatgaataaacagaactgtctactgtttagggtgggatcttggagtagtcatttctggaaactaaaaatttggatagctgtctaagaaacaaatctcagccttcaaaatgattatatttagttgtcagggaagtgcaaattgaaaccacagtgcaatacatttatatgctttctgaaatggctaaatatagaagtcaaaaatttacctaggttggtgagagtttaaagcagaatttctcgactccaacacttaacattttggaatagataatcttttttttttttttttcgagatggagtctcactccattgcccaggctggagtgcaatggtgcggtgttggctcactgcartctctgcctcccaggttcaagcaattctcctgcctcagcctcccgagtagctgggattacaggcacatgccaccacacctggctaatttttgtatttttagtagagacggggtttcactatgttggccaggctggtcttgaactcctgacctgtgatctgctcacctcagtctcccaaagtgctgggattacaggcgtgttgttggggccattttgttcattgtaagatgttgagcaacatcactggtctctacccacaagattccagtagcatccttttagttgtaaagaccaaaagtgtccccaggcattgccaaatgttcctggacatttgtgaaattatgaccaattgagaaccattgatttagagcaattggaactctcatacatggccgatgggactgaaaggaggtacaacttgaaaaactgtttgtagtatctactaaaggtgaacataggtatatccagaaattccaagccaaacagaagtaaatacataccccaattgtcatcaaagacctgtacaagcatgttcttagaggcactattcataataacctcaaacaaaaataccacccaaatgttcatcaacagtagaataggtaagtaaattgtgtggaatgctatacagcagtgagaaaagaggaaccaaaaatacatgcaacagtgtgtgcaaatatcgcaaacacaattttgaatggaaggaggcagacaaaaaatatattgtgtgattccatttttttaggtttcagcaacagacaacactaatatagtaaaaagtgaaagatttatataagctgaagaaaaaacagagtatgcaacactaatgtaggacagtggttatccttggaaccacttaaagtgaacatgaaagggtcttctagggtgttggcaacgaacattctgtttctttgatctggcttctacttacatggatgtgtttcatttatgaaaattattatttgtgtagttttcagtatgaatgttacaccttagtaaaaagttagggaaaaaactgtagcagattctatttgggagaagacacaaacttcccaaattaaccaattacaaatgaagctccagggaaaacctgatggtgatattagagtgacattgaggagacactgtgtaaatggccttagtgtggcatggataggcacaaagggaatggatggtacttcttttctgtgtcttgtcagtggaaatctgtcaaaaaataacaactgtgaagaacaattaaagcttgatgggaagacattaatttttcagtcctttatgtttacccagatatcttccaagttttattattctacattgctaatgaaagtaattatattatcttgatgaggttgagtttgagacagaaattctttgcacagaatgacactgatcatgtgagcccagctgtatttttcttaacacagccatttattaattgtactacaattcttatatgtacattagagagactctcacattaaatatttagattgcttattattgttatagttggaaagaattcataaaatatgcatatttactttaaaataagccacactctgataaatgtttattcatagtttcaaactgtaggtacattttctttcatttatttatttatttattttaagacaaagtcttattctgttacccaggctggggtgcagcagcatggtcatgactcattacaaccttgacttcctaggctaaagtgatcctcgtgcctcagcctctcaagtagctgggactgcaggtgtgcaccaccatgcctagctaattaaaaaaaaaatttttcttttttaaattgtagaaacagggtcccactatgttgcccaaactgttcttgaactcctgggcttaagtgatcctctcgccttagcctcccaaagtgctgggattacaagcataagccaccatgtctggcctgtggatgcattttaaaacggtaaattaactgaactgtttattatacaattttttgaaaattttttgtacgtttatttccaaaaagtatgcatttatctgaagatggaaaaaagcagtaaaacacatttgattttgagttctttatattaaaattattatccttactattgattatgacttggctatataaactatgtgatataaatgtctttatcatgaaagaagaaacatcacatttaatttatattaatattttttactaatagaccatatggtacatataattgtaatgttcctgaccactgcacttgaatgagatcaatgagactggaggttcatctataaaaagacattttggcttcccttatgcctatggtatacccagtgaccctcccattcattcaattgctatgaatggaagagtaagcaaacaggcacccacaggcccatcaggaagtaagaatgtggttatttcatagcacctgtaacttgtttgaaggctttttcatggtttttagctatgcatttacttttacaatctgcttagtgtctgccctctccactagaatgtatgttgtgtattcacagaatggagactgggtttgtacatatcgtatctccaatactttgcacagtacctcctacctaataggtgctagataaatatttgttgaataacaaataacattaaatttcctttaaaggcttgggccttatttaattggttatctaattaagtttgtatccaatatttgagattaatcattgaagtcattattctgttcaggtagaaatttctagcaggctattcacagtctaggagtggaactgaagtgagagttaggagacactgagaaaggtgctaatcgacgtggaaaaaggattcgattttaaggaaaagcatgtaaaaggagaagggaggaggattgaaaaatgaatcaagggaaatgcccagcattattaggggagagaggaattacagaagaatgaagaaagaatggagagtttcggagcaggaagtgaccaataatgaagctggagcccaaggagctactgtggaggcagaagacctgtggctctgggcagcctgactgagtccctgctcagccactagctggtagaacaaatcacttcaccataccgataatcagttttctctctgcaaggtgagtggattggcttctagctgatcccccagtttccttctagtggattttgcagttcccgaattttgtgaaaagtttctgtgagagtgagcaaaggccatggtgttgatgttttttgttggtaacatttaagccccacctttaaaagaatggaagaaaatgagcagtttatgaacactgggtagtgatagagagagcagtaggtgtagatcatttatttaaacagtttatgagaagctaagttggtggtgcagaagacactgcacgctaatttaacacgatcttttagggaaaaaattaacgtcttcatttagtccaccctttatcacaggtaattactgcccaaagaccctgaaatagttaagggtctgtagcaggtgataggtcagggccatggctaagggataatcatgatagttaccatttaataagcacttgatatgtgaaggtgcttttcatttgttatttatgaaatgtatgtcattctagtaagtattgttcacatttgagaaattaaaagtgaagctctgaggtgttagctaacttttttaaggtaatacagctagaaagtagcagagccaagattgaaaaccacatctgtcaaactgcaaaatccatgggtagtccaggtatgtcatttccaaatagcttggagtaatagtgtgggaaaataaaaggtgggagrgatttaggtagccactgcttttttttttttttttttggcagatacttttaaaaaataattttgcataaattgattgactaaactccagtgacttacaccagtgattagctatgtgtggggcagtggggtaagatctccctggtctcctttttattatcatcacatgccagcaattctaaacaacatcagcaataaaatactcctcaaaagttctgtgtttgtctaactcctaaagaattgctgtgratgctgttgagtttaaattatctacttatctatattcatatagaatatgtatggatatatagtatacacacacatatataacatatacatacatgtacatatgacttattctttaagaaacattgtattcttcatgggagaaactttcagggcgtttccaattattggctagtctcccaacatgtgaagacttagctacatacatttgcttcaagagtaagtggttggtcaagttctgttttttggtcactgtggtagcatttgttacaaatatgctacgtaaagtatgttggccgggcacggtggctcacatctgtaatcccagcactgtgggaggcccaggctgtggatcacttgaggccaggggtttgagagcagcctggccaacatggtgaaaccctgtctctactaaaaacacaaaaattagccaggtgtgatggcgggaacctgtagtcccagctactccagagactgaggcaagagaatcacttggacctgggagacagaggttgcagtgagctgagatggcaccattgtactccagcctgggcaatagagcaagactccatctcaaaaaataaaaaaaaaataataataaagtatgttgaaggaaagaatgcaaaaactgtacttaaactcaaattatcctgaacaattataaactttggaaatgtttaccaagtataatacacatgtatgctgacttttttgatgaagattttttagtagcatttttttcttatgacagagacatttgaaagctgttagaatcaatctgcagaaacaaagacatgaacagcatttaattatgaaatgggatttcataaatctctgccaaacttatatttaagacgtttcctatccacttttatatctgttgcttcatgtgaagaaaacattttgaaagtaaattgattaaaacaaactctttgaagtactctcggggaaaatagattgataaatctcgctatactctctactgaacatgaatatttaaagaagatcaatttagacaacatcattgaaaaatatgcaggatttacaattaaaaacaaactgagatagtattgattactgtgacagagcaacaagaaggtataccttttcacttttgtataaataaaataatttattaatataattttaaaaatcaatgcatttttttcatttcttgtaatatctgtagttttaaaaaattatttgttttttcaaactggtataccagcacaatttcaactaaagaaaatatttactgcctgcatttcttttctagctgttattattatctcatttcatgattatttctgataataattttttatacataaaaaaggaatgttaaaaaatgatctactccaatatccaacatgctaactatgccagtagctaaaactaagggttatttctgtaaatcttcttggatgattgtgggaaatagcttcttatttctttgtgtccaccagagttctgagcacagcagttgataatttatacttgctgaatgaaagaacagatgacaaatgaataataagcaaacgcctaaaatgtgtcatgcttggtctgctagtattactggaaatctacatttttttttttttactgtgagccaaaaaacctaaaaataaattgactgctaatcagatccacaaaactactctgttaggtttatgctaaagatgagaatgactaaataaatatagtaaatttcagaattcttaagccttggtcccctaaatataatctgtaaaaatggcttgtaattttaggccttgtttgaacttttatttcatctgtaaaatgggaataataataatagagctatatacagttgaagtgagaataaaatgaagtactatatagaaagtgcttaacagcatgctcaaaatattctaagcatttgataaatgatagctattattatcaaataggaaatttatttttttttggtaaaatttctttgacctaagatggatccataaagctttcaaattgaggagaaaatacttgtagagcaatatgttattctttttattagtaatattttattttaaaaattatttttacttttagttgacaaatgataattgcatatatttatgggtacaatgtgatgttatgatatatgtacataatgtggaatgatcaaatttatctcattaagatatccatcacctcaaatacttatttttttggggtgagactatttgaactttactctcagaaattttgaaatacaccttattaactacagttactatgctatgcagaaggtcttaaaaaatgtattccttttgtctaactcaaactttgtaccctttgaccgacatttttccagcagcccccttcacccaatattttattcttaaaatttttagggcacaaggatttggtgagtgtagtttttgacagaattaagtgaaagccagaaatgatgaaaattgaaggaataaaaaccacagtagataaaaggagcaaaatatcctatgagatgcatatttgtagtttcctgcaagtgaagtttatgtcaggaccgcttgataaaatcctattcagaacttagcattgtgaactacacttcactgaccctgggggccccatgcagtattagatggcaataagcctccttgcaatagcagctgtgtcttcttgttcttcttatgtaaatgaccccagagaaagtagaagagtgacaataaatttaaatctttgatttcctttgtattcctcatgttatcctagggaagggctttgccactgagtcatatatgtacggtcatgtgctatataacatttcagtcaacaatggacagcatatacaatgatagtgatcccataatattaaaatggaactgaaaaatcctattgcttagtgacatggtagccatcatatgtgatagcacaatgcattactcacatgtttgtggtgatgctgatgtaaacaaacctactgcactgccagttgtataaaagtagagcacatataattatgtacagtacataatacttgaaaataaataactatgttactggtatatgtactgttatgctatactttttattgttattttatagagtattccttctacttatatttttaataagttaactgtaaaacagcctcatggagatccttcaggaggtatttcaaaagaatgcattgttaacaaaggagatgacagctccatgcgtggtattgcccccaaaaaacttccatggggacaagatatggaggaggaagacagtgatattatcctgaccttgtgtggccctagggtaatgtgtgtgtttgtatcttagtttttacacaaaatatttaaaaagtaaaaaaaaaatacaagttttaaaaatacagaacatctgatagaataaggacataaagaaagaaaatatttttgtacaacagtacaatgtgtttgtgccaagtattactacaaaagagtcgaaatgttttttaatttaaaagtttgtaaaatgaaacagttacagtaagaaaaagttaatttgtttattgaagaaagaaacatttaaaaaacaaatttagtgtagcctaagtgtacagggtttataaagtgtccagtagtgtacagtaatgtcttctgttctcctttttgatgtagaagggtcgtcctgggatatcattttgagagccaaagaatgagtcatctctcttagaagttggcctatggaatataaagaatttcatccatttcctatagtgatttcacctttgctcttctctgctccttggctaattggcagaggatatccaagagagaaaaaggcagagtcgtcaggtttgagacttggatgaattttcagcctatttgaagcatagaatttcttcatggcttatttcatatttaccaggaccatttccaaagcatatttttcctcttgtaggatatgactttttttaaaaaaaaaatttgttcctattgacataagttataccccaaattaaactgaccttttattttattttattttttattatactttaagttctggggtacatgtgcagaatgtgcaggtttgttacgtaggtatacacgtgccatagtggtttgctgcacccatcaacccatgatctacattaggtatttatcctaatgctatcccttgcctagccccccaccccctgacaggacccagtgtgtgatgttcccctgcctgtttccatgtgttctcctattcaactcccatttatgagtgagaacatgcagtatatggttttctgttcttgtgttagtttgctgagaatgagggtttccaggttcacccatgtccctgcaaaggacatgaactcatcccttttatggctgcatagtattccatggtgtatatgtgccacattttcttttttttttttttttgagacggagtctggctctgtcgcccaggctggagtgcagtggcgcgatctcggctcactgcaagctccgcctcccgggttcccaccattctcctgcctcagcctcccgagtagctgggactacaggcgcccgccaccacgcacggctaattttttgtatttttagtagagacggggtttcaccgtgttagccaggatggtctcgatctcctgaccttgtgatccacccgcctcggcctcctaaagtgctgggattacaggcttgagccaccgcgcctggcctatgtgccacattttcttgatccagtctatcgttgatgggaatttgggtggttccaagtctttgtgattgtaaacagtgccgcaataaatatatgtgtgcatgtgtctttgtactagaatgatttatagtcctttgggtatatacccagtaatgggattgctgggtcaaatggtatttctggttctagattcttgaggaatcatcacactgtcttccacaatggttgaactaatttacactcccatcaacactgtaaaagcattcctatttctccatatcctctccagcatctgttgtttcctgactttttaatggtcgccattctaactggcgtgagatggtatctcattgtggctttgatttgcatttctctaatgaccagtgatgatcaacttttttcatgtttgttggcaacataaatgtcttcttttgagatgtgtctgttcatatccttcacccactttttgatggcgttgtttgttttttcttataaatttgtttaagtttttgtagattctggatattagccctttgtcagatggatagattgcaagaattttctcccattctgtaggttgcctgttcactctgatgatagtttcttttgctgtgcagaagctctttagtttaattagatctcatttgtcaattttggcttttgttgccattgcttttggtgttttagtcatgaaggctttgcccatgtctatgtcctgaatggtattgcctaggttttcttccagggtttgtatggtttggggctttacatttaagtctttaatcttaatcttgagttgatttctgtataaggtataaggaaggggtccagtttcagttttctacatatggctagccagttttcccaataccatttattaaacagggaatcatttccccattgcttgtttttgtcaggtttgtcaaagatcagatggttgtagatttgtggtgttatttctgaggcctctgttctgttccattggtctataaatctgttttggtaccagtacaaggctgttttggttactgtagccttgtagtatagtttgaagtcaggtagcataatgcctccagctttkttctttttgcttagtattgtctttgctatgcgggctgttttttgggtccatatgaaatttaaagtattttttttctaactctctgaagaaagtcagtggtagcttgatggggatagcattgaatctataaattactttgggcagtatggctattttcacaatattgattctttctattcatgagcatggaatgtttatccatttgtttgtgtcttctcatatttttttgaacggtggtttgtagctctccttgagaggtccttctcatcccttgtaagttgtatttctaggtattttattttctttgtagtaattgtgaatggmagttcactcatgatttggctctctgtttgtctgttattggtgtataggaatgcttgtgatttttgtacattgattttgtattctgagactgctgaagttgcttatcagcttaaggagattttgagctgagacagtgaggttttctaaatatacagtcatgtcatctgcaaacagagacaatttgtcttcctctcttcctatttgaataccctttatttctttcttttgcctgattgccctggccagaactttcaacactatgttgaacaggagtggtgagaaagggcatccttgcttgtcttgtgccggttttcagagagaatgcttccagcttttgcccattctgtatgatattggctgtgtgtttttcataaatagctcttaatgttttgagatacttcccatcagtacctagtttattgagagttkttagaatgaagggctactgaattttattgaaggccttttctgcatctattgagataatcatatgttttttgtcattggttctgtttatgtgatggattacgtttattgatttgcatatgttgacccagccttgcatcccagggatgaagccaacttgatcgtgttggataagctttttgacgtctgctggattcggtttgccagtattttattgaggattttcgcatcgatgtttatcagggatattggcaaaaattttctttttgtgtcgtgtccctcctgggttttggtatcaggatgatgctggcatcataaaatgagttagagaagagtccctctttttctattgtttggaatagtttcagaaggaatggtactagctcctctttatacttctgatagaattcagctgtgaatcctttattttcttaagtggaggaagcctcagagggtatacaggttttttactgaatcagaacttttatgaaacagaactagggacttacaaaaaagagaacaccaatggaataataaaaactcctctctgataggaatcattaatgtttggtaactggacttgaagatgagaaatgctctgacattttggcaaaggtggtttctctactaaactttatgaaagaaatctctgtgacgagtttagagcaggaaatcaagatagtacctgccattattcaccccagcaagtggtccttctcttgccctaccctgctttggccttgatttcctaatatttttcccagtctctccttcctcttactgtattaaactcaaaagacatcattccgctttctcttcatgcctttagagagtggctcctttgaatgaaaatgcagttatgcttgatcccttagttacttagttggaaaactcccctgagagtgctcctgagagtcctctggagggctaattagggttgcagcatctaaggagatgttgagagtctcctttgggtaaagatgtaaggagggaagagaaaacaaacacatgtgttctgaaagctctttctggggccatatacgaaggcacattatcttggagaattatccataaaggatttgtcttgaaattattgtaatgtaaatggagcaactgtttcttattttacagaagtgtattctaatatgtgaaagtgtcttgccaccatgtcagaaaggttgctaacttgagacaacaattgggaaaagataaaggaaaattttaattcagtttgctcaggatctgctctgtgtcaagtacatggaaccttcttttatcatgggaaaaggaaaaataacccaatagacatttgttcagtgatattggcaaagaatttagggaagaaaaaaatcaaatagccaataaatatgtaaaaatcttaatcttcaatagtagccagtgggaggcaaattaaaacaatatttcatttaaagactgatagcattcattgtgggcaaaggaaagagtgtgaatttttactatctcttgaggaaataaccttataatatttattaaaattataaatacatagctttagactagcaatcctgttttagaagtctttcatgcaggaataaaaacatcagtatctaggaccatctcttgatttcagcattgtttgtaactgcctaaattagaaacaatcttaatgattgccattacaggagactgactaaattgattatagtataatcaaaccatggaacataggcagctattaggaggagtgaaatagagttctacattaatgtggaaatactccccaaatatgttagtattgaaaaagtgagatgtaaactctatactagaatggtttcacttaaaaaaataggagtgagactctgtaagtttagatacatttgtaaatacttgtataagttgaacattgagaaaattgtaaaaggatacatatactattacaattgataagcttagagggatgatattggtaaaaggaatgagaagactcatttttaaacttacatactaatgtataccattttaaaaccttttacaataagcatgtattaatttcatgatgtagaatgtattaaattgagagcatatcaggagtttccggggattagaagcagagggggcaggatttaactaaaaggggtcacataagggaatagttttggctgatggaactgttctgtattctattttgatggtgagtaatgacacattaatctatgcatgtgtcaaaattcatagaattttataccaaaaaagtgcattattttgtagcatataaatttaaaataaactatattagtgaagaaaaaaatatgggttaaaaatactaagaaatgagtaataaacatagtcctccaaaatattctaattataggctaaactgagacaaaaaaaattttaaagagaaaactggccgtaattttgaaaactttagggttatttttcagtttcagcccacttcatccttgacggtcatcaaaatgtcatttagtaggatagttcaataggtattattattaatcctgctttatagttaacaaactgaagtttaggggaatttggtagtttaccaagaactacataggtaaaagaacttcatgttgaaattcaaacccatgtaacaaacttgcacattctccacatgtattctggaacttaaagtaaaataaattttaaaaaagaaatttaagatttctaaaagtaaagtatctacaggattcaagccatttgtatgaattaattataagaaggcaaaaatgaaaaaactagtaagatttaagatagcggtatgctcctacactttaagtgtaatcaaacagacctaatatataagtagtcacttgtggtcggtactgatccaagcacctctgaaggctcagtggacttagtgttgtgtaattatcacagtcatctctgtttataattcaattgaggatgctgaaaataaggtcatatattttataaggaatcttaattcaactgtgcaaaagaacatgacctatactcttgtaaaatagcttttaatgaaatactagaggataaagagtcaatggtaaatgatttaatgagtcatcaaagtacaaaaagtataatgaatttaaaatatatttagtaaccctatattcacatctatgacaatgttgaactgtgggtttttcatgtcagtaggagtcaagtggcataagagatcagtagttgtatatttaacgttgacagtttgcgttgtaattcatggatatggctatttccagtatgaatattaaatatctgtctgcctcttaagtgatcataattcaagactgtacattttaaacaaaaactgttttacaagagtagaataagaatttcctcactgacttcacccaactcaagctttttttttatttcttacattttctctctttttgtcatttttttcagtgtccagtgatgtctttcatttcttgcctcatctatctaaaccatgttcatctgttctcagcacagttgaaataccatgtctctcatgtaaacatctttagaaagaattctttttattttctgaaatattactgtacatagaatagaatagtcttagttttatgcaagttaatttcatctccccaaataaattgtaagtgcggagactgttacaagctccttttacatttttctagcatccgttcattcaatcaggtagatagtgatcatttttctatatgaagccccatgctacctggtgaaggagacacacagatgaccaaaaactgatccctgatcttaaagagtttatacagtaaaagagataagaagctgtacatgtgactccagtactaaacattatgtgacatagcgtaataggaaaaaaactgaaaagacaccgttgtattgctgaaacaggtagaggacatttcttctaatgggtctttgaaatactcagtgaaactatcctccttatcggttttcttatcgcagaattttttctcatgtctgacattaacactaataattcttaaaatcatatataactttttttcagggaaagcgttaattgaaaaataccatttttaaattctgatttacacatttttttccacattgtaatgtctctgaaatcatgtgtcatatraatggtgttttacaatcacttttggggatatggcaatcatgacatacaggattaaacaatatgaaattgccaatattgaactgttttcgacctacaagaacagaaatatataataatagccagcccatttgtaaattttgttatttctgttcatcttgccatcacctcaaatatgttaggttcattattgttactacatattttgagtttgctgcctctcaaaatgtcctaaaaatatactgtatgtatcgttgaaatgaaaggtaatagtgcatgcagaaaggcatgggaacagagaagtgaggcctatatttgacattgtaatgagtatttcctatgagataaatgacctcaattatctatttcttgcacaaccataaccaagtcttgaagaagmcttaaaagggaaatacccacaggtagataaatttgtgctatgttgtttcttagatgcatgaaaaaaacactgcttttcacttcccagtcaatacaaccagaggtaaaagcagttgccaaatcacccggaagtgaatgaatacactcagtattaactatcataagtccaccccttgtcaacttaaacccatatacatctcctgaaatcatacataatcttcaaataaagacaataataaggtcataattatgcctaacataatacagctatccttcatacaaccgggagcatactaatccttaacctaaatgctattacataaagataacaacacttaaataatgacatgaagtcaataaatcttatgttacttgataaaggaaaaagaaaggaaataaaatgaagatattttcttagtacaagtgtatatatgcatgaacatgttcttagcaaaataaggaggaaatactcatgacaattacagttctcatttctgcaactggtcatgtagtcgtagctggtattaatgactaccttcttctactacccatctgtattctaattttccaatcatgcttcttccaagtccctggccacccagccaaaccattggctgtagcccatgaaatagtatataattgcacatctggccatttctccttccaagcaaagtgcacaaccaggtgcactgctcgaagttctgcccactgggaagatttcccttcaccactgtccttcagggatgtcctaggaaaggactgtagtgctgcagctgtcctcttttgggtggtgcctgcacgtcatgcagaactatctgtgaaccaggccttagtcttctcttcctctgtcagctccacatgaggccatcggggcagtctaagggagagaaggcagggtggcaagagtggagaccatgggcatttgagccacttcctcacgtaacttacttgtgccttcaggacctgctcaagcctgatcgcrtatataccacttccatttgatgactgaatgctgctgtgcatgacccactttatggctagatgggtaagaaagcaccaagttcatgataggaagttcaggtctcatggtgacttgatgaccactagtcaaaagttcagtttctaccaaagcctaataacaggccaagagctgtctctyaaaaggagagtagttatctggagaagatggcagggccttgctcccaaatcctagaggcctctgctgtgattcacctatgggggccttccaaaggctccaaacagcatccctatctgccactgacacctcaagcaccattggatctgctggatcatatggcccaagtggcagagcagcttgcacagcagcctggctctggacctcactcaaaattggcacacttcaggtcgctcagtaaatgggctggcataacacacccaaatgaggaatgtgttgcctcccaaatccagatagttgtaggaggggccaaatgcagcaacttatctttcaccttagaaggaatatctcaacgtgccccacaccactggacccctagaaacttccctgaggtagaaggtccctgaattttagttagatttatttcctgtcctctggcacacaaatgtctcaccaataagtccagtgtttgctacttattgctcactggatccaatcagcatactgtcatcgatataatggatcaatgcgatatcttgtgaaaaggaaaagcaatcaagggctctgcaaacaagattatgacacaaagccggagagttgacatacccctgaggtaggaaagtaaaggtatactgctggtcttgccagctggaggcaaattgcttctagcagcctttatgaacaggaatggagaaaaaggcatttgccagatcaatggctgcatagcaggtaccaggaaatatgttaatttgttcaagcagtgaaaccacatctggtacagcagctacagctggagtcactacttggttaagctcatgataacccatggtcattctcagagatccatctgtcttctgcacaacgaaccaggagacttgaatatggatgttatggaaatcaccacccctgcgtctttcaagtccttgatggtggcactaatctctgcagccactccagggatgtgatattgtttttgatttactgtttttctaggtggaggcagctctaaaggcttccatttggcttttccatcatagtagccctcaccctacaagtcagggagccaatgtggggatttagccagcagctaagtatgtctatgccaattatgcattctggctctggggaaatgactgcaagatgagtccaggaatgcattggatacactgtaactcagacctgaactaacaatccattaattacctgacattcacaaaccctactttaactggaggaccaatattgatgttttgggtcccctggaatcaatgtcagctcagagccagtgtccagcagcccctcaaaggtctggtcattcccctttccccagtgcagttaccctgtggtctggtttggctgtgtccccttccaaatctcatcttgaattgtagctcccataatccccacatgtcatgggagggacttggtgggaggtaattgaatcatgggggtgggaatttcccatgctgttttggtgatagtgaataagtctaatgaaatctgatgattttataaagggtagttcccctgcatgctctctgttggctgccaccatgtaagacatgcctttacttctccttcaactcctgccgtgattgtgaggccccccgcaacctaacagttaatgtggaactgtgagtccattaaacctctttttctttataaattatccagttttggggtatatctttattagcagcgtgagaatggactgatacagtgaattggcaccaatagattggggttctgctctaaaaatgcatgaaaatgaggaagcaactttggaactgggtaacaggcagaggttggaaaagtttggaggactcagaagaagaactggaaaatatgggaaatttggaacttcctggagacttggagagctcagaagacagtaagatgtgggaaagtgtggaacttcctagagacttgttgaatggctttaaccaaaatgctgataatgatatggacaatgaagtccaggctgaggtggtctcagatggagatgagaaacttgttgggaaatggagcaaaggtgactcttatgttttagcaaagagactgatggcattttgcccctgccctggagatctgtggaattttgaacttaagagatatgagctagagtatctggtggaaaaaatttctaagcagcaatgtgttcaaagaaatggcttgggtgctcttaaaagcattcagttttttattcacaaaaatatggtttggaatcataacatgtttacaagggaagcagagcatagagtttgaaaaatttgcagtctgatgcaataggaaagaaaaacccatcttctgaggaaaaattcaagctggctgcaaaaatttgcataagcaatgaggagccaaatgttaatcaccaaggcagtggggaaaatgtttccaggcatgtcagagaccttcacagcagtgcccccatcacaggcctagaggcctagtaggaaaaaaaaaaaaaggttctgtgggtagggtccagatcttgctgctgtgtgcagtctagggacttggtgccctgcatcccagctgtggctaaaaggggccaacgtacagctcaggccattgcttcagagggtgcaagccccaaaccttggtggcttacacatggtgttgggcgtgtggctgcacagaagtcaagaattgaagtttgggaacctctgcctagatttcagaggatgtatggaaatgcttggatgtccaggcagaggtgtgctgcaggggcagagtccttatggagaacctctgcaagggcagtgcagaagggaaatgttgggtgggagcccccacacagaatcctactggggcactgcctagtggagctgtgagaagaaggctactgttctccagaccccagaatggtagatccacaaacagcttacactgtgtatctggaaaagccacagacacaacacyagctcaggaaagcagccaggagggaggctgtaccctgcaaagccacaggggcagagatgcccaagaccatgggaacccaccccttgcatcagcgtgagctggattgagaaatggagtcaaaggagatcactttggagctttaagatttgactgccccactggatttcaaacttgcatggggcctgtggccccttcattttggccaatttctcccatttggtataggtgtatttacccaatgcctgtgccctcattatatctrggaagtaactaccttgcctttgatttcacagtctcataggcagaagggacttgccttgttacagatgagactttggactgtggacttttgcgttaatgctgaaatragttaaaaccttgggggactgttgggaaggcatgattggtttggaaatgtgaggacatgagatttgggaggagtcaggggcagaatgatgtgatttggctgtgtccccaccaacatctcatcttgaatattagctcccaaaattcccaagtgttgtgggagggacgtggtgggaggtaattgaatcatggggttggatttttcacgtgctgttcttgtgataatgaataagtctcatgagatctgatggttttatagagggtagttcccctgcacatgctgtctctcttgcctggcaccatgtaagaggtgcctttgttcctcctttgccttctgccatgattgtgagaccacttcagccatatggtactgtgagtccattaaacctcttttttctttataaattgcccagtcttgggcatggctttattagcagcataagaatggactgatacaccctagtaaaaggctggatgtctccctggggaaggatgggagagagattaacagtataaattgtcagtagtgttgtggggttcttcctcaacgggacctgacctctccttcattaaaggggttctggctctgttaactggttcaagtctgaaaactgattgaggggtcatgattccctatttttataattaaaattagttttttgtccattcagcctggaagttttctgcatgtacaaattatgtaagaatacagcaggcctcckatcaatttcacttccaggaatactgtgattaattagccaatgccagagctctacatgaatcagactattctgattgcttctttgcctctgctgttcattatggtaactacacccaccttgcctttgactgttgcgtgcctccagttggcccctgccacctcaggatccaattattcccattgtgtttaagttttccagttgagtgattgtggttcccactgtaagatgtggcatatagagaagagcaatgacagagctcttcaaggatgtaggtgctcccctcacaaatctgttttgcaaggtattggtgaagggtatgtcttctggaccctctcagctgggatgagtaggtctaaagtgactaatccactctagcctttcaatctccctaagcctttggatccctttctctacattaaaccaagggagatcaggcatttccagctcactcacagtggggcatctttggtccatgtttcagttaaccaagcaaataaactattagaacgttttttaactcccagagctggcaacattaaatgcagatatgggccctctaaggagggccttctaaggagggcccatatcaatataactcccagagctgcaacgttaaatgcggatatgggccctccttagatggcccatatctttcaggccatatcarcctgaaccaactttatattctttccaccattatctcacacccttaatatccattttcagagccgttctccagatttctgcttatattagaaaactcaagcagttcttttggaattttgtgcacctcctgtgagacacactctgaacctcacctctaggggtctgctggcccttgattctagttgtaggtctagaagcaaacagggctgttgtggtgggtcctgaggagaatcagcattgtctggcatggcaactgcctcaggggaggccatcactgttgcctcaggcagtgcatggttgttctcctcagagaaaggtgagaaggctgatggtagtgtggttgtgggtagggatgttgtcactactgggcacagtggctccagcctcatcagggtcttcccacacatccccattccaagttgcagggacccattcttttccaatcaatgccctcactttaacagtagacacctggtgaggctgagtgtgcaccttttgttgcagctcagccactcacacgataagggcttgtgtctgattttccacaatgtcagccctttgtctgtaggaggtaagactcactcaggtcagtcttagaagttttgaggctcagtatatgcttctggagccaggaattagaatctctgaggtcattgttttctttcgtcactttatccagtgaacttaggagcaaccaacttcattatattccttggttctccacatatggttgaaggtattatgtatagagtcactaaactccttgcccctcaaaagtgatgattcagaagtatcaaatgcatttattttgtataactctctaaacagttcatgccaaagactatcagtgttctccatactgttagaagtagagtccttagtattttggggtttaatcagattaagaagccaactccagaaaccccaaaaccaactaaagaaatccatccttaaattcagttcctctagaaccactcctggtaccaaaatctgtgttagtctagattctctagagggacagaactagtgggatagatgtatatatgatgaggagtttattaaggagtaccgactcacatgatcacaaggtgaaatcatacaataggccctctgcaagctcaggagcaagaaagccagtctgaatcccaaaacctcaaaggtagggaagctgacagatcagccttcagtctgtggctgatggcccaagagcccctcgcaaaccgcccgtgtaagtccaagcgtccaaaagctgaagaacttggagtccgatattcaagggcaggaagcatccagcacagaagaaagataaaggctggaaaactcagcaagtctgctctttccaccttcttttgcctgccttattctgtctgcactgacagctgataagatggtgctcacccagattgagggtgagtctacctctcccaawccaccgactggaatgttaatctcctttggcaacaccctcacagacacacccaggaacaatactttggatccttcaatccaatgaagttgacactattaaccatcacactgtcttttgtctttttgatagtagctcttctaacagctgtgaggtgttatttcattttatttgcttttatttggttttattttatttattgcatgttatttggttttaatttgcatttccctgatgattactgatattaagtatttttttaatatatcacttataagtcttctttgagaaatgtatattcatgccctttgtccattttttaattgggttatttgtattcttgctatggtttgtatacctcrtatattttgaatatatacacaacctcatatattcaaaacacccttttcagatatatagtttgcaagtattttctctcattctataggttgtctgttcactctgttgatagtttcctgactttgctttgtttcctaatcttaaaaatatctgtataaagcactcatttttctttagttaataatgtaaaaaagactgcattgacacagttaaattctcaagattctcagttctttagggatggacttaatggttggtatcattacttacaaaagtatcttgaacttgattgaacttattttgagaactaaagtttataatttttatttttatcttttaacttcatttttccatgaatcttttgaagtcctcttttacaattgttcatagtagtctctcatgatgcattgtatgtctgctttatcagttgtaatgtctcatttaaaagtttttatttgagttttctctctttttttcttagtctagctataggtttgttgatattaatcatcatttcaggaaatcaactcttaattttgttaacttttctattttttctggtctttatttcatttttgttctgatctatattacttccttccatatactttaagcttaatttgttcttgctttcctcctttcttgaggtgcagtgctagattgtttgagatgtttctttttttgatgtgggtatttattgctgtacactttcctcttataactgcttttgctatatcccataggtatgttgtgtttttattttcatttgtcttaaaatatttttaaatttttctttaaatttcttcattgatcattggctgtttaggtgcatattaatttccatgtatttatgaatcttctgaaagtcttgctgttattaatttctagttttataccattgtggtcagaaaagatagttcataaaattttaattttcttaaatttatgaagacttattttgtggcctgacatataatcagtcctggagaatgttttgtgtgcagttgagaagaatgtgtattttgcagttgggggatgaagttttctgtatatatctgttatgcctagattgcagtttaactttgatgtttccttcttgattttctgtctggttgaatctgttcattgctgaaagtggagtgttgatatcccctactattattgtattgcagtgtgtctctctcttcagatctattaatatttctcatatatatttaagtgctacaatgttgtattcatatctatttataaccattatagtctcttgcttaattgacccctccatcattatataatgatcttctttgtctctttgtataggttttacttaaagtctattttgtctgtataggtatagttactcctgctcttttttggtttctatttccatggaatatctttttctatcccttcactttgagtctatgtgtttccttacagttgaagtatgcggtaggcagcatatacttgggtctttttttatccattcaaccattcagtgtctttctattggagaatttaatacatttacattcaaggtaattattgatactgctgccattttgtttattgttttctagttgttttgtagagtgattctttctttcttttttctttcttttttttttttaagatggagttttactcttgtcacccagactggagtgcaatggtatgatcttggctcactgcaacctccacctcccaggttcaagtaatcctcatgcctcagcctcccaagtatctgggattacaggcttgcgccaccacacctggctaattttgtatttttagtagagatgaagtttcaccacattggccaggctggtctcaaactcctgacctaaggacatctgcccacctcagccttcaaaagtgctgggattacaggcgtgagccaccacacccaacctctctctctctttctttcttctttctttctttctctctttctttcttctttttttttttttattgatcattcttgggtgtttctggcagagggggatttggcagggtcataggacaatagtggagggaaggtcagcagataaacaagtgaacaaaggtctctggctttcctaggcagaggaccctgcagccttccgcagtgtttgtgtccctgsgtacttgagattagggagtggtgatgactcttaacgagtatgctgccttcaagcatctgcttaacaaagcacatcttgcactgcccttaatccatttaaccctgagtggacacagcacatgtttcagagagcacagggttgggggtaaggtcatagatcaacagcatcccaaggcagaagaatttttcttagtacagaacaaaatgaagtctcccatgtctacttctttccacacagacacagcaataatccgatctctctatcttttccccacctttcccccttttctatttcacaaaaccgccgtygtcatcatggcccattctcagtgagctgttgggtgcgcctcccagaccgggtggtggccgggcagaggggctcctcacctcccagaaggggcggccgggcagaggcgccccccacctcccagacggggcggcggccgggtggaggtgccccccacctccctcccagacagggcggctggccgggtgggggctggccctccacctccctcctggacgaggtggctgccgggcggagacgctcctcacttcccagacggggcagctgccgggcggaggggctcctcacttctcagatggggcggctgccgggcggaggggctcctcgcttctcagatggggcggctgctgggcggaggggctcctcacttctcagacggggtggctgctgggcggaggggctcctcacttcttggacggagcggccgggcagagacgttcctcacctcccagatggggtcgcggccgggcagaggcgctcctcacatcccagacagggcgccggggcagaggtgctccccacatctcagacgatgggcagccgggcagagacactcctcacttcttagatgggatggcggccaggaagaggygctcctcacttcccagactgggcagccgggcagaggggatcctcacatcccagatgatgggcggccaagcagagacgctcctcacttcccagacggggtggcggctgggcagaggctgtaatctcggcactttgggaggccaaggcaggcggctgggaggtggaggttgtagctagccaagatcacgccactgcactccagcctgggcaacattgagcactgagtgaacgagactccgtccgcaatcccggcacctcaggaggccgaggctggcggatcactcgcggttaggaccagcccggccaacacagcgaaaccccgtctccaccaaaaaaacacagtcaggcgtggcggcacacgcccgcaatcacaggcactcggcaggctgaggcagaagaatcaggcagggaggttgcagtgagccgagatggcagcagtacagtccagcttcggccgggcatcagagggagaccgtggagagagagggagacggagagggagagggagaggagggagagggagaggagggagagggagaggagggagagggagaggagggagagggagaggagggagagggagaggagggagagggagaggagggagagggagagctctttcttttttctttctttctttcttttctttctttttttcttctttctttctttctttcttcttctttctttctttctttctgtttctttcatctaagcatttttctttaatggtatgttttgattccttgctttttatttttttgtgtatccactatagatttttgctttgtgattaacatgaagcttgcaaaaaatctaataactttcttttaagccaataaaaacttgattttgattttaaaaaaacccacaaaatatacatttattccattcctcccctcacattttgactttttgatgtcataatttccatctttttatatttcatatttcttaacaaattactgttgctattattatttttaatagttttgactgtcaaccttcgcactgaagttataagtgatttgtgtatcaccactatagtattagagtatgatgaatttgtctgtgtgactagcagtgagatttgtactttcatatgtcttcatgttacacattagcatccttttctttcaacttgaataattccctttagtgtttcttgtaagacaggcctggtggagatggattccctctgcttttgtttttctgggaaagttgttatcatgccttcatttataaagctttgttgggtacagtattattggttgacagtttgtccctttaggattttgaatctatcattctgccctctcctggcctgtaaagctcctgttgataagtctgctcctagctgtactggaatcctattatatgctatttccttcttttctcttgctgctttcagtcttctccttgtctttgagtttttgacagtttgattataataggtactggggtagtcttatttgaattgaatttgattggagatatttgacctttctgtatttcaatatttacatctttctccaggtttagaaaattttctgctactattttataaaataagctttctatccctttatatttcacttttcctttttgaactcctgtgactggaatatttgctcttttgatgctgttccacaaatcctgtaagctaacctgatttctttttattatttttttccctcttctgactacatattttcaaataacctgtcttggagttcaagttatttgtatctacttcattaatttactctctatagcatttttaatttttaattttgtttgttgtatttttcagctcctggatttctattttattattattattattattattattattattttctctttattaaattttgctttttggtaatttattatttttctcattttgttgaatcatttttcatatatyctgaagttcactaagcctacttaaatggttattttgaattttttttgtcaggtggtttatatatttcattttttagggtcaatcactggaacctcattttgtctgtttgatgatgtttccttaattcttcttgattcttgtggtcatgtgtctatgtgtgcatatttgaaaaagtagatactcatttcagtatttgtaaactggctttgtctgggaaagccctgtggcaggcatggcactgggatgggccagaagctcagagccactgagggctgcctgtcactaaggattgtctggagcatggagctgctgaagtcagcctgctggtgatgtggtctagagatcaagtctaccacagaagcctaaatcctggggctgtgtgctccaatatggcaccaaggcatttctacaggctcagtccaaaagtaccatcacggagtatgagactatagaagtcttcccagtgctgagttttactgtagtaggccgtgtggtggaatccaaggcaaagtcctgtgctcacttctgtctcttccctccaagcaaatggcatctctctccatgctgaaatrcctggggttggggaagaatgatgcgagtaatgtaaaattgtccttcccatcctccgtattatatcttttctcactgttttgctacagttagatactgtgatctctcacctggttttcttagctcttgtgtaggtatttccatgcatgaatggtttccaaattgatgtttttgttgggggataactactggagggccatactctgccatcttgctctgcctacctctctccagtcggcatattttcttgcatccaactagatctaaaatgttatctaattcacttttccttcgccttgtattatatatgttttaaatttatttttaaattttctttcatatttataaatattcagataaactgtcatatactggtcatttcctgtatttatgacattatctctgtccttcattaaactacaatctacatagagagacaagatcagttaactaatggctcaagatgatatttgagatgatggaaatatataaaatggaaaagcaaaaactcagcacagataagaagcacttgagaatttgaaaaaagattttcacagcaagagaaggttgcaagaacttcaggaaggactttaaatatgtcttgaagtatgggtggaaattggatagaaagagaagaaaagagagcacagacagtgaggaataggttactagaaagacggcatgagaaattcccaagctatttttagattatggggagtcttggagaatgggattaattgcagatgaggcaaggagaagacttgggaccagaatgagggagatatttaattggggttttaacgtattggtggtatggtgttgttaatgattatcttggtcaattttacttatttagctatggaaactttaaatttatctagcaccatttcttacttttaaatatgttttccatacatgcttttcagacttttaattattaacttacacaaaatgctataattcatattttggaagatacctatttaaatcttctagtacagcctataggagagtataaaagtagaaaaaaatagatgttaagtgaatagtagtgtgtttctggaatattttgctccaaaagaaaatatcctcaaaatttagtttttttttttctaaacagtaaactaagctgtgtgtctcttgatttcagatgctatattagttttctttggttaagtaacaagttattataaacagtagcttatgacacctatttattagtgaaaagttctgtgggtcagaaattcaagcatgctaggctggkatgtatgtatggaatatcacaagaatgaaatcaaggtgttagctagkctgggctcttatctggaagctttgggaaaatctctggctccaagtgcaatatattttggcagaattcatttcttttcatagctgtgagagtgaagtctccatttacttgctggttgttagtcaggggctaccttttagcttctaaagactgctcttcttccttgttcttgagcccttccmtcttcaaaccatttgtcaaaacgttctctagctttatatctttcttatttgctcttctgccttcttatatcactgttcaaggaaaactctgcttttaaaggactcatgtgattagatttgaacacttggataatctactaattttaagtctagctttaccatataacatagcagagtaatattttatcatagtcacagtttccacctatactcaaaggagagcttataaaaaggtaagggttattggggggtcattcctagaagtctacctaccaaaagtatgtatttgtttattgtcaaaacttaatattatacataatataaatactgcaaataataattgttacagaaatgtataataatttagggattagtgaaaaacacatgtgatccagaaacaatgactatgtttcagtaagaataaaataaaaattaaaacatatctaaatggttactctttgggaacaaaattaaactcagttaatataattattattattattattattattttgagacagagtctcgctctgtcacccasgctggagtgcagaggtgtcatctcggctcactgcaacctctgcctcctgggttcaagcgattctcccgcctcagcctcctgagtagctgagattataggcatgcaccaccatgcctggctaagttttgtatttttattagagatggagtttcaccctgttggccaggctggtctcaaactcctgatctcgtgatctgctcgcctccgcctcccaaagtgctaggattataggcgtgagccaccgtgcctggcctaatataacgtttataagcaacttgtactttctgtgcaacacatgacattacactgatacattcaacaaaggccctttaaaagggcaattcgccaccatcctgtgagccttataatgtaacgcttcattgactactctggcaactattctaaatcacattttggcctaattagatatcccaacagtgaattcagatgtttcatgactgggctagaaagagcatgatgatgaagtgggagctgatagaaagctccccttcctcccagtattctagatgaaaaataacatagtctgtgttaaaaatctgttacaacttcaatagttctatttcttctgagaaatgtaaaaaaaaaaaaaagtacacattcatgaagaaagagaaaacctatcacaatcatatcagagtaaccatataatttgactgtctacattcctgtcctgaccacttctagattctaagtgcttagagctcattactacttctccatgtccatcactgctttggctcaaatacaaccatcacatctgccatggctagtaatcttgactacgaagtcaacaggtattcttctcccagacacactacagtatgccctgtatctgacttctcatttctaggatactggtgcattttttagtgctcttcagcatagtaactggtcatggcccagctgaggttcattcagtgatatttattgctttattaaataactattagtctggttaccttgtgaactggattctgctaggcactatccatgcctaataattatcctcaaataataatccttataattatctaattataactatcctaaagttgaagaaataattttcgcaattaaaaattctacaaatgttcattgaaaacaaacagttaaggacaaaaattataagattacctgcaacatgaatttcaaatttttgcaaaatgactctttcaaaagatccattgaagataaattttaaattgtttttatttgttataaaattagcacatataccattcttctcaaaacgaaccagaaaatgtatcacattgccgtgagtgggcaaagggcatgatctattttacccgggcaggagagacagaaagctaggaaagttaaagaggagctggggctgggtgcggtggctcacgcctgtaatcccagcactttgggaggccgagacgggtggatcacgagatcaggagatcgagaccatcctgactaacatggtgaaaccccgtctctactaaaaaaatacaaaaaagtagcctggcgtggtggcaggagcctgtagtcgcagctactcgggaggctgaggcaggagaatggtgtgaacccaggaggcggagcttgcagtgagcygagagcgtgccactgcactccagcctgggcgacagagcaagactctgtctcaaaaaaaaaaaaaaaaaaaaaagaggagctgggtcttctaagatgacttggcgtttaagaggagaatcagggagaaaataggtaaatgtagagaggcatgatagagtaaaggaccatagtaagcatttaaagaaagggtagagaaaacaaaattaaaagaaaatgtgattttgatagattttgtatgccacgttcagaagtgtaccatcaggatggtagtccagaatttccagctttgcctgtgaattgctacaaagtaaggggctcctccaagtccctggaccatcaaggatggaatagaacaatagaaaagatcttcatcctcactgaaacctctcctactgctgtagactaagcaagatgatcctgaaaaatacccacttttggaaagaaaaatatttcataaataaatacatgcatatctttattttagatggaatactgaagtgaggacaatcctgttaacattttatgcttaaattattttatgttatattactatacattttgttctaatttacctttacaggaatatttagtcattcaaaatccttgcctttgagtactgctttattcctgtttgtgctgttaaagttcagccagatggaacttgtccaagcccttatttctatcagacgtttgaacagctgggattctgtagtttctgagtttgaagaaaaaagatctgcagagatcctgtcagcaagggccatgtgctttcatgatctctcctagaggcttgatattcacacagtttcatttgaaagaaactgacatttgtaatttatgtcaggatggaagagagagtgagaaggaattgcatctaatatctggcttttaacattgcaggacttttgtgattgctttgctaaatccattttagaacattgtaattatgttgttattctatcttgtgaagtatttggcatgaagcaaagatttaagtagttctaggatggaatttttttttacactgttgaaaaaacggaagttgttattttaaattgtgaaagtaggtatcagtgggatttacacaaaactatttcatccttattctcatttttcaattgcttaacataatcttcatgaaaactaactttaaaagttttgtcaaaaataaaattcaacttgtttcatgttgcccttggggacatgctgagagtctgaacaaatgctatgtttagattaggactatctagttttgatacagataaagctatgttaaaataagaatgacctttaaaaatccaaaaatactggataatacgaagattttgtagtaaaaagctgtaataacaaaacagcaggattttcatagtagtgtagttctgactggaagtcagaagatttgagattgacagctgttgaacaatacagtgcataacatgagtcatatatggtagcattttatttggatagttcattagttgcatattggacctcattaaacacttaaatagcgttaagctttaagacagtaacatgcaaacgggtctaagtgtaacttacagagttccttcaataattatttgtatcacagctaatacttggaaaatcactatggtcatgacaagagtattagagtagaaagggactcctagaaatcacttggtggcaatttttaattaattgaggtgtaatttatatactatataacacaggtcttaagtacttagttcaataaaatttgacagttgttgactcagtatgcaaacacatcaccaattaaaacattgaacatttttatctttccaaaaaggtttttcatggccaggtcaatattgatacgcccccttcacccagaaacaatcttgttcaaatttgtattacagtagcctagttttacctgctctagaacttcataaaaatgaaatgactcattatgcamacttttgtgttgggcttctttagctcaatataatatttttgagataattcatgttgttttgttatcagtatttgattctttttaaaaaatgtctgggccgggcacggtggctcacgcctgtaatcccagcactttgggaggctgaggcgggtggatcacgaggtcaggagatcgagaccttcctggctaacacggtgaaaccccgtctctactaaaaatacaaaaaattagccgggcgaggtggcgggcacctatagtcccagctactcaggaggctgaggtaggagaatggcatgaaccctgcggggaggagcctgcagtgagccaagatcgcaccactgcactccagtctgggtgacagcaagactctgtctcaaaaaaaaaaaaactgtctgaattgcattttgctgtatgaacacaatacaatttcttcatcaaatttccatttgtggacgtgtggtttattttcatgttgggattgttatgaataaagctactatgaacatatttgtacaagtctttttgtggacacatattttcatttctcttgagtaaataccaaggagtggaactgctgggtcataaagagattgtgtaattagctttatgaaaaactgccaaactaacttcyaaaattgtaatacaatttttcacttccactagcaatttaggagagttctacttgcttcattttcttgtcaacacttgacaatgtctgtattaatctgttcttgcatcactatcaagaaatacctgagactgggtaatttataggaaaagagatttaattggtgcatagttctgcaggctgtacaggaagcatcgctctgacatctgcttctgaggaggcctcaggaatctgaatcatgtcagaaggtaaagcaggagcaggcatgttatatggcgagagcaggagcaggagaaagataaagggtcagggggtgtaggtgctgcacacttctaatccaccagatctcatgagaactcactatcaccaagacagcaccaagccaggagggagccaccctcatgaaccaaatacttctcactaggccccacttccagcattggggattacaattcgacatgagatttgggcagggacaaatatccaaagcatgtcaatatcattttcataatttttttacccaatcacgtgggttaaaagttgatatggtttggctctatgtccccacccaaatctcatcttgaattgtactcccrtaattctcatgtgttgtgactgggaccctgtggaagataatttgaatcatgggggcagtttcccctatactattctcatggcagtgaataagtctcacgaaatctgatggttttaacaggtgtttccacttttgtatccttctcattctctctttgcctgctgccatccaataagatgtgacttgctcctccttgccttctgtcatgattttgaggcttccccagccacatggaactgtaactccaattaaacctctttcttttgtaaattgcccagtcttaggtatctctttatcagcagtgtgaaaatggactaatacagtaaattggtaccattagagttgggcattgctgaaaagatacccgaaaatgtggaagtgactttgaaactgggtaacaggcagaggttggaacagtttggagggctcagaagaagataagaaaatgtgggaaagtttggaagtccccagagacttgttgaatggctttaaccaaaatgctgataataatatggacaatgaaatccaggctgaggtggtctcagatgctgagatgagaacttgttgagaactggagcaaaggtgactcttattatgtcttagcaaagagactggcagcgttttgtcccttccctagagttttttggaactttgtacttgagagagatgatgtagggaatctggcagaagaaatttctaagcagcaaagcattcaagaggtgacttgggtgctgttaaaggcattcaattttaaaartgaagaagagtatgaaagttcagaaaatttgcagcctaacaatgcaataggaaggaaaatcccattttctgaggagaaatccaaaccagctgcagatatttgcataagtaacaaggarccaaatgttaaamcccaagacaatggggaaaatgtcttcaggacacatcaaagatctttgcagcagtccctcccattacagacctggaggtctaggaggaaaaaatggtttcatgsgcagggcccagggtccccatgctgcttgcagcctggggacttggtgccttgtgtcctagtcactccagctttggctgaaaggggcaaacgtagagcttgagccatagcttcattgggtgcaagccaccccttggcagcctccacatggtgttgagcctgaatgttcacagaagtgaagaattggggtttgggaacctccacctagatttcagaagaagtatggaaatgcctggatgcccaggcagaagtttgctgcaggatggggctctcatggagaacctctgctaaggcagtgtggaagggaaatgtggggttggagcccccacacagaatccctactggggtaccacatagtggagctatgagaagagggccaccatcttccagaccccagaatgcacctacagcttgcactttgtgcctggaaaagccacagacactcaatgccagcccatgaaagcagctgggaggcagacagtaccctgcaaagccacaggggtggagctgcccaaggccatgaaagcccacctcttgaatcagtgtgacctggatgtaagacctggagtcaaaggagattattttggagctttaaaatttgactgtcctggaagatttcagattttcatcaatttctcccatttggaacagctctatttacccaatacctgtacccccattgtatctaggaagtaactagcttgcttttgattttacaggctcaaagttggaagggacctgcttgtctcagaaaagactttggactgtggacttttgggttaatgctaaaatgagttaggactttggggtactgcwgggaaggcatgattggttttgaaatgtgaagacataagatttggaagagccaggggcagaatgatrtggtttggctctatgtccccacccaaatctcatctcaaattgtactcccataattcccatgtgttgagtcagggacctggtggaagataatttgagtaatgggagcagtttcccacatactgttctcatggtagtgaataagtctcacgagatctgttggttttatgaggggtttccacttttgcatcctcctcattctctctttgcctgctgccatccatgtaagacgaaactttctccttgccttccaccatgattgtgaggcttccccagccatatgcaactgtaagttcagttaaacctctttcttttgtaaattgcccagtcttgggtatgtctttatcagcagcatgaaaacagactaatacaaaagtggtaaatcattggatttaatttgtatttcccttttggctatagtgatattgaacatctttttatgtgcttattcaccacttgtgtgtcttattttgtgaagtgtttattctagtatcatgttcatttttattctattaattatttatatgtagaagattttaatatgatctgtatgtaagacttatgtcagatatatgtctgatgaattttttcttctaattcttacttgaatttttattttcttaatggtatttttaaaactgtctcttttaaatagcagaagtttaattgtgatgaagtaaactttatcaattttcttttatgrttagtatttttgtgtctcaagaaatttttgcttgtgctggggttacaaagattttcctgtattttcttttataagctttataattttatcatttatgtgtaggtttttgattcatcttgaaataattcttatctatggtgtgaggtgggggataaagtttattctttctatatgaatattcaagtgttcatgatgatatttatcgtagaagtacctatcagtctttgagagttatctattttgatttgacccatgratgtacatataaattttaaatgtcacatatgaaaaaataataagtatatgttataaagaaattttgactaatcatatatgtggattgactaaatttttaattttttgaacattagtactttatctaatatttctcctccaccrttcaccaaatacttggtaaaaatttattgattaaataattgaatgactgctgtggcaaagccattaatatttattgttttttgtccttttctatttactgcatatctttttagtccctttacaacatttgcacatgatttggcaactcaatgaagtcatcatgtgaaaatctgatttcttttcctgtgatattaataacatttcctcttgttttcttgtcatatatctcccccaagcatttcttgttacatgtatttttaatctgtccctgcctgaattccttcttctgcctttaaacaagctcatgtgaaaaaaaatattcatttttcagccttactagtcactaaattctatcctttctccttcttcactgctttacttctgtttctcaagtgaagtgctataatacatttctagcaacctgtgactttttctatgagaaatttgaatgtttactttaaggaaattttatgaagtagccttattctgtttcagctgtgtgagaactttaaaacaatgatttattagagttttagaactgcctttaaatttctgtttttaagcccaccatgaccaaatcacttaatgattaagtttttccagtttttgaacctaagatatgtggttgtactgacattaatagattgtcgaagaagtaatttacactgttggtttctctgccctctctcctcctcctttccttagcagtccctkgtcatttggctttgccttccaccattttattgaagttgaaagttgttctcctgacagtaccacatgcagcccaggtcacccctgaggccattccaaaagaggcagattggatagtaattggttccccttccattattataatgcagtgtttgatactaaaccccaagattcaggatgcctgactcaagtaaatcattgaagcccctgtgatgtatttttcattctaatcttcttcacrgacaaccacaggtaagaactggcattatgtgaggtcgtgaaactgctcagcctcaacaatttctccttgtcactacatagggtcccagtgcacagggcttgggcctttgtcttagtcccttttcctaagtcatgagtggatccctggcctgcacattgttcctttatcactgtccttatgacatttctgttttctktgctgccttgttccagcctgtccctctgtacaggaaatggaattttgtcttatgagtcatcttggtgtttgagccttttctcctacgggaacacttcccagtgctaaccgttggtctgcctcactcctgagcaatcagccagttcctgaatttctctgtgttctgaattgccccttagattggttctctagtatgaataactttggaatttggacctgagattgtggcatagcaccctcttaaacattgtaccttctcactcttcagggtcagactagggggtgaaatttgtttctccagtccctatcctgcctagctctgaattcttcactaaattagaaagtacttaaggaactgttgtaatatcagcagcatataacagtgttacctgtttaattctttgttgtcactatttttacatcctggtctgtgacatgttcaaagtttttctttaaaatgccttttaaaagagaaaattgaaacccattcccacttaaatatagataaaatgatcacaattatcattttatttatcaaacagttattgaatttatgctatacacctaacattttagttaagataaattccacatttttaccaatacttctcccctatgtaatgtcaaacacaataccttcctcctcatagcagttatgcagtagatgagttgtataaatacaagagttatataaataaaaataaaaccacagttttactgtatcttcggaaaactcacattttggtatgcaagtcaagatatgcacatttgaaaaaaattatgccaattaacggtaataaaaatatatcagagttggccaggcatggtggcccatgccagcactttgggaggctgaggtggacgcattgcttgagctcaggagtttgagatcagcttggacaacatggcaagacttcatctctactaaaaatacaaaaataaaaataaaaaaagccaggcgtggtggtgcatgcctgtggtcctagctactcaggaggctgaggtcggaggatcccttgagcccaggaaacggaggttgcagtgagccaagatggcatcactgcactccagcctggtgacagagtgagaccctgtctctaaataaataaataaataaatgttaattcattttgtaggtcattttaacatttatcataaaagtaagataatcatgcatgatttttaatgaggcaagacatgactatgtgttaggaacacctaaacaaatggttattactatcacctttgagaggagtcatttttatcctaaagagcatccatgacctcccagatatccagtaaacaaattgttagggaaaaactttaaaaatgtctattagggcaaaattgtaaatgtgtcaattcttctgcctatctgctgaaacattgtggggcagtctgcttgtacttttattgggagcttttcattgcttgttgcaatcttctccctttgctcagctcctgaagtcctgttaacaataaacttttatcagaataagttttcgtctcaggagacctgatagtcattttataaaaataacatttcaattaaaatactgcttggggaagtttcttctggttttcttctgttaataaaacaaaatttggcagggccttgatcttaaatagaaactaatgcctgtaggtattaaaagaataatttaatatggaagaagtctatatttaataaatgtttatagtgcatattttataactacttttttcgtagtctttttttagaactgttgttctaatatttttcaaagattttagaatcaaatgacattaagttgtgattccatccwgctgctgctttggatgggctaagattttctgcctagcctatacctctgggaaaactttttctttgtatttctcagatatgttaattgattgcgtttgagtagtcctcctcctcttttgctgtatcttgtggtaagactttagagcctcttttcgcagtttttctgaactttttctttttttctgggtctttgctggaaggtttctgaagtctctagaaagattgtaacttcagcatgttcaatgataatkcattcaacgaactcctaatctcctgcaatcccataacttttctgtttcaacagcacactcacatggtcctgtctttgagatcttgaactttaaaagtccactttctgtgtccttctgtaacacacacgagctcatcataatctcttcctcccagtttgtcactcactcttggctttctttctcttcctacccaggttggaactcattttaaatctaacagcagtctcaccagcaacagcagtcttgccacattctctgggttctgggttcttgtcaaatctcagatcaatcrtctgccccctctgagctgctccttgcctgggtggtgcttaagaaaaattgcctgacattgttcccagtcatccttaaataaaagttcaggcacagtcagctcttcttgattccccatcagtctctcacattctctcaccaactgtctgaaatctttacaagtttcctcaaacactcaacctaacactcagcaaactgtctgttatgatcctttcaaggaactagagtccattaggcatgcgacctattaatttcgttcatctccatgtcaaagtttaactaattaatcagccatcctttcttccttttttcttatctcacaggaaaaaagattaacctcctttctttttttcttttctttttcttttttttcttttttgagacaaagtctcactctgtcgtccaggctggagtgcagtggtgtgatctcagctcactgcaacctctgcctaccaggttcaagggattctcatgcctcagcctcccgagtagctaggattacaggcggccaccaccacgcccggctaatttttgtatttttttagtagagacagggtttcaccatgttggccaggatggtcttgatctcctgacctcaggtgatccacctgcctcagcctcccaaagtgctgggattacaggcgtgagccactgcgcccagccaatgaaactcctttctaaggcttcttttacacttaccttcatttcaagtaatgagtttatctctaaccttccatttgcactacacttggttttgatgcattgcttctaattcttcatttccaatttatttgttatgacactgcaatttggctttagttctcaccatatcaatggacctcctccaaggtctgaaggcattacctgatggccatttttttttttctgagtctctttttcttctcatcttccttgacttatgctgcaggatttatcacttctgaccacttcttcaaagtgttctgcaaatgtgctacttcctttatttatatgacaccccagagacctgaaattcactagaggtaatcttggtaaagatgaagctaccatgaaacgtttcccccttatttccaataaatgctttgtcaaactggaaagagaccactttacttatatttttattgcagctgccttttaagcaatcaattctattttaaataggctacacataattatattttatgtcttctaaatagatgttaacaaaatgaaacaataaacctgtgcgataagaagctattatataaaaacaatgtatcaagaagattagcttaataagaatgtacactgcatgggcttgtgaaaagaggaaagggagtcactgagttaggcatgcttgttaggtgacttttggggatgtgactagagacagacagaatgcagaaatagagaggcatactaaatatcctaatggattgggcttgctgagacagatcaaatttgagatagaaagacggggaagtaatctaaggtgatatatacaatggttcctgcttgatttgatattaaaaaatacttagtgactatttagcagttttttatccgagtctaactccctacaactaggccggttgagtaaccaaaatatgctactactttagataaaaactaacattttcctttccaaaaggatagtttataaatcttgaaataataatgtgaaagcagctaccatttaatgagtgttcactatgggcaaggaagggattttatatttttacttgttaatcatcactcccaattctgtaaggagagttttattatccttattttttagatgtggaaaatgagtctcagagagtttagataacatgcccaagttcactcagctggaaaataggatgggctcccatcccaagtttccagtctgcaaacttcttgctctgccttttcatgagattgcataaagctctagattcaacaacagagagtgagttgcagccctaagtttattatttactgatgcaacaacrgatgaatcatttaatctctctcagccccattgtagtcttctgtttaaaaaaaaaaaaggtgatgagaagtataaggagaaaatcagtgaaacctgaaatgtagacattctataggacaagtgagatggttccttcaacagataaatggaatgaataaaaaagagtgggaaggggaaaatgttatgtattgaaggagacttyataaacttatcaatcaaatgcaatgtctggcctttgggtggggggggctggggtgttctggacttaagaaactgagaaaatatgtatgagaaaataataaaatttgaacatgaactccatatttgatgatactaaggaattgttgataatgctgtaaaatgcgataatgatattagaaagtgttatggaaaaagtgtcatctgttaatgatccatactgaggtgtaaactggtgaggtgatattaaatgtgagatttactttaaaatactcttacaaatataagtaggtggagatagatgagaaaagattggcaaactattgataattgttgaagtggagtggtggatgtatggtaattcattatattaacctctctccttttgtgtgtgttttaaattttctagaagaaaaagtaaaagaaagacagagtggtgttggtttcatgggtatatatttatctaccaaatgatcaagttctatacattaaatatatacagctttttgtaggccaattatatctcaataaagtggatttttttaaagacagataataaataaaaataagatagatatttccaggttaatgtttacgtgtgactttaaaaattatatattaaggcatctgtgcatggcaaaatataattttattttttcaattaattttttaaagtattaggtactaatgggatttttaaaactcactgactaatctataaaccctacttgtcccatcaaatgcagtttcatgcttgaattggctttgctacattgccacattaatttgtcaggattcttctatcgagaaattaactacccaagttgtaaggaagttcttttgttccactagacattttattaagagaacaaattcccaccactgtattttaaaattcattagagtgtttttttttctaatgtttaatacaggttttaagtttttaatgctggtttgaacttgaaacatatgaagataaaaggtttaaacaaatcatgtgagcaaatttactgagtgtatcatgtaatatggatatcacactcttgtaaacaaatgaacaaattatttttacatctgattctagtgattctagtcataagagactaaatagttccaacaattagcaataattcaataagaaatagttttcctaaaagagccctaatattaaactcagctgtcattttaaaaaaatcttttccatatgacttctaaatcaaggaatcaacaaaagcaagcttgtttttttttctaacttgaaaattttataaaccatttaatatttttgactaaaagaagcagactatatttttgcctgcattaggtgatcactacattagtgatcagtgttaatttgaagaaagatggtcaagaagtacttgaaatctcacttgctttttgtttgtaacttttgtcagatttacgattatcttgtcatagtaataaagcccacaatgatttaatacaagcttgtgacgatgatgctttactctgtttatttctgtaccactctgattgctcaaggatctgctcttattgttccacattagccacgactgccaagcccactagtcaaaacaatttcacaattgaacattaatggactgaagaacattagcagaagcaaatagaagcgggataccatagtaacccatgtagtctgaggaaatgatgttctattaaagggaaagctaatgtcccaaaataaagctttacataaacagtctggcttctcatgcttaaaatgtctcttcatgtgaaatgagctttcaatttcatattgtccatattgcttgttttagtcatagtactttcaaaattttatgaatatttaattcatttttcaaatttaaaaacaataggttattaaattaatgaggatggggatatgattattttatagagaggtggttagtttagggtgtttaaggttatgtgaygaactttaagagatccaacggcaaatcataattgatagatcaatgtgatttttgatccagctctaacagaaatgtcacctcacccataaaggtagttgggaaacatgtttctcattctatctcctttttctcatcttttaactcatattggtcaatcacctgtttataaacaaacatttattacagtggatcttatccttttttgaggcaaactctttaatactggaacttttggaaccacccttgagaggactaaaaaagtcaaaatagcactaaacacataaggaataattaaatttttaaaatgactctagaagagaaacttctcacagtgcctgctcctataaaagtaatcacagtttctcacaattcacgtcatcacctttcaacagtgtgtcactgattttaactgtttattgccagatgaacatctcttagtactcaggaggcaaattcctgcacgttgcactccttttagcatctcttaacagttgacagtacacctcggaggggtgtggtacctagcataggtgagaaccattgatttattgaatgtttgtggggtacaaagccctttaataagttttagtcacttttatcatctgtagtttgatttcagttacatggagaacaatacaacatgagggatagattctaatcaaggaggctaacaagtagagatttttagcatatgttcaatcaaaagaattctgggatgggtcagcacattttaatgatgagaaacaaaatcaagtctaaacaatattaattctatcattgcaggcccaagacactggtaagagagagagaggagtaaggagaagaacacaggatgaatagaaataaggaaagaaggagcacatgatgagcctgcaatttacaaccgataattaacttggggataggcattgctgttaattttataatttgtccattttgtgactgagaagttgacttagtttaatctgattctccttgctttgtaatatgtatttaacatatttatactagctaagttaagtgtatagggttcaaaattatgccagyagaggaatcatctaaaaaatggagctgtgtttaatttcatgaaaacaggagaaaacagcaatagtagaaataatgagttattttaatggttagcttgcaaaagaggaatcacctatattcaccgtgacttatgtgcaagatgatygcaactgcacatttgccaggcatcatcttagcttacacctgctgtccctgtgtaattactaagagcatcctatttcattcttaaagagttctggtttgcatgataaagaatatgaacaccctactcataaattgaagttacagttatatagatttgtacttagaattagggagaaccttctacaaattgaaattgtcctgtaatggaaggcattgccttaagaaccaatggaaaaactagcagtcctcaatcagatgctgaaaaactattagctgtcagtttttaggaggcctaaaccagataagggttagagcagcagatgtattaatttgaattatatgaaagtgccaatatttgcctgttttagacgtatgaaaatgtcaatttgttaactgaatacaatgtctgttttagacatacaaaaatgtcattstattaactgaatacaatgtctaccaacacctgggagtctattttatgtttattgtgttgtaaaaacacgttccatgtttgaaaagtaacatgctattttttttaaaaattataaaatcttaaaagttctccatcaggaagtataaaaattaaactatatctttatttgttacaaatatagtaagatattaaaataagaaggatgcattggaagttgagagaaaagttgggtatattttaatgctatgctgtcctgaaatgtcagagctatgtactagcttttcctgcaaggggtaagattcctagcaaataattcagaataaggtttttttttttttttttttttttttttttttttaccaaagtgttctaatatagtctgagaatgctgtgaaagcaatattaaattaaactaaaattgatagagtttaagattactgagaggcattttattgacccaaacaacacaacacacaacaagaaacaaaggagaagatatgaaattaacacacatgggatagggtgtaagctgggggaaggactgctctacctgaatcctgtaaagcacttgcttaatatgccctgcctggctcttggccacattagcctttcttactgaaggtatggttgtaaagaccagagttaccttgaagaagcggactcagggaaggaaggtacttagagccaacatatccttgttctattggagatatttagggctaagacctgggtaattgctgtagctttcatgtgacctgctaaatagtcatgtgttttctctgcagatgtggaggcagagcataaatggaaccaaaatggaaccatgatgcatattacaaatgggtggctgacttggtgatgatatacctttcaatctggaggtggcatgatctgtaccatggcttgttctttctatctatttccatctatacgttctgagcctctaaaatcttatatgcatagttcgtggtacacatcttttattgagactattgccttgttaatttctaattctagaaacttaactctagaatgtagtagcattactttctcatccctccttatgaaaccactccatagtcaatgctgtactcagcactgcatgatgcagaaaatggtattggagaattcaaatgccttttgcagccttttttctttttactctgtccccagctgcaataaattttcactcttcctcaaacaaatagagcttcatcaccacttagaattttggcgtgtgttaytccctctgcctggaacacacttttcccagacatccacatggctcattcttttacctccttcacatctaaattcaaatttcaccttcttagaaaggtcttctytggctatcgtacttaaagttgctaccctggatcaactctatgtctctcttctattttttttcaataacacttggaatcttctaatatatcatatacttcattgtatttatattctctcttttctcctccagtagaacgtaatgtctttgaagtagggatttttatcttgttttattttctctattttgtataggaacatatatgcatgttattagttactaaatgttaacaaccacattttcttttcttaaaatttaacttttaagttcaggttcaggggtacatgagcaggtttgttatataggtaaacgggtgtcatggagatctgttgtacagattatttcgtcacccaggtattaagcctagtaccctttagttatttttcctgatcctcttcctcctcctgccctccatcctccaataggccccagtgtgtgttatttccctctatgtatccatgtgttctcatcatttagctcccacttgtgagaacctgtggtatttggttttctgtttctgtgttagtttgctaaggataatggtctccaggcccatccatgttcctgcaaagaacgtgatcgcattcctttttatggctgcatagtattccatggtgtatatgtatcacattttctttatccagtctatcattgatgggcatttaggttgattctatgtctttgctattgkgaatagtgctgcaatgaatagtgcatgtatgtgtctttatgatacaacaatttatattcctttgggtatatacccagtaatgggattgctgggttgaatggtatttcttaggtctctgaggaatcactacattgtcttccacaacaacaaccacatttttatagataagtttgaaaataaaaggaagataaaaggtaaattgacaatttaaagagaaacaatatattaggcattttgtgccagtttgcatgggagtttcttggttttaacatgaaagtcctttgtcctgggaaycctctcagccctgtgcaggccaggacagttggtcactttttattcttataattgtctattattgtttaaattttgtaatcacctgttcctgtcttagtgtgagatggctaccgtacattattttattttatttctgttctatttctacttttttcccgtgctactgctgacactactatggtttccagtaatttttaataagattacaaatgtttatccaacaaaaaggcctgggggacatccttctttaactgataagtctgtaaatggtataatttcattggtcttctggattgatttgcagaatgaatacatgttcttcttgctaatacttttcatattattatgaagaaagtaccagactagcaaacatctgaattctagtgcaaattctgccactaatctcaactcacctcaccaacctggcctttgttttttctttcataaaatgaaaaccgatgctaaagcaaactctttacacaaccagcattctaggatagtaacgattctgtggggtttcttctgacctgcagttgaaactgttccttttgcttggtagatggcttggccactgctatgtcctcaatcaaagaacttggcagttggggaaaagcaggagcctccctggatctagaaaagtcaagggaattttggttcccttatgttaccagtgttagtgcctgacctgccttttcccaactaagatttcctcatgataaaaagtgcgaaaaaagtgtgatgtagctcttaaacattttcctattaaagtggctgtgttccctgctaaattaatgtttaagggatccagctgttttgtgagcaatttaaaacataatttgatgatttactatcaatttcctcataaaatgtgcatggttatgactaaaaaaatatacacagagatatgaggctgaactgtgtgtgtagaaattaaaggaaacctggccattcatattttttccttatcctctaaatatttagctgtgtgctatcctttcataaatttgaataaaacctattagacaaacaagtagtttcatctaaatacaactctcatgtttagatttacaaatcctttggggaaaaaatgttagcaaaagcaagtatcatttgcaattaaatactttatatttaaatgatacttaggtgtttagagatcacattttttgcctattaatcctcacagtatggataccccaaataccttgatttgatcactatgcattacgtatatctaacattatttcacatgtactatgtacacatgtaaaaataatcatgttaataacagaatcctcatagtgatgttagaaaaaagcaagtgttaaaatcagattggattcagatctttacactatcactcactaattgtaagtacttgggggaatcagatcagacctctgatccttagtttyggccggtgtgtaatggtgattgcagtgtctgtctcatttactcaaccctttcccaagttgttggaggactaaatgaggtaatgctaataatgtatctagaagaatgccagacaaataagcytttattattattattcctgtttacagataaataaattgaggctcagggaggttaagtgatttgtccaatagacataacttgtaacttgaggacccaggacttgtttacaagtaatattttaaaacttgtcaagaatccatacagcagatcaactgagtacagggctgaattatgacttgttgggccatgggcatttttgccttcatgggccccttccaccatagggggaaaaaaaaaacttctaaaaatgcaggtgggattgatttgaatatatacattactattatattcactttgtcgtcatattttaaaggaaattaaaataagaatatttttgcaggtctctacatgcgtcataggccctgggcactatgcccactgtgtctaatggttaaaccaatcttaagttacgaaaaaaaaaaaaaaaaacactaaactgcttcatatggagacaaacctaacatgaataagggatccttctatccctatgtttggtcttgcaattcagagtgttccagtgaggtctccctgccccgctcacagtgacttcctaagtatactatagttagctcctaaactgagttagattaaacggggacacttgccaaatccgattgcctcactctctgtgagtgatggatgagattatacgaatttaaaagtctgggataaagaagttaatattttaaaacatgtaaaacacaacagttcttccacatcagataatgaaatctaagattaatcacaaacaaatgtgtactaggaaatgtagtaattcatcacgtcttctccagaagtcgtatctatgttaaatgttccaaaacagtgtcaaagtctgtgtctggagttggtgtaatccggaaagaaaaggagcccagagtcatgcattttaagtgtgtagttttcatagaataatcattgggagaaagaggaatgctacattaaaacttttgtagcattttcttcatggtatttgggttccattttgagggctctatagaatttagaaattgcaggtttgaactgtataaaatcgttggaccatcttcaagaaacaaagctaaataaacatgtcattccttggcaatctcaagataagcctgcccttctttgccggctaatgtttggtgtggtgtgatcatctgagtttcctcagacaggaaggtttatgaatgcagggaatagaagctcatgggaaaatgccttctgtaaccttttccctgttacttttcttgaccgctgggagctttagtctcagtgacataaagtgtttctatggcatacaatcccatacagatcttaactactcatttactatactgatgtggatgtcaaacaaaaaaatacttcattaaaatgacatcaataatctttctgatgcatgaaaatgatgtttcaaacgagggaaatgcattagtacagttgtatacttaggcatccaaattcttagacccagaaactgatttaaaactgaaaaagtcatttacgtaaatcattgatgtgtcagctaagagcttgtaaatttgtcctctctaaaagcagttttacrttataaagtcgctcaataaaacctatcaagaatcggatggagggatttattactgttatttattacaagttttaacatggtcattttgagtttgctttttaagagactatccactaagtgagttagtgtgctctgaaagagtgtacttaaattttgcttcaaatggattctggttattatcagtttcaaactaaggaagcagaactgtttatgtaaagttaacttagatttattaaacttttaaagagtttgcttgggaagaagctgtgcctacctttcccaaagacttacacatgttcaaacaaygttaacttgttcaagaaacatccacagctacatgttaggaattatagtaagtattgtaaagtcagaaaggaaagaaagaataaaaggaagaaatgaagaaaggacagaggaaggaaggaaggaaggaaggaaaggaaggaagggaaggaagaaagggaatggaaggaagatgaaaggacaagcagtgtagcaaattagttaaataactagggttatggagtcagatggcctcagtttgaatgccatctcttctaataacaagaaacaaaactttcaggaaattacttaacttgcctctccttcagtttcctcatctgtaacacggggataataatagtctaaccttctaggactgttrtgagaatcaaatggatttatgtatgtaaattgcttaggatcctgcctgtcgcttagtaagccttcaaaaaatgttagctattagctgaatattgttgctaccaaaaaactcgtagtgtaataggaaaacagcaagatacagatgcaactataatatagcatgataaatattgtgaaataaatctgaacaaagtgctagaggaggcacagagatgataccaatggagaaaaacacggtgtctaggaaaagaagataatagataagggatgaaaaacataaatgcagaacagcacaaaggaggcaagattaattctgattagttgggttagacaaaacttcaaaaaggaagtttcctgatgcatataaagatttagaaagtatgcagatgtaagggcatcagaaaaggcatggggacataaaacacaaggtaaatttaagaagtagtgattggttaagtgarccttgagggagagtggctgagtagagggagataaatatggaaaggaagattagaatcaggctatccatggctttccagaaccctaacatacgaacactatgaagccattacaggattacatgaaaaggtggtatcatcggattcgtccctaaaaagataactttaagtgaggaagggtgcaatcatgtccacccaaaacacaagcctagaaaatggaaggtggctgagaaatggttgagagccaaccaagagatagtcatccacttagaggcaagaactgcaacacagctcatcacaaggaagtgggtgctgacttccctaccttgatctgcaggcatcagtggagccacatggtagcttgggacaaactgcttataaatctaacatatatttcatgatctactgataaaagtccatttatttctttgaggcatgtgccttaactcagtggagctgcctttgaaaggcattatggagcaatttaaattaaaatcaagtctggaacccaatattattcagaatacaacagaattggtgacgaagtcacaatttttaaaatttatcatttttagttaaaatttctcatagtattttcaccagacattactaatgttaattattcctgctgggatttgatatatgtgaaatagtgatattcttatttaaataataatgatcctaatagccaataaataaataaataaataaacacactttctgcaatgctcaaaatctgttggcagtaaaataaccaagtacagctcagtcttggaatattgtaggttgacttcctcctctaaagaaaggtcaatgaatttgtgattatccatgcaatactgttttttaagcttttccctatacattaggaagacttacagcaatgaactgatttcagagatggttgaaaatattgatgtcatctacgtgttcagactaccagtcctattctctctcccttctggttttcctttacccatttctctctttgtttgtttgtttttttttgttttccttcctccttgctctctctctctctctgtagttcattgaatctttattttttaagaatcacttttctttttttcttttttcttttaatttttttattatactttaagttttagggtatatgtgcacaatgtgcaggtttgttacatatgtatacatgtgccatgttggtgtgctgcacccattaactcatcgtttacattaggtatatctcctaatgctatccctccccgctccccacaccccacaacaggtcccggtgtgtgatgttccccttcctgtgtccaagtgttctcattgttcaattcccacctatgagtgagaacatgctgtgtttggttttttgtccttgtgatagtttgctgagaatgatggcttccagcttcatccatgtccctacaaaggacattaactcatcatttcttacggctgcatagtattccatggtgtatatgtgctacattttcttaatccagtctatcattgttagacatttgggttggttccaagtctttgctattgtgaatagtgcttttaattttttttgaggcagtctcactctatcgttcaggctggagtgcagtggcgccatcttggctcactgcaacctccaccttccaggttcaagagattctcccacctcagcctcccacatagctgggaccacaccccactaatttttgtattttctgtggagatggggtttctccatgttgcccaggctggttttgaactcctgagytccagtgatccgcctgcttcgggctcccaaagtgctgagaaccacttttcataaaaattattagatcataagacagcaatgagaaatctctattttaatattaatacattaataattactaattgacattaataaaaattcttaatatacgattttacgttttaaaacttagatggaaaaagttttgtaacatagtatatagacacaaggtcatgtaatcttttgattttttttcactaactagacttgtgctactaaactattccctagtcactactaatgtcttctttcttgaattcctggtttcaagtgatcctcctgcctcagcctcccaaagtgctgggattatgcacatgagccactgcacaccactttaagtcttctttctttggaattttagtaacattgcaaaacatcttttcattttggtatagtttaattgttttttattatcagcactcagcagaataattcaaaagctcttgttacaatcaaactgacctgtagctgcctgaaagttgtgcaacacttgcatgctagaaactattatccaacttagactttcctattctagaatataaacaactcaaaaattataagcaaacgtagtttctcttcaggtccctataactcaatgcaaatgaaaatatttcagacaaattattttaaaggagagagtcattttaaatcaaaagcctaaaatttcattaaatgtgttctcaattagagttgttaacttttaatattacattgaaggaactaaactggaattatgagttgtcatagaaacagcattgctgccaaaactctaccttaattaaaagcctttttaaaaattttaccatgaaactatttttaggaaaaaaatgctttagaaaattagaattcaatagcaataatttttatattaatggatacatgtaaaattcagatgtatgatgagatatggcacactctggctgtaataatagctacataaaacatatagagataaaatccagttatttataaataagattgaagtattatctggagtgtttcatagtgttacaattttatcttcaaacttaggtttattttatgaaatcaaaatagcataaaatttaaatattttaaaatttaaaatttttaaattataattattttgcctaaggttttacaaatatgagtcatttgaaaatatgtttatgtacctacacttactgtcttctttatactgtgagtatcaaaacaaattcagaaatggatttgtttttaactgttgatagggatatgttgctaagtcttaatggtaagagtggccatatttattttagtataattcagcaattgatataactggcaatagaatatttacatatatacatttcttttttatttaattatgttttcttgtgtatatgagaaagattggctaatattaaatattaatgtccattaaaatacaaagcctcaacttatctcttattgtatcaggggaattgtaaaataaatactccattaagtgaagtgcattaacacttcaaatacatgctggctataatagtcatcactaattatggatcaaaagttctctaggaacsttattaaaaatactttggttcactttattatgttggacagggtccaggaacctattattaaaaagtacccttaccccaaagtcatactgataaagctgatcaacaaacctataattaggaacctctggtctaaggttccagcgttcttttaaaaatggtctttaaagtaatagtaggtactaatatttgaatgttatctgacatataacctatttattaaatgtccacctttaaatatttttctgtgtttaaaagctacattaatttttcccctttatccatcaaaaacctgagcacatttatttgttcacarataggtcttttctcaagcacttgttgccatagatgtttttcactgtggattttctcttaaagtgaagacagtgcccttatctgccaagttgttctgacacttactgtgaaaaatcatgaatagctataatcaacttttaatgattgacttgcatccagatggttgtcagtaaagcctgatttggaatgcaaccttaaggcagaaaacgtgattttcctgtgaataaaactggcttgttatcttcctaatttaaggggaaactacakgattgataggatgtgcccctgttctcgctttcaaatatttcggatgggtagattctatagtggtggaatgtctactgacagtcaccagtgtgacattgcatgtagtayaaaatagctgggcatttgtttctgatgagaattatggtattcaggataggattgattatgctgcagtgacaaacagccttcaaagttcagtggactaaaaaacataatttatttcttgcttaaactgggtgtcaattatcagttgaagattggcagggggttctactccatgtcatctttgtgtatcatctttacgtgaatactttatgtattcaggagatctcgttcgtgaaagtgtggttgacaatttggttatcagactaaagtcttatggttgcaaagtgatatattttcaaaggtatacagtacatagatttactgataaaattatagccactcaagaagagtttctgaaatgcaggtttctatatactacttctyggaatcaccatataattagatttattaaaattagattaagtttaataagtgaaaattagatccattatttaaccagagaatttaggtactcagaaattccaattttcaaccatactgattaactgacatcttaatgtagtgagtattttattctgtttaccctgtgctcgatctcacagaattgaaacagataggtttttatattacaaatataaacttttattttaattcccattctaattaaatataaaattttcattgtttcctttcaatatgtgtatttgtgcatgctgtagacatgaatttagaactataaaattatgtgtcttagaattagaagggaacttatgaaattaccttatttttctatctgttttccacagataatgctataacaaaacatcaaaatctgtgaaataccaagcaaagaaaaattcctagcaagttagtgaactgttttttgtttatacctcagaatagaggtgaaagagttagaacatgtataatattcagatttagagcaatcaataagtgagcctacatttgcatttcataagtatatttgtatttgttttttataatatgcatttcacaccaaataattctggatttagcaaaagcaataaagctgctgccattgataagtgctgatggtccaaataatcaattagcagattaatttttagaagacagacraaacagaacataatttcacttactgggcctgtctactttgccatgagcaagtgtctgttttttagcttgcagctgtaaaatccatacgtgacttttccatatgtaattgtgatagtagttgtcaagstacatttttgcttatccagatgtttatatttaactagctctgctttatagttatctcattgaactcttaggcccagcccaaatgaaatgagatgttaaagtattgaatttttatgtatgtctcacatatttgagatacactgggtcaaattgttgatttattttttttaatgattttcaagttctcagtttagaagcaygattggctgatagtttctatgactcaagatgaaatgtattcactgcttaaytgaatgcaacagttgtgttttgtttacaaaatcttatctaaaatgaatgctttctgccacacatcaagtcagctactgtaggcaactcttttagtccagctagcaaatgggcagaatgcccacacaattaagaggaaaattaactgaaaaaaaaaaaacaacagagtgagcatcactttccagtaaattggatgtccttgtgttgatgtccataaagtagtttattcctttcctttctttattggtttatttcctctttcttccctttcttagtttcttttttaatatttcatttttattttgtttcagtattttatatttgagccccatttttgtagaatagatttaacccttcttagaagccaagaagttagccttttaaggcatcatggatgctggcagaaggcataaggctcctgggttcagaagcaaaactctacttgtgcacagcactgcaagcagcatgagtatcaacatgtgcatggattcttcttgtcctcaagtcccacaggggcaatgtgacatagactcaggtggacactgctcatgcagtggctttgcatcacagttgaggaacactgggcttgggaayccattttacacygtgaacagtaggcaagcctgctctttgtcccaatgggaaacattacctcatccctcaaggtggcttgaagcaaacataatgtgagaagtagcctgggtaaaaagtggttgtggttccacagtcttggtgcacacacggcagcacatgtaggaatgaagagacccatgaaggtctgtatctcataacatctttatgtgtgaaaattacaaatgttttgacatgcatgactctattttaggtgggtatgtgtgcatatttcttatacatttttggcatatgactaactgaatgtgtatatggtaaactgttaatatgcatctacctattttcttaatccagataatgctctagaacttcagcatcaagtggattattaacatcaattaattatggttcagatccgttgccttaaaaaataaccttttatggctcagtaaagtttgtctgcacaacagaacagggatgatagagtgttggctgtgattttactttcagaagtgagtacagattgctatgattgatcacaaatgtcacggtaaagtgccaacgctgacacttgaaacacctcagttgaaatgattggtttgtgacatgcatggaaaagtattccaaatttgtgatgaaaaatgacattctctgatatcaccctgtcggaatattttcatctcttattcaatgttttcttcagtgttgatactctaaattggtactgcttttcccccacttccagcttgataatcaggtcctaaaagatagctgcaaaatgtgtctaatcagcctacaattttcgtagttatcttctaagaaattggatttcatcagtttgagacatttggataaaaacaaatgactagaaactaccccttacttgtacccattgttaatgtaccagaaggtgtaagcatttatccacatttacatctatttaaaaaatggaaatttagatgactactttgggaaacacaggttaagctgtagaagcaatgaactaagaggacaaaattgtctgtagtcctcaagtgctgcgaggcaaagttggagtttaattaaattatttctagagtccctagaagacagggtctgcttatatcaaaagcatttttcttcaaattatcccaagaacacgttctgttgctcagtgtgctttctgttaatactgctgaaacaagaacaagcaaaaacatcttttaccataagccaaacttgcatttatcatagttcataaaaacaaagagaagctataaaagttacagagtggtaacaactagagcctttctttgagataaagaaaatcagggagcagaatattatagggcagggagtaatgataggtgggtgagtcaacgtgtgagggtgatattggtagtagctagggtgggggcagtactgtccctatagctgggtcctgggggactctaccttggtcccttctctggcactgctctggccatgccccactctacagatgagaagtccatggagataactggaaatgtcctcctagagtctgaacacaccactcttcttgactgtgaatgaggaatctggagcttttctttacttagaatataattatatagcaattaaaaatcatcatgacaagtcaagaaaaacatcatggaagaaagaaaaaaactttataccttgaactgcacttttttcctgctttttaaaaaggggccttgcatttttattttgcactgtaacctgtacattctataactgaccwtgtatgtagccattctttgtgagaaactacttctgcttattctcaaataaagatacgatagctagcacacaggatataagcatccccagcaattccactccaaggaaaatatctaatagaaatgcatacattcatctaaagccatgtacaagaatgttcacagaagttccatctctcatagcccaatactgagaatcatccaaatgcacaattaattctggaaacagagtacatccacaaacaacaagatacattaatctcccaaagataatgctgaatcagagaaaccaaatacagaagagtacacacggtgtaatttcatgtatatgcattttaaaaataggcagaactaatctatggtgttagttactgtggtgttagaagtcacagtaatggttacactcggtgggggcaggataagtactgaaagaggaataaatggaactttyagtgtcctgataatattttctttcttaatctgggagccagtgttaatytagaaaagctcatcaggttgtaacttaagatttgtgcattttctgtatgtatgttatatgtcaataaaaagttaaaaaaaatacagtagtaaaaaaatcttgcattcttctattcactgctactcgcctactgttaccctccagaggcttaggctatcttttcttttaatctctgtttgcgtgtgtctttatgtttgtgtgsttttgtttttgtttttgttttgagatggagtctcactctgctgccaggctggagtgcagtggtgcaatctcggctcactgcaacctccgcctcccggattcaagcgattctcctgcctcagcctccgatgtttgtgttttaattttcagatcaagtaccatgtctagaaggctatgactttgggaaggaatgcagtttgacaaatcttaatctttctaatcagaagattgatggtttacagaaatttcacgtgcctttcagtgtcataaacactactaaaaattccaccaatttggtctctgaccaagaaaaataaaaaacatgacaaaatctaaacataaatgcttgttactgaaaagcttttccattcaatttgttgttgtagttaagatcccaagaactcaacagccatgttactttgctgacctatgctggcacagttggaggccagtatttgattttggcaaagagaaatggaaagtgtgtctttttcagacagattctatgtttatcctgtttrtttatgrtagttaaaaaattaagttgttcacccacagaggcttccctttttctcagtgacctccattttgtaatcttcagtatattgaaatacttctcctggcatccacagcaaagagctttctaactaaataaacttagcagtcaaaggtctggtctgtacgtacccttgagttattttcaattctcctgagactgaaatcactatagcaatgacattttattctacctagatccttattggagatgcctattaatataacatttatcagaacagattagtttattttggtgttatagtaacactttttacggaaattcaaactgtcccacctcctttacacagccttttctgtcttgagttctttcctctatccacagacaaaaccgtctagctcaatctgttttagtagaggaaagtacagaacaatttgaactaaaaatttagaataaggttcaattaccctctcagacatctagtagcccaaagctctgtcacaaggtaaggttttgagatccagggatgcaactgggagtgtagctaaacatagagctaagatgaactaagaactactttatggatcaaagaaatggaatgaaatgaaatggacaggatagcatagagtccaaataatcaattggatacatgtaatctatacatgtatagatgtgacacttattaagatgtgtcaaagacaggagaaatagctggaacatgtgcgaagaaccaggagaaattccctgaaccatgagagaatatgggaggaaatcttttctagggaatttatggccttcctgttaggtgatgtgggctgattcctataagtaatggatatccgtaaagtcagaggtcacagaatcctgaattgttctatacatgttcaatggccccattcaccttctctatctaccacttttctcttaagcatgattagttcctcttactgaaagagtctaacaatctgcctaagttcctgaagattcctggcaacatacacaaaatggagaaatggcatctttctactttttgtttactttcctttgcccatactggcttattaaagactattaacataaagcaaatccttaatttaagagatacattatttttcttaaagatctgtgattatagcyaagtagtaggtcccaaataaatgacaaaaatgctggctggttttacatcagcatagtatgggtgagtttaagtgcamtagtcttctcaaatctctaggagggtaattgacttaaatgtgtcacttcatttgtggatagcattacaaatcctttttccccaaaactacgtgttgcttctttcaaagaaaacgctgtactaccattctatttttttcttttacttttcccctcaactagcataaaccctttttaattttcagtttttatgctcctccttcatgaagctatttctgatcctctctgttaaaatgaatactcaaaactttgtgctcacatagtgctttgtttatatctctyctatggctttgcactataattatttatatacattcttgtcttttctagcagttggcaatttctttgaaaatggagcattcaccgtattcattcttactgcacaatatctagcatggcacctgtcttaaattaggcaattgatatgcattggagagtttcaatacgtggacaaaaaaacaatgttccaaggacagaattcatgctacagttaacaaagatttcaatccatgattgtaccagaggcaaagaaagtatgttattaaaggagattacgagggagggaaacataattttaataaatgaaatggatacccaagtagattaatattgggactgaatatatgagttatacagaaacatagcacaaatgagctattatactgaaagctccgaagattttaatattaatttctgagtttacccctttaaattagactcatagttgaaattaggaaaatcgctttcttcrtagcagattctgtgcatattcctttctccttgagttattagcatggtaggtcaatgtacttatcaaagagagatctggagctttaaacaaaattaaaaattttctgatcaggatttaaatcaacattttctgactaaatggcttttacacataggccagagggaaaaaaaaactcagctttttggtaacttgtctttctttctgacatagatgaggacttaaccatttgaccatcgggtctgtcttatagacctttatctcagctttgrtttcaaaataattttctgaaaaagaatacagtgtcttaatagtctacttctttaccagctgccaaatgaaagaaaagtgcttctatgaaggacaagtaaattttctcagaagtcttgggtgaaatacttgagatttttttctttggtacgggcttagatgtagacaggtatgagctcaaatcctggctctgttatttattctctgagtgatcataggattgtcatttaaaccctctgagttgattttctcatattgaagtaggaatcaatgatcatttttgtacagatatgtaaatatgcacagataccttcatttgtatgtgcatagattcatctctaaaaggttacaggaaaaacaggttgcaatttttccctccagggagaggaactggatgtgttgcaggtgtcaagagatgggagagagacttactttttagggtatactcttttatacctttagaacattgtaccattacatgtattattcttttaaaactaaactgcttgatttgaaaaataatgcaatatgaaataaaatttctaacacagttcctgacatggtactcagtaaatattgtcttcatcttctctattttacctccaacttaccctccctgatctggtatccataagaaaacatgtctgctcttttatggaaattttagttctaccgtattttttcttaatctatccttgtgttccattaaaggaagttttgagttttccttttgcaattgtttttaaccatagaataagctaaaatttaagwttaatttccacaattgctgagttttttgttatttatttatttattttgcctcttgttggtggggataatataccttaaaaactaaatgtttacactagtaaacaactagaatagataaatgctgaagatatttatgtttctagaaaatctaaactttaataacatagcttgtctgtttttggtaagacatacagatctaaaagcctgatgataatatattcctttaaggaacatttatgctgtctactatatatgtgtctgataccctcactctcgtgttacttcatttgacttaatcagacacatttccttctccttgcagaggtaacattgcaggagacagataataaacaataaagtaataaataagtacattccttagtatgttggatggtggagtatgctatggaaataacgcaaaggcaatcacggggaggggacatgagagtgctggcagagtcttcagctttaactatggtggtcagagtggccttgatgagaaagagatggagcaaagacttgaagtggatgagggaacaagccwcacagaacctgggggaagagtattcctggcagaggaaacaaccattacaaagactgtttaagcaggagcatgctggtatgttcaatgaatagcaggggagccagggtagctgcagaaagtgtgattaagaggaggcgtgggaggagaggaggtctgtaataactgggataaggctgtgtagagtctcttaagtcgtattagcaagctcagtttttaccttgagtgagatagggaaacatggatggtttttggcagagaatctgactgctgttcagaatagatgatggaaagctaagagacgaagcaggaaataatatttattggtgtactataggcaagaaattgtgtcctaagtcctggatttctatgtgaggtgaaggagaaagataacgcaaggataacttaaaggtgtgtgggttagcaccttgaagaacatgccaccgttcaccaagatggggacatcagaaatggagggtgaaaccctgggaggtcatttatcagcatattcagtgttagatgtctattaattatctaagtggagatggtgatgggatagagagctttaggctaaagatataaatgtggaagccatttataaataaagsctaaataaataaataaccaaataaagcctaaataaagacttgaaaatagtcatcccattttagcccccaaaacaagccagggtatcctggttgattctaagagaagagtgcagacctggtagaaaaccaaggaaaagacagtgcactgaatcggggtgttttctctgaggtcacttcagaatgaggtggccatttacagattgtgggtttgggacaagctctttttttctgcaggggcttctgtcagggaagtcaaataactggcactttgaacttgaggcctggatgagatgctttcttaaaatctttgaaatctttgtgtgagtgtgtgagcacactgtgtatgtgtgtgtgtgtgtgtgagagagagagagacagagagacagagagaaaggaaagaaagaagaaaaacaagcaaaacaaacaaaaacctagtacagacactattactttaaagatgcaagcagttttccatcttgcaaaggtaaagatagaaatacacttttggtactgaatatttctttgtccagaaaataaccatragtattgacataatggtaaagcagaggccatgactacaagtggaggtgttaaaaaaagccaagatgagtcgaatgctctgctctgagtgattgtgtataaaatagtatggagtctggagacaatcaaattatgttataattaagtacaatwgctaggaagattgaagccaatttgcagccattagtaagagcaaatcaacatacaatgtatttgtgtatacttataatcctgagttttcattttaaaatatttgttcatattttctttgtaaacattatatatatttcattgcatatgaataagattccctatattcatatattttatagtatgatgcaaaaatataaacaatattttcaattaaatttcagtgatggcttcaaaaatattgattaaaaggccaggcttcatttctcatgcctgtaataccagcactttgggaggccaaggcaggagaattacttgaacccaggagtttgagaccaacctgggcaacataatgagactttgaatctacaaaaaatattaaaaattagccaggcatggtggcgtgtgcctgtagtcccagtwacttgggaagctgagataggaggatcacctgagcccagggaggttgaggctgcactgagctgtgattgtgccactgcactccagcctgagtgagagtaagactctgcctcaacaaaaaaaaaaaagaaaaagaaaaagattaagagattactatgtatttggacatagtaatgtggtctttggatattcttgacagagataaaatatggtcgatggtctttggatattcttgccagagataaaacatttaatatcttaattactaaatataagaaatcataaatggtaatattgtaattctggtaccacaatacccaatttaattgttatcacaattaattgataagtatattgcaaaaacacaataatagtttagaagacatagacctgtataaaatgctaaccttgtcaattaggctgcaaaatgttttaagtgtaagaatttttagaggttggagcaattttaatgacaaattttctagttgttttcttatcttagaagaaacatattatactaatattgtaagaataaaattcaaagatcacctagttaggtctgctgcttatggcatctgaaaaccttcagaattatttcctatttaaattatgtatatgtactgtgaagtggttagttggtatagtgytgtatatctattaaatgttagccagggaataaggtgataactattaactctaatttatagtgaataagcaggaattagacctgcctgcttaatgttaaatttccaccaaaatgcccaaacaaaacaaccttgaactgtgactatacctgaattgaccgtgtccttgcaggtggtgacattgtaaattgaattatgcacactcttaagtggatgaactgattcatgcagaacattcaggtgtcaaccaatgagtattatgggcctatttgtatataagacaatgtatccactccatagtccaattataaaacataattatagttgcatttattcttcatatgcagtttgtacatgtattcacacacaaacatatgtgaacgcatrtatgtgcatatacatattgtatattcaccttatcctgcataggagtctaagggacagagaaagtgtcttattattctggagccctgaacctctcttcagtataacacattagaatctctagttataggtatgaaagagtctattgactttcttgcaaaagagttccatatgaaattatgttatgtaatatggttccatataaatgatgactatttctatattttaaatagaaaactcagtataaattaacttagtttttttgtgtgtgtttgttttgtttttcatttttgagacggagtctcgctttgttgcccaggctggagtgcagtggcgcgatctcagctcactgcaacctccacctcccaggttcaagtgattctcctgcctcagcctcctgagtagctaggactacaggcacgtgttaccacgccagtctaattttttgtatttttagtagagatgaggtttcaccgtgttagccaggatggtctcsatctcctgacctcgtgatcctccctcctttgcctcccaaggtgctgggattacaggcgtgagccaccgtgcctggcctatgtttaggtgatgttttttgcttcagaatctttgaaaaatctttctttacaacaaaccttcatgacacgtgcttacctatgtaacaaacctacaaatatacctctgaacttaaaatttaagaaacaaaaaatactatataaaaacaaacaacaacaacactttctgatttgtctaccaagtctggtccaggtatagtacaaagaagtgaaatgttctcagccaaaacataaaagattgtttaatagttataaaatgaacatttaacacaaaatttctgggagcaaatatgagaaaattctgctaatatataaaagataactatagaaaagggccgggtgtggtggctcatgcctgttaatcccagtgctttgggaagctgaagtgggagagtcactagaggctaggagttccagatcagcctgggcaacatagcgaggcctggtctctacaataaataacacttttttwaaaaaagtagctgggtgtggtggcgtgtgtctgtagtcttagctactggagaggctgagatgggaggattgtttaagcccagaggtttgaggttgcagtgagccatgattgcaccactacactccaagcctgaatggcagagaaagaccctatctcaaaaaaagaggataaagaaattttaccaaatttgtagcttattcaaagaaagtgtcacatgtgaacacaataaagcaccagagtaagaatagctttctccctatcaattgctcactcagtgaagttacaaagaaaatttcayaagtaagagcttatgctttatgggggtgatggataagataaaactgcatgtcacacctgtttatcaaaatatatgaccaggccaggctggagtttctggggctgctgaatcttcagggaagggaactatgaggtagattggagttcccatatgagtgtaccatgggactaaacaaagacgattaacaatggggatatcttcaaagatgacattaaaacagttattgccacaaatattgctgtttttatagttagaaatttagaaaaatagcctctgtatacaagcacaactcatacaaatgacttcatcaataggatgctgtggatgaggagttagaaatcttggcttcttgagccagattggctacttcttggtcttgtaatttagataggatcccaaatcgcttgaattttgcttctctccttaataaaatgaagggaattattcatgtccatgttcctctctataacgttgtgagaattgggattgaaagtgttgatgtttataagagtactttgaaggagtaacatactattgaaaacttaggttttattattaatgaacagccaaattcctgtatgctcagcaccatactaaacaatgccagagcatgttagaaaacagtttacactttcgaagcttctaggaggaaataacactttaagtcagagtccagagaacaggaagacaccttagaagttaaattacgtatccaaactctccattttacaaatgagaattctgagacctagaagatccgtttgatttatccatgattctacaactagcctggcataaccaggcatyatgactctaaaggagaggtaagagaaattctctacaatatatccatttgatctgttaaaacattcatcatcattaaattatttttaatacccagatttcggttaacttccttctgttttaacatcagggctacagaaaagctagctattgtcccttacattctagctatttaatttatatataacatagtcatgcaattttcacagaaaaccctttcttaaccacttttcctcctacttaaaaatctgaagatgctacatgtagttaagggctagcttctcttttgtattctgtttctaatttcaaacttcccattttctgcagttttacaagaggtatttcatgaagtgagttttatgagacaaggtgcccttggcttagtttaatgccacatgagaaaggaggtgtcggaacccaaaatagcctttagaagctttattcttcagtattcatttcacttggaggctctttgaaagwtttgacagcaaactagtcttcagtgatgagagcaggcattacccatgcagaagttatggtggtgaattttattagacatactttctgaagaataacatttaaattggatataatttgcctgaaagcaaatagaagtacagttgcatatattacaaatgaccttaaaagcagccatttgcttattttgaaactcttctgacaattttataaatctacaaactgcatatacttcattttaacgtttaccttggccttgtcataattcaacaatccycataaattgttctttaatgaaagttgcattttacagtataatctcagccatctatgcccaaactacgcagcargagcttgctttatcaggattattctgaggcatatttacatctctagaataaagtaggatattgaatatatgattatcattccctttgccctaagtaaattgggtttaggactttagaaaatgaaaactcttctccctctttcacaaaacataagaataattgcaaaagtttcatggaatctacatggagtagacctgctaaatcaaaatttcatggagtgttaatatttttaaaatgctctacaagagattatgagtgggcaggttttggaaccactgtcatagatggaagtagaatatttaatttcctctgaaagagggaccagcccttgccttttaactcccaattgttcaagatttrgaagtgcagtaggctccagcagatagaacaggacttgtagaactcaggccatttttatgtgagcattttaacacaaagaattgaattgagtcacttttcaaagcagttatgttctgatgattatttgagttacatattattacagtaatgaaagcatcttattcaaattaagtaagcttaatttttgttgaatctagattgtgtttgaattttatagctcttttaaaaagtaattttcaagaatgagatttttattgccatacttttgtttacagaatggaaattcatggataagagcatctagtttatactgaacattttctcaggcaacttgagaaataaaaaagtaatatgaaatgaggtagggtaaaaaaaatgcacctttgagaaatacaaatttcattgaaagtcttcacaatctattaaacaagtggaagtggttctattcattgtgtctcttttagttctactaaaggactcctagtaacacaccctgtaaaattttcttttatgcagtggtacaaagaagaggaaatatgccttgaggttagggcaaggttatccttttgtaaacatatagaaaaaaaacatcttcagcacaaatccatgaggaagaatttaattaaaattcatattcttcagaaacacactgataatcatcaacagaaaataaggctaagagtttcaagcacctcattaaattcagtctagttaccactgaaatattggttgctactattgggtgcagtcaggcaaaataaaacagatgacttacttgtctgtcatctcaagcccttgccttctggttaaaaataaaaccggctgggcacagcgggtcacacctgtaatcccagcactttggcaggccgaggcgggtagatcacgaggtgaggagtttgagaccagcctggccaatatggtgaaaccccgtctctactaaaaatacaaaaattagccaggcgtggtgtcaggtgcttatagtcccagctacttgggaggctgaggcaggagaatggctgaacctgggaggcagaggttgcagtgagccgagatcacaccactactctccagcctggatggcagaatgagacactgtctcaaaaacaaacaaacaaacaaataaataaaaccatatgcttagtggaagggtggaatcagtgatagctgatattgtgatgagtaaagtggttttgattacataggtacttatgcaagttaaaattctaagtgcagaaccaacaagaaaagaactctcatgttagatcaagaaagtgaactaacatttattaaaagcattttacacgctcatttcatgaagtccctgtgaagtgagtgatattatacctattttacagatgagaaagctgagacccaaagatggcttatgtaattccacatcaaacagttactgggtgttagagtcagggttcacatgtaggtgctgccagctccagcatcctcacttctcttgtggcctcattcaaggcagtaagaggatgaactcaatggatccaaagtgtcatgcatctttgaatgactgtctcttctctgtagacttacctctgaaatgatggcattagaatattttaatccattcaaactgtgctaatagtgtgcaggtcttgctgaaggacatttaaaaaatggaggatccagtaggaacatacctatgtgatatagacctaatggctctggaacatcaaatgacaggtaggtcattgaggatgaaaattgacaaaggtagttttggtttagtgtctaatattttgacatagacattactaataacagaggggtatcacactttcttttttttwaaaatcctatatttacctttagtgcactgaaaaggatcattttgctttttgtcaaaaaggtaacaacattcattaagtccaatttgacataactctatcctgtgatacttagaataggcgacctttttagatcagctgtygaaggttattgaccatggatggggaaaggaaatgaagcagctttctaatgatagcttctgtttcttcccaagtgctctggcatctgaaagtacaaaaggccattctccaaattatttggaaactctagtgaaaagctaatttctagattctaagggctaatttttacagtggagaagatgaaatgacatgttatttaccaaaagttttaggtaattaataatttcatgactttgaaaatgacaattatttacattctgaagattccacacacactctaccatttagatggtaaattgaacataactctgtattataatgtggttaactaagtatgtttcatataatgtttacatgaaattaactgtgaaactcttaacatgtaggatattttctttctttccacttaatgttctgctttattttgtatgtatttctttcctttgaaagtcacaatctttcmatctttttctgttcaaatcctttccctacctttgaggttgtgcacttcacactgtacatataaggcaaagtgtatacattaaactccagataaggaaaatacaacctaacatgtatttaccatttactatgtaccaagtatttaccacttacaatgtactcttctaaatactattttatatgtgtattttattttaattctcatagccactttgtatcatagggacttttatttttattctttattttttttttaaaaaaaaaagggatacatgtgcagaacctgcaggtttgttacttaggtctatgtgtgccatggtggtttgctgcacctattgatccatcctctaagtttcctcccctcacaccctacccccaacaggccctgttgtgtgttgttcccctctctgtgtccatgtgttctcattgttcaactctcatagggacttatatatatatatatactttaagttctggggtacatgtgcaaaacgtgcagttttgttacataggtatacacgtgccatggtggtttgctgcacccatcaacccatcatctacattaggtatttctcctaatgctatccctcccctagccccctacccgctgacaggccctggtgtgtgacgttcctctccttatgtccatgtgttctcattgttcaactcccacttatgagtgagaacatgtggtgtttggttttctgttcctgtgttagtttgctgagaatgatggtgtccagcttcatccatgtccctgcaaaggacatgaactcatccttctttatggctgcatagtattccatgttgcatatgtgccacattttctttatccagtctaaaattgatgggcatttgggttgcttccaaatctttgctattgtgaatagggccacaatagacatatgtgtgcatgtgtctttatagtagaatgatttataatctcttgggtatatacccagtaaagggattgctgggtcaaatggtatttctggttctaggtccttgaggaatcgccatactgtcttccacaatggttgaactaatctactctgccaccaacagtgtaaaagtgttcctatttcttcacatcctcttcaccatgtgttttttcctgacttttaaatgatcaccattctaactggcgtgagatagtatctcattgtggttttgatttgcatttctctaatgaccrgtgatgatgagctttttttcatatgtttgttggccagataaatgtctacttttgataagtgtctgttcatatcctttgcccactttttgatggggttgtttatttttttcttgtaaatttgtttaagttccttgtagattctggatattagcccattgtcaggtggataaattgcaaaaattttctcccattctataggttgmctgttcatgctgatgatagtttcttttgctatgcagcagctctttaatttaattatatcccacttgtcaattttggcttttgtcgccattgcttttgatgttttactcatgaagatttgcccatgcctatgtcctcaatggtattgcctaggttttcttctagggtttttatgatttaaggtcttacgtttaagtctttaatccatcttgagttaacttttgtataaggtgtaaggaagggatccagtttctgttttctgcatatggccagccagttttcccaacaccatttattaaatagggaatcctttccccattgcttgtttttgtcagggttgtcaaagatcagaagttagtagatgtgttggcgttatttctgaggcctctgttctgttccattggtctataaatctgttttggtatcagtaccatgctgttttggttactgtaaccttgtagtatagtttgaagtcaggtagcgtgatgcctccagctttgttctttttgcttaggattgtcttggctgtatgggctcctttttggttcaatatgaaatttaaagtcattttttctaattctgtgaagaaagtcagtggtagcttgatggggatagcattgaacttataaattacctagggcagtatggccattttcatgatattgattcttcctatccatgagcatggaatgtttttccatttgtttgtgtcctctcttattttcttgagcagttctccttgaagaggtccttcacatcccttataagctgtattcttagttactttattctccttgtagaaattgtaaatgggggttcactcatgatttggctctctgtttgtctattatttgtgtataggaatgcttgtgaattttgcacattgattttgtatcctgagactttgctgaagttgctcatcagcttaaggggattttgggctgagacaatggggttttctgaatatacagtcatgtcatctgcaaacagagacaatttgacttcctctcttcctatttgaatacgctttatttctttctcttgcctgattgctctggccagaacttccaaaactatgttgaataggggtggtgaaagaggacatcctttttttgtgctggttttgaaagggaacgcttccagcttttgcccattcaatataatattggctgtaggtttgtcataaatagctcttattattttgagatacattccatcaatacctagttcattgagagttttcagcatgaagccatgttgaattttattgaaggccttttctgcatctattgagataatcatatggtttttgtcattggttctgtttatgtgatggattacgtttattgatttgcatatgttgaaccagccttgcatcccagggttgaagccaacttgatcgtgttgcataagctttttgatgtgctgctggattcagtttgccagtattttattgaggatttttgcatcgatgttcatcaggaatattggcctgaaattttctttctttcttttttttttggtgtgtgtgtgtgtgcatgtgtgtgtgtgtgtgtgtgtgtgtcttccagggtttggtatcaggattatgctggcctcataaaatgagttagggagaagtccttctttttccattgtttggaatagtttcagaaggaatggtaccagctcctcttcatacctctggtagaattcggctgtgaatctgtctggtcctgggttttttttggttggtaggctattaattactgcctcaatttcataacttgttattggtctattcagttattcaacttatttctgatttagtcttgggatagtgtatgtgtccaggaatttattcatttcttctagattttctggtttatttgcatagaggtgtttatagtattctctggcagtagtttttatttctgtgggattagtgatgatatcccctttataattttttattgtggctgtttgattcttctctcatttcttctttattggtctggctagtggtctgtctattttgttaatcttttcaaaagaccagctcctggattcattgattttttgaagggtttttcgtgtctctatctcctttagttctgctctgatctttattatttcttgtcttctgctagcttttgaatttgttttctctagcttctttacttcttttaattgtgatgttaggatgttgattttagatctttctgctttctcttgtgggcacctagtgctataaatttccctctaaacactgctttacctgtgtcccagagatcctggtacattgtgtctttgttctcattggtttcaaagagcttatttatttctgccttaatttcrttatttacccaatagtcattcaggagtaggttgttcagtttccatgtaattgtgcggttttgggtgaattttttaatcctgagttctaatttgattgcactgtggtctgagaggctgtttgttttgatttcagtccttttgcatttgctgaggagtgttttacttccaattatgtggtgagttttataagaagtgtgatgtggtgctgagaagaatgtatattctgttgatttgggatggagagttctgtagatgtctattaagtctgcttggtccagagctgagttcaagtcccgaatgtccttgttaattttctgtctcgttgatctgtctaatattgacagtggagtgttaaagtctcccactattattgtgtgggagtytacatctctttgtatgtctctaagaacttgctttatgaatttggatgctcctgtattgggtgcatatatatttaggatagttagctcttcttgttgcattggttcgtttaccattatgtaatgcccttctttgcctatgctgatatttgttggcttaaagtctgtttatcagacactaggattgcaatccctgcttttttttgtcttgctttccatttccttggtaaatatttctccatcactttattttgagcctatgtgtgtctttccacgtgaaatggtccctgaccaccttgcctcctgactgggaggcacctcccagcaggggtcaactaacacctcatacaggagagctctggctggcatctggtgggtgcccctctgggacgaagcttccagaggaaggagcaggctgcaatctttgctgttctgcagcctctgctggtgatactcaggcaaacagggtctggagtrgctccccagcaaactccagcagacctgcagcgggaaaatgaacaaatgaaaaggaatagcatcaacatcaacaaaaaggacatccacacaaaaaccccagaaaccccatgcgaaggtcacaaacatcaaagaccaaaggtagttaaatccatgaagatgaggaaaaaccagtgcaaaaaggctgagaattcccaaaacccagaacttctcttctcctccaaaggattacaactccttgccagcaagggaacaaaactggacagagaatgagtttgatgaattgacagaagtaggcttcagaaagagggtaataacaaamtcctccgagctaaaggagcatgttctaacccaatgcaagaaagctaagaaccttgaaaaaaggttagaggaattgctaagtagaataactagtttagagaagaacataaaagacctgatggagctgaaaaatgcagcacgagaactttgtgaaccatacacaagtatcagtagctgaatcgatgaagcggaagaaaggatatcatagattgaagatgaacttaatgaaataaagtgtgaagacaagattagagaaaaaaagaatgaaaagaaatgaacaaacccgccaagaaatataagactatgtgaaaagaccaaacctacgtttgattggtgtacttgaaagtgagggagagaatggaaccaagttagaaaacactcttcaggttattatccaggagaacttccccaacctagcaaggcaggccaacattcaaattcaggaaatatagagaacaccacaaacatactacttgagaagagcaaccccaagacacataattgtcagattcaccaaggttgaaatgaaggaaaaaatgttaagcgcagccagaaagaaaggtcgggttacccacaaagggaagcccatcagactaatagtggatctctcagcagaaaccttacaagccagaagagagtgggtgacaatattcaacattcttaaagaaaagaactttcaacccagaatttcatatccagccaaactaagcttcataagcgaaggagaaataaaattttttacagacaagcaaatgctgagagattttgtcaccaccaggtttgccttacaagagctcctgaaggaagcactaaatatggaaaggaaaaactggtaccagccactgcaaaaacatcccaaattgtaaagaccatcgacactatgaagaaactgcgtcaactattaggcaaaataactagctagcataatgataggatcaaattcacacataacaatattaaccttaaatgtaaatgggctaaatgccccaattaaaagacacagactggcaaattggataaagagtcaagacttatagggacttttaaaaatctccttttgtagatgagtgaacttaagcacagaaaagttaagtaatttcctcagcgtcaagattcaagtcagtatgatgtttatagtcatccactccctaactgtgtgatctcagctaagtgactaagcctctctatgcctccatctgctcatctgaaagaaggtcagtggggatacaaaataaatagatatgcttcaaagacttcacagcccccttggtggagatgttcagtgagcaggtaaaaaggtacctctggaatttaagaggcaaggtggagcacaatgtctggaaactagccacttacagctcccagtggaagcccagtgagatctccaggaagaacacatggagcaagatttccctatggggccagggaaggaagaaatattcagaaatgaaagggatgctgtaaaggactgtgtgggagagaggttcaagaaactggagcagaaccaagagagtgatgctagagaaaccaagaaactagtcagcaaggccaaagataactttttatattttgaggactaaaatcagatgactatgtttggcaatgaggtcatcactgaccttttgagagacccctttctagagctgcagcgatggtagtgggattgccgtgggttcagaggcagagagggcaggagggcgacagaggggacagtaagcagtcttgcagaaagagacggttgaagccagagagaaaacagctgagagaagggcttgcacataagggtcatttatgtgtgtttcttaataacatttaaggatcagagaaataatgagactgagaaggctagagagtgataaagtaagatagaggagaaagaagtaggcttataacccttctgaaaatatttacattttaagaaattattcagtgctgtaacccaagaaataactgatggtatttttttttttttaagactgagttttgctgttgtcacccaggctggagtgaaatggcatgatcttggctcactgcaacctccacctcccaggttcaagtgattctcctgcctcagcctccttagtagctgggattacaggctcgcgccaccatgcccagctaattgttgtatttttagtagagatggggtttcaccatgttggccaggctggtcttgaactcctgacctcaggtgatccacccacctcagcctcccaaagtggtgggattacagacgttgagccacgatgcccaaccgagaaataacagatggtaatttgaggttcattcaacaactaatgtttattaaatagtcacagawggtaatttgaggttcattcaacaactaatgtttattaaatagtcattatatatcagacaccattttaagtgtggggaatataacgagcaaaaacaaaacagaaaacaacccgctttcatggaactttcgttgtggagtctttctaaaataaacagtaagcatgcaaattaatggatagaaaatatgtccagtggagataattagtatgaagaaaactaaactggaatccgaaagtaggagtggtccctggagtggtgatggtgctttgcagataggagatagaaacccctatttggtaattagacaggccaggcctggtggctcacgcctgtaatcccagcactttgggaggctgaggccagtggatcacctgatgtcaagagttcaagaccagcctgaycaacatggtgaaaccccctttctactaaaaatacaaaaaattagctcgggctgctggcgggtgcctgtaatcccagctactcgggaggctgaggcaggagaatcgcttgagcctgggaggcagaggttacagtgagtcgagattgccccattgcactccaccttgggcaactagagtgaaactccatctccaaaaaaaaaataataaaataaagagacatttgagtataaatctcaaggcagccagagattcaactttatgaatatatggatagaaaaagtttctgatgaagaacagtgagtgcaacaatctacaactgcagagattttgacatattcaaggaacaactaagatgccactatggctggagtgaaatttgagagcacagggaataggaggttggcaatttaaattttacagccatatataatcatytactatgcctactggtaaagacagccataggaatgtatcacatgtgaattacagtttttatttttgttgtgtataatttttttacccctgctggtagttgtttatatttgaagttattacttagaccactttaagaacctgtgaaagctgtggattctttccctagagaaaagcccatgtttacacaaagaaaagaagttgcttacaattttgtagagttcttggaactctagaaacccttccataaagcccaggttaaaagctcttgctatggaggatgagttgctgtccaacaccattcttcaatgttactttgattctaaataatgcagagacccttacttacctgtccttgaagagtttagcactggtttattgtcacagtctctagaagtatttcatggtggttcccccatggaactctggcctttcagttccttgatctcctcattctagattttctcctcactctcttaaccacctgctcccgtggtcatcctctagacctaataaccgtaccccttccacaatctcaggttctagcatctcagtctccagccttcaagttgcatctcrtccttcaagttccctccctctcgtattccaactccaaaaattcttgatcatagtagaacttaaaatctgttcatctcaccacttttttttactatgtccctgaactatacctttatttctctccccaacttatactcaataatccatcattgcaataatgaccttccatgtactctcaatgccctcgttccatttctttctatgttattcttctggcaaaacccaaataatattacaatgaacttttaaatgattcacaccagcactttggtggtgtcattgaataaaaacaaactcatgcttaatattctgtgtttaaattcaccatcaacctcaaataatcccttaatgtttcctggcaatcattccatgttttcctactgctacargctkaaatactctcttagaatctatttcacaccttcttggtctctgccctgtcactcttagatatagtctttgtgactttgcttcttatttcactgacagaataaaagcaatcagaagagaacttgagacatttcccgcacatctacctccctaacagcacctatattcgcatattctaccttcattcctataaacgtagaagagcctgcctgttaaagccatagcttctacttaggtgctaaatcgcattccttctcacctttcactttactccagacatcgctccctctcttcactccatcagtttgtcctattggtttagtgctttcagcacagaaacatgtttttatcttttctacttagaaaaagccctcctcaacccacatttctccccactcttcatcatctataacaaagtcctaatgtgttgtctgcagtgcattctctacttcctattcctccatacttctcaaacccactggaatcaggctttgtccctgtgtctccagccagtcttcagtgaccttgtgttgttaaacccagtggtcatagctcagtctgtttataaaaactgttagcagatttagaggtgatgaaatactccctcctttttgaaataatttcttcacttggttctaccctcacctcactcrttggccactccatctcaatgacttctgttgatttttcctcatctccttaccattaaaatttaaagtattttcaaaaacctctgctccrgccatgctgwcctctttacttttccctgaacactcaagcatattcctatttgagggatttaattgacttctgaaaataaatttttctctgcctggaatgctcttcctgcagatatccacattgcctacattttctttcactcaattctctactccagtatcacatgatcactttttccaatacacttcgacttgctccttccaaccagtcattccctctctcccttacactcattaatttttccacagcattgatcatcatctaacattacatatttactcatttgcctcttttctgtcttgttcaaagaaatgtcagctctactaaaacaggaactttgttttatatacsatagtgtccccaggacctagaagaattcctagtcagctagatattcaataattatttgttgaatgaatgagagatagtgaaccaatttagcatcacaggtatctctgttgagataatgtttactcaaaatagtctgtgagctttttaagcacagagataatatcktgtttacattacaaataaatgagagccttaacatatgcttttaaatgttgaataattgaaagactgaatcaccaatattcagaaaaaggtaatgtgtgtgcctccctccagtctctgatcctaatccccacatggactttttttattcagggcttctaactcactcttaccaagtaactgcagggatagtctttaagaaaaaattattattgtgataaaataacataaaatttaccagcttaaacatttgtaagcataccattctgtagtattaattacattcacagtgttgtacaaccatcaccccatccatctccagaactatttcctcattccaaactgaaactctgtatccatttaacaataattcaccattctctgagaacaactgttctattttctgtttctgtgaatttgactattctaggaacctcatgtataattctaagaatcatacagtgttcatcttttttgcatctaacttattttacrtagcataatattttctaggtttatctatgttgtaacatataccagaatttatttgctttttaagggtgaataatatttcattgtatgcatatgtcatactttgtttccccacaaattcatcaatggacatttgaattttttccccatttggctgttacgagtaatggtactataaacattagtctacaaatatctcttttagtccctgcattcaattcttgtgggtagatatgggtccaccattttatattctcaccagtaatgcacaagtgttccaatttctctgcatctttgctaacacttattttctgttctttttaaaaaatatatatatacttgtcatcctaattggtgtgaactgatatctcattgtggttttgatttgcattttcctagtgattagtgatgctaagtgtcttctcatatgttcatttgccatttatatagctttggagaaatgtgtattcaagttctttgccaatttttaaactggtttgtttgtttttgtcgttgttgtttgtttgttttgagatggagtcttgctctgtcacccaggttggagtgcagtggcgtgatctcaactcactgcaatctctgcctcctgggttcaagcaattctyctgcttcagcctcctgagtagctgagaatacagatgcacaccaccatgccaggctaatttttttgtattttagtagagacggggtttcaccatgttgcccaagctggttacgaacacctgagctcaggcaatccacctgcctaggcctcccaaactactgggattacagacgtgaggcagcacgcccagctgggtttttattttggtgttgttaagttgcaggagttctttatgtattctggatcttaatctcttattaracatgtgatttacaaatattttctccaattctttgagttgcttttttattctgttgatagtctcctttgatgtacaagtttttaattataatgaactcaatttttttccattgttttgtttcattacccatgtttttggtgtcatatccaataattgttgccaaatctggtatcatagagcttttcccttatgtttccttctatgattttttatagttttagcttttatgttagatctttgattcatttttactttttgtatatgttgtatggtaaagccacatatgctttttagtcacatttagtgttataggttgacaaagtatctatgtaactttaaattaattactaaccaacaagtctatattttccattactctcatacttgagacttatatcttcctatttttaattgctcagcatggcctgaatttattaccatttttgctcctgttgactagtcaaatgtatgtttgtaccctgggattttagccctgatgtgtgttaataggataggaaaaagggcagtgaattcaaagtcaaaatcttggactgaatcccagaaataactagttccatgaccctgagcaaatcattgaacctttctgagctgcaggagtaatagtgtctacctcagaatttgttgtgataacctttgtgaaagcaactggcacgtaataaacacttaaatgtttcctgaacttattgctcaagactgaagcactgatttttttgtgagtgactaacttcagctgacttggttttgcattgagggcagtcaactgtacagtgaatggaggatggaagggacaaaccgtctatgctgggggaacaaaaaaagaacaagttccaagagacatcacaaaggagtacagacgtgggatgagcgtgtgctacccaatgtacccacagaacagtgatttattttcttgtaggtttggggcaaaatatgaaacctcaagaaaaagtaacataacagatttgacctctaacatagagtatgcttggcattaggtggaaagtctaaatatttaagattacatagaaggtctctgattttcatctgtttttaattttctcatatacaggtaattatgacaactaagtaactatgttttggaatcccctaaacttagacattaagatgattttatgcacatcattttcatatttaacaraattagaattttaaaatatgcctaaatttgtatacatcgattatcttgtatgcaagttcccaaaatggaaattttagtggattaratgttgaagtcaagattcttgtgagggaattatrgttgaatagattctcctccctgttctctaatcactgagatatagaaccgttagtattatcccctcctcaacgaaactgaaataatacttcttttcctatctcccttatagtaatatattgagattcaaatgaaatgaagcatataagcttgtaatgaataatttttccaggcatcttgctaggaaataaacagtaaaaattaatagcaccacctatatttatgggtctgtctttcactctcctatggttcttaaagcagaaatgtcttccctactggtgtagcgagtctctgattgattccctggcccactgagaaaatctatgctgtgcctgaaaaggctgcacagccctactgcaatgtcaggccctacagttgtgccttggatggtgtggcaacacactgacaygctggtctgctctaccagggtgtggggcttctggtggaaatcccttggaagctggtacagtctcacacctctggcagaaacagggtgcctcagagttcgtgagatgtaatacttgcgttactatcctccttgtgttcctgggggcttcctgccctattcattgacgatagccagacctacctctccagacaaggaccctccaagcagtgctaatgctgaagatggattttttcagcgctcctccgacaggcacttaaatcttccaaagaatttcccctgcctccaagaagttgaaagaaacttttggctcttaactggtaaacatyagggcaggggtagagatgtttcttaaaaattcatttttttcytgtctgtctccagcctatgttcaacttcctaatagtctctctcttccctcttagagaaaacattccttattatagttattacttctctaatgaagaacttctctttagaactcttgtgactgagtcccattgatagaaatarctaatctcttatttggagagaagaaatgggagttttttgtttgtctgttttcatttccataaatttacaaaatatatcgaacagcattgacaataagccacaattattagtcacaaagaagagataaaccgggtatgtttttctgtcctttatatatatgtagttgttttccattgctttaattggtttataagttcaaaggcttctataaagccatttattttagatttatttgttcaagctcataaggttaaaataacatttgttttattttgtaataagtcagcagacaactttttatgagtcttacaagatgtagaatagttatattatgtataacactcagaatattgagtattctaaaacattcagataagaactcattttgtaggaactaagcatagtttaacaatcaactaacatgtaattaagatattttcaagaaatatactctctgattttatttctgggtctacagcctagttatttatttatttttgcgaaatcatttaacgtatctactttatcatttattttctaaaataaaaagaatatagtttcacctatctgtatcactggagtgttctacaaattcttttactaaactttataaaaatggtgagtgtcttaagtaaaaagcccatcaagataaaaataaaaactattggtgaatcacataactttttaattgtctaacagagtctgcctcatgagaagtgaattcagcttctgtgttagtttattttcatactgctatgaagaaaywtctgagactgggtaatttataaagaaaaagaggtttaatggactcacagttccacatggcttggcagaggtaaaagaggagcaaaggcacatcttacatggcggcaggcaagagggcatgtgcaggggaactgccctttataaaaccatcagatctcttgagacatattcattatcatgagaagagtacaggaaaaacccacttccatgattcaattacctcccamtgggtccctcccacaacacgtggggattatgggagctacaattcgagatgagatttgggtagggacaaagccaaaccatatcagcttctaatagtctggaatctatgaagtctcgagttgattctgtggcttactatgtgcccaacaccatattaagaaattttcatacaatattgaattcaatcctggtgattcttctcttatctctttttataaaagagaagacagaggtttagaaagaaaatataatttgcccaagatcacacaacttgtaagtaggagagaaggaattcaaagtgcaacgtgactttggagctcttatttccaacgattagggacagaacaccacactgtccttctaaaggtaattaccttgaaattttaaatccagagtaaaacatcatttcctagaatcctagaatggtgaagctggaagagaaattaaaataatatctagcctggtggtttataaattgcttcctagccatgaaactcttcccttatataaaaatcttacgtggaagcttaaagctataaaacatgcaaatttggagagctctatgaggagagaaggggcaatgggaaggtttgtacaactttcagcttgaggtgctttctaggtgagtgtcaaagaatccttctagatgcaagtcctaaaggaataatttgcaaaaccactgtaaaggccaagatctttattccattagtgaaaaaacaggtgttcagcaatgtagttaaaatgaaaggatcattttactccttgtcaaagtaatagactcccttctttgtggctcctctctctcatctttgatccatatagtaggaggataccgattgtattttgttcttttcattaattgttgaaactcattattaacagtgcctgatacttcataaaaccaaaaaaaagcaaagattttggaaggaaagttaatttttcatagctacatgttgatttgtaactaatcatcagacttgttctaacatatattgccttggggagaacttgtgaactattaaaaatgaaacaccatgtcccttcacagagaaataagcaagaattagagaagtatgccaattgaaactacaggagagctcgaaaattctggctgtgatctcatgaattggaattcagtcagaaggcaccagtaaatgttctttctggaaaatgccattattcctgtttttaatgatcatcttggttttacatctcatgcaacatgcaaaacatctatctgctttaaataaacagtcactcacaagtcattagcagttatttgccctaaatgctattttttgctttttgttgatagcagattatttaagcattttattagaacctattgcatgagattgaatgtgtaaatagatacattagtaaataatttaattaatgattacatattgtatacctactagtgaaataggacaaaatattttgcaaaatatttcatttgcataatagcttacatgtggaatatttttggtttagggtataccttggaaattagatctcatggagacaaaggagtcacaaaataagtaacagtgaatttgctattataaaccatcaagatcttctgtcaaatgacatgtctaaatttatattaatcataggtcttttgtaactagtccattgaaaattattcaactgaagttagctacgaacattggaaaagtgatttattgctaaaattaatagctaactttcaaaaagctggttgtattgagtcctgaaaagagcaaattcaaagcaaatatctacttattgctaatatatacttacaaacctaacaaagataaacataaattttattcaaaaatgttttttctgttccagataatattgtttcttatttttacttggatttatactacagtttttaaattttgtaaatttagaaaatattatttcttgagcctrtgtgaagctgtatttttctctcaagtcttctttggcaaatttcctcttcatcagtgcggcctacacaaagacagagccctcataccccagcaccttaggatccggcaggttacaccagctgtctgctgaatgagtatgctcatgctctggtaattatcctccactcaaataaccaacaaaaccaaccagccatgttcttgggtcacaggataaaaggaactggacagtatcttcctatattgagcttatgttgtcactaatattagggtcaatacctagcctcatgcattacttagaatattcattaattaaacagttattgtatttgtccagtcttgactatgagccaagacgacttgtatagcttccagttggcccttattttataggtcctggtgaatgaaagacactgaatataggcaacatagggcctaccagcctttaaatccaccagagaatgcagaccactgacatagtctatgctactctaaacaagaatgaaatgtgaaaatggaaaactgcttcttgatttatcatrgtcttagaatcctggagagactgaataaatattcagaatattacagtctaactctaaagaaaataatcccattacatgccaattaaataatgtgtatcatctttatttactttgtcacgccaatttttatgtttcttgatgagttactgtgcttgtcagcaggagctgaagtcattctgggcagcttctaaagaacagctgtacagatacaaatgagccagctaggaaaggtgcttaaacatacttcttacttctattgtccttttgagacctcagaaaatatgtttggggaaaattattccttagattgccacaggagtagatgaagtctacataacatcaccccattaatgcgtattatgctaattgttcaagcaaagtaacttccatttagaaatataggagtaaataaagatacacttacagctaaatatgaatagatttaagatagaaaattaaggccagaccacaatgagcattgtttagttttcmgttaacttaagcccagaaaacaaaaggttaaacagggatttagattttaaaaaaaatttaaaaatctcttttgttccctataaatttcatcatccatgtcaaagttaacagtgttggtttaataacatcaataaagacctgacagaacatgtttaggttatgtaaagatatgtttttagtttttctcctaactctgtataattctgctaagaatttcagtcagtagatcctcttacagaaatcaaaaagaatcatcttatcctgagataaggggcatattgcacaatttctttttttggcaaaagcaaaaattaccgaaatgggaaaatcaatacatgacgagaaataatcttgcattttcaaaacatgaaggcatgaaaggtaaaatgagagagagggtgatgaaaagaatatcttcattctccaaggcagttctcaacacatttttataaacataggaagaatgactaagaaaataggataatgagtaattcatgctgagaatactaagacatattgaaatcaatgtgggctgaacaaagtctttttaaaggttttaaaaaaagaaaggaataaagaagagctcatatcatatagattgcagctgagggtgactctagtgaaaattaggaccactagtgttctgcaaaattttagaagtcacagagaattatcatgttgctgcaaagctattcctttcctcctagagtctccaaggcattgaagtgagcatttggcagcagctgtggtcctgtgggtgaagttctttttattcacatgattgtcatatgggcctcaagatgaagagctccagggagagtgtgaaaccagcatgctactattgcagcatttaattttcggcaaaacagccttagcacctcctaacaatgctatctgtgaaagctgtttcttgattgtatggacttatgtgtataacattgttgatctttctaaatgaaggatattgaaaatgacaaatggcaggaatcatttctcgatatgaagattaggactggtgaggccagggaatagcatgatgtgagcggtgattttcagtaggggacaactggggtcagagggtgtgtgtaggttgaaaatgcatcattggcattgcagttttatatttagaaataacaaatataatttgatttgtgttacaaactatagggattgaaattcttggctagtgagaatacagattatagtgatctatattgaggggacatattaagtcagctaaaagtgtgagcctgaaattttcatgtttgtgaaagtagagaaaggttttaaatgtttgagaatctggtgtatttaaaagaaaatatgtattatagccagagaattctgtatttgaataycagcctggcttgttgtatgctggggcacctgacttatacttcctaagtcttattttattgatctgtaaattgggaataatcaaattttcagagttagataatcatatccatgcattaagagatataaatgcaatagtatttaaagtgtcaggcatatttacaaaaaagtgatttgttttctcccccgtctacctattcccttctccttctaactcttgctcaccttctctttctagctttctcatgtctatttattttcccacccagaatttaagcatactcaagaatcaattaagaactgaaagagagccacctccattgttcctaggtccctgccccgttaccacactggctgtctcctagtagtaaaactttctggtccacattcattatctttgctgaagggtttctgctcttgcataccttcaggctttcggacacatcactatgtatgcctctgcttttccttgttgcagcactcattgttatgtatgcctctgcttttccttgttgcagcactcatcatcttatacgatgattgccagagtacttgcctatctgcatttctagtctgtaaaaatgagaactgcatgtttcattttagaatttgccatggcatgcataatacttggtgcatagtaggtgttcaacatatatttgttaatgtaatggctgtagtcctttaaggtggatgatggtagcattgagtggagagaatgatactatgcagaatgtcctagctcaatgaatcatagttttatccaatagtactcttatcctcaaaaaaaaaaaaaaagtttgtgagaaatgttccaagagcatctgctttcttaaaaaattaagcaaaaatatttgaaacaactctggagctacatatcactccacgtgtcataaagtataaatgcatgtgagtgctarcatctggtttgtatgagaatatacttaagtgtgtgcattaagatgcactgcataagtaaacttgtctaaactccaaaccagaaatgtattatttggaagcaaggtgaaaccaaaacacaagccttttaaacctaatcataggctggtcagaggaagaacaatgaaaatacgattgtccttaaagtcttacaaaaggatgtaagtaacttttcactctttttaatgagtgtgtcaatcctacagcaatttggcagattttctttacttaatactaagccaacacatatccaaatgagacaaatgtccatgtttttaccttcaattttcaaaaattagtaatatccaatttatacaatttttaaaatgttttcrtatattcagagtctgcagtctgcataacagttactgaaagtaaagtacaatatacaatatttattgtcatgcagttttaaaaagagaataaaaattaaaagatatactcatcattcttagttttctgaatatcttctcttcaatcccaaaccagaaatgaagacaccaacaatatttttacaaatattttaggtattaacaaaactgacattgcaaattcattcttaacactatgagcttagtagaatgtgaagtactttagattagaattcaaaagacccacccttatctgggccatttaccaaacatatagtcttgggcaaattacttatttcctttgaatctcagctcactattctgtaaaatagtgataataattcctgtttgcttaattaacatttacttaatcaaatgagaaaaatatgtaaaagatctttgtaaaagtttaaacgtataatttaatacatcagtataatgcactacaactttataaaacattacactctttcaaagtttgaccacataaattacctcatttttatgttaaagtcccctgttaccctactgatcacatggatgagttagaataatctgatgtgcatcttgctyatttagaacctgtgcagtacatcttcaactcctggatgcatctgcttagcaaggtcctccaaccagatttagagacttattcaattactgctcagagacaccaggatgtctcctctgagttcacaacttccagattcttctggtttcttacctcttggtcaatttttattgcttgtaaagccacttgtgaacagagctttgccagacacctatcatcaatgttcccagtggaaatggtgatgtgtttgccaggagatgctctttcttggtgctcttaacactgcaaaccctttaagggcaaaatgtatattgaatttcccagatcctctctgccaaaaccccatagtggaccttgaaactgtagaaaagaatatttctctctcctactctgtgctgggagtctgggcaggcactaaagcatcctacatgtgccccagtgtcccagaaagtccctcactaaaatagatatcccagatatgtaatctttttctctaatagagtcagttcttgaagttgggcatggggaccattagctgagacagacacaacttgtactttttatcctcatgatcccaactcctcctcacaaggagcccagaagtaactcttcttttttcaaccaatacatgtaaaataaactggtgtggcttccttgaatggataatcagacattgctttcttttcctttctgctatagaatttaacttttaattatatgcattttgcttttatttactaatatttgtcttctagctttctagaagtaagttctgagagagaaactctgtgtcartagcttcagtacttggcacatagtagatggtaaaaaaataattcttgaagaatgaatggataaatgaatgcttgaaaaatatgctcaaagtaataatagtttcaaacttattaatgaaaatgattggagagaccacatgcatataaatgtattttaattatggccttaaaaatcttgatgtcattccattttttctgaaggcatattaatagttttacaatttaaaaggtaaaatttaagaattaatcaaggagtattattaatcaggatattttactaagccattctatgatgattttttgagtttaaagtgttcacggaaaattcagggtctagctaagaaaacataccttccagacccctaaaccctcacctttacacacagttttgttttgatatgcttgtaactgggacagtctcagaagacatttagttctaagacaagttaatctaactgaataaatataattttccccaaggtttctttttctaaaaacggttttattgaggcataattaacatataatacattgcatgcrtaaagtatacattttgataagctttgatatatattcatcaaattactactccaatcaagatcacaaaaatagacattaccccaaraagtttccatatgctccttgaaaatttctccctttgttttttctctggcctcctggtcccaggcagccacttatctgcttttgatcactatcaattcatttccattttctagaattttacataaatgacattctttttgtcgggtggctgtggtgtcttcttcttcygctgctgcttttttctttaagaagcagggtctcactacgtttcccaggctggagtgcaatggctattcacagatgcaatcctactgctaatcagcacaggagttttgacctgccctgtttctgacctggtccagttcacccctccttagacaacctggtggtctcgcactcccaggaggtcaccctattggcatagtgcatcccagaattcctggattcaagcaatccccctgcctcagccttcaagtagctgggactacaggaattgactttactaggcttctggtttcttttactcagtgtaattattttgagattcattcatgatgctgtgtgtatcaattattcattcatttttattctctggagtagtattctgctgtattggtgtatcataatttgtttatatttttattggttgatgaaaatttgggtttgcttttagtctggctattaagaataaagctcttatgaatgttagtgtacaaatctgtgtattaacatattgtgttcattacttttgggtaactatctagaaatggcattgytggactgtataagaaatgcatatttaccgttagtagaacatgctaggttttccacagtgactgcttcattttgtattcctacaatacgtatgtttcaagttgctctacctcattgccagcactaggtattcccagtctttttaaatgagttaccctttaatattagatcaattacatatttgcataactgatgattactcaagtgtacttaagtggacttcttcatattatctccccttaaaaacctactgtttcatcctatatgcaaagtaagactcaaaataaataaattgataaattaaagtgtttgtagaagccacacacttcttaccattcctcaatatgctcaccaatacagatcaatacaggtgaaataccaaagtgtatgaaaagcaaaatatgaaaataaaattaagtgtcaactagaacaagttaaagatgtctgctcttactgctattcaatgtggtctggaaattctaggaaatgcaacaataccagaaaaagaaagaaaaatctggattagaaaggattaraactgttatttgctgaacatctgattgcctatstagaaagccggaaataatttacttttttttttgagacggagtctttctctgtcacctagactggagtgcagtggcacgatctcagctcactgcagcccctgcctcccgggttcaagcgattctcctgcttcagcctcctgagtagctgggattacrggtgcccaccaccacacctggctaatttttatgttttttatagagaygaggtttcaccatgttggccaggctgctgtcgaacttctgatcttacgtgatctgcctgcctcggcctcccaaagtgctgggattacaggcgtgagccactgcacctggccataatttactttttaaaactcctagaactaataagtamgtttagcaagataataggatatctaatatttacaatagcaacagayattctgaaaatttttagagtaaatctgataaatgatatgcaagatctatgtattaaaattttaaagcattgcagaaagaaattaaagaagtcacaaataaatagagagatatactatgtttatggtcaagactcaagatgtcagttcacactaaattgttctataggttcaatttcaatataaccccagtcataatcccagcaggtttttttttttggtaaaacataaaaagtttattctaaaatccatatgaaaatgccaagaacctgtaatagccaaaataaatttgtaaaagaagaacgaagttagaagactgacactacccgatttcaagattgattaaaagctacagtaatcaagatagtgtggcatcactggtagatagtagagaaatgtaataaagtggagtccacaaattaacccacatatatatggacaatctattttttacacagaggtacaaaggcaattcagtggakarataatagctttttcaacaaatggtgctctcaataattggatgtctatgtatagaaataaaataaactgctagsagtatctcacatcatatgtaaaatattaactcaaaatgaattataggtctaaatgtaaagcctaaaactataaaacatctaggagaaattataagagaagagccttgtgatcttgagttaggcaaatattgtttagatataacacaaaacatawaatctacaaaattaaaaaaacatgatggacttcattaactatttaaaaaccacaaaggtttgctccttgaaagacattgtacagagaatgaaaagatgccatggacagggaaawatatttgcaaaccrtatatctgaaaaaggacttacatcaagaatatataaagaactctcaaaattctataaaaggaaaaaggataataaaaataattcaactaaaaatgggaaaaaaatttaaaagacacttccatcaaagaggatacatgaatagcaagtaagcacatgaaaagataactcatagcatcagaagcattcatcactagggaaatgcaaattaaaactgcagtgagataccactrcacatctattaggatgactaaatttttattttactctgaccatattaagcattggtgataatgtggaggtactagaacttatataatgctgttgggcatacraaatagtacagtcactttgggaaaaagtttggaagcttcttaaaaagttaaacttayacctaatatgcaatccaacccttccmttcgtaggtatttatccaagagaaatgaaatcatacaagatatgtagacttacaygtgaatgtccatcagctggggaatgaataaacaaattgtggctcatccattcaaaaaaaaatagtactcagcaataaaaaggaacaaacttctgatagaggccataacatgagctattcttaaaagcattatactcagggaaagaagccagtcacaaaaggctacagatggtatgcttccatttatatgacattttagaaaagcaaaactgtaggaccagaagtaggaagggaattgagggaaaaggcaatgatgcagcttttaggggtaatggaaatgttctgtgtcttcagtgtagtgatggtaacgtgactatatacatttgctaaaacttattgatctgtacacttcagaaagattatttttgttacataaattatacatcaatgaacctgatttttaaaaaatatatttatgcacatgaaacagtaagcagaactgattaatagtagagaaaactgggacatgctgaagtggtcaggaaagtttttctggagtaggttcacttggttagagagtttctatctaaatagatgaaaagcagaagagtgaagttataatatgagttaggaaaaacttactgctattcaataatccaacattttggtggcttaacagaggaatgttatatttcttgcccacatggcagttcacttcaatattcaggaggcattcttcccacggatgaggcaggatctcaaacctrgagagtgtaggtcttggcatcctccactgtgtcttctgtatctggcctggagacaggggaagaaagatatggaagcagagcgcttatgtggcagatcgagtgggagattttggaggacaggcataaaagttgagtatatcatttctgcctgcactctattggccagaacatggtcacatggccttgtttatctgcaaaaagcactgggagatatagtttgagctgggttcctagaagaaggaaatgagtttgatgagcacataacaatgtctctgccacaggtatggcaacgtgaaagtgagatgtgcagccatggagcagtgaggagttcagtttggctktaggaagctggtaaaatttgtaagagaatgtggcagaaattaaaggaggacattaaatgccaattatattgtctttgggggaataaatttgcgttaaatacatctcgtttactaggataatatttgcctaccactcaaagatatactgaggatggaatagtgtaatatagtcaaactatctctcaaggtttataaagccctaaatgagtatatgacacatattgtattaatctgaaaaaaaagttgctacaattgcaaagcatttctttctttttcaatgatttcccttcaacgttcaaagtttttccataacttttgacctttgctatttcctccatagccccctgaaggaatagttatttcctttgcctatcttgttctcctctaaagagaagatattaataagttattaactataaaggaaaggaaaccacaggatttcttagaacacttctttggattcctgctatgttatagctaagcatatartggtaccatctgtgctaataaaaataacaataatgtgtgcaatgttgaagtgaatgatagactcttatttcaaagatgaaattaagccctggttttgtctcttctttctgcagatttcatttttgcctcatctatattttctgcttatctttagtatgttccttgtgtcttgcctcaattactctgataactctgtctcttcccttagggctgtctgccaactagtcacttctaaaaccaatttgatgttttttattgcattggcattctctcctctctctttttaaattaccttcttggtgyctttgattcctattttaactattttattgagttccaaggcaacttttccaccatacttgagctattcacatcaatcacatgcagttttttcacttctccatgtctttgtgtcagaaacattcttaaaattatggttttgatattttccatcagttgtatttcatgcatattttacctgactgcatatatctgaaaaataaggttttcttcattgattcattcttctcgcccttcaaacaattgcacatgtgattttgactgaaattactgatttaatattcaaattgaatagactttctcatctttgatattttttgattagagatcatgggtacagttaatgctttatactcttagaaggtaactgtgacttcatcagtaggaagctggccttctaagtttcttctgacactttgggtacttatttgttttgttttattttatttttattttctaggtgccacattttattggcagaaatggagatgccttaagttttggttaggtgtaagtgcaataaagtatatttttgtgtatgtgattacccatgattgtagaattataaggatggtatgctcaatgttattttctattttgtcacaatttattgtctcaatataaacacaacacactgatttttctttacttaagtttacaactttagaaggaaaaaacatggttctgtaaaataaagggatagttaataagtcttgtctcctttcagaattaatgcaattgagtctcttaaataaacaaaaatcatatccaactttttacgtaaaaggaaaacctgaatttcatgaagctcttcttaggttaatttgcaaactctgctttttccctgtgtgaacttctttgtcactttttttttttttaaagcaagactaatgctatttcataaccttactaatagatatttacctggcatttaggataagttgtagaaataaggacataggtaagataagggcataaatacgattccaatttaaaaaggaaaaataaacatagcagaattctcagcttgtatgtgtgctttgactaagctgaattttaatcaatgttagagatttataggttgcacgctgcactttataaggaaagaagcatatatattttgccttcaactaaatataaaaaagtatttggattgtttcaaaggctttcatactttataactcacattgtatctgtaaaaaagatataaaaacatacaattggatgaaagtgaaaaatttttacatcattgttgtttaaagtttaaaaaactatgcttgaccaaatatcacattttattacaatttactaatttctagatcattttattttattttatcctataaaatattctgcctggttaaaaatgaagggggagaaaacatgatccacatatggatttacttaatttatagttgcttattataccaagatttgctttataaatttctcaatgactttaaattacatttcggactttaaaagagatttacagcaatgtattttatttggcacttcaatatttaatatatttttagcaatttaaaagtgatgatttgcacaaaccacatccatctttattggagttaaataaaagcaatttctcttatattgcttacataattgatttcattatagaattatccttgaaagaacaacctttttatgtttcctagttattatatatgttatgtgtggtatttctccctgagcactctaagctggatgtgattttgttctgatttaggctataattgttaaacttgtgcagaataatgttgtcaacaaggcctgccatattaaaaagagtaatttctccagtggacattatttttcaaattcaattttcatttaactgtcagtgtcttaatgctaactgttaaaaaacrattatatttagttttcttgaggaagctctatatagttttccataatgattgtactaatttacagtcctaccagcagtgtacaagggttctcttttctccacaccctcaccaacaacttgtcatctttcatctmttttgtaattttagtttttgtttttgtctttagacagtctgtatctgttgttcatgctagagttcagtggcataatcatagctcactgtctcaagccatccccccacctcagtttcccaggtagctaggactataagtgtaagccatgattcccagcraagcatttttttttggtagagatgggatcttgctatgttgcccaagctgtttccatgtttttatagtagccattctgacaggcttgtgrcgatatctcattttggttttaactttcattttcctaatgatccagtgattgtcttactctgttttgtgctgctataacagaatatcacagactgagtaatttataatgaacagaaattcattgactcacagctttggaggctcaaaagacaaaaatcaagaggctgggatcggtcaaggaacctcttgctgcatcatcacatggtggaagggcaagagagggtgacagtgaaagcacattccacctttataaggaacccactcccacaacaaaaacacagtcctgtgagaacagcattaatccattcatgaaggcagagctctcctggtttaatcaccttttaaaggtcccaccctctaatgctgttataatgataattaaatttcaaaatgastttgggaggagacagacattcaaaccatagcagtaatgttgagcattttttcatatatctgttggtaatttgtatgtcttcttttgagaaatatctattcaggccccttgcccatgttttaatcaggttatttgttytcttgctattgagttgtttaatttccttttatattatacatattaaccacttaacagataatatgcttgtaaatatttctcccagttggtaggttctctcttcactctgctaattgtagctttgctrtgcagaaactttttagtttgatgtaatcccgtttatctacttttgcttttgttgcatgagcttttggggtcatatctaaaaaatcaatacccagacccatgttgtatagtgtcacccctgtgttttcagtgtagtttcacagtttcgggtcatacatttaagtctttaatccattttgagtttattctataaagagtgagataaggatccaatgtcattctttttcttcatgtttgtcaatactttttattgaagagactttcttcttcccattgtattcttgcactttcatcaaaaatcaattgactgtaaatgtttgagttcatttcttggttctttcttctattccattggcaaatgtgtctatttttatgccagtcccatgctgttttaattactatagatttayattatagtttggaatcaggtagtatggtgtcttcagatttgttctttttgctcaatattgccttgsttttgtgtgtgtgtgtgtgtgtgtgtggttccatatgaatttttggattttttcctatttctgtgaaaaatgacatggggataacaaaaaactatatggagattactcaaaaactaaaaatagaattacaatagaatccagcaattccacttctgtgtatgtatccaaagaatttgaaatcagtatgtcaaagagatatctgcactcccatgttcactgcagcatgacttacaatgctgtacaatattgtacgtatacatggtggcatactacacagtcttaaaaaggaagaaaattctgtcatttgtggcaaaatagatgaacctggagagcattatgctaagtaaaataagccaggcaaggaaaaactaatactacatgttctcatttatgtatagaatttaaaacaattgagctcaaagaaacagatagtagaatggtggttaccagaggctgggggtggaggatatgaggagatattgttaagagaatacaaagttttagttaaataagagaaataaattttttgaactctattgcatagtatgatgactatagttcaaaatagtgtattgtatattttaaaattgctaagagagtaaatttcagatgttcttatcacaaaaaatagtaaatgtttgaggtgatggatatgttaattagcttgatttaatcattccactttgtatacctatatcataatatcacttttacmtcataaatatatacaattataatttgtcaaattacaatataataaaaataattatctacttttaagataataaaaacaacaacagtaataaatacatcacttttatcattagagaataaattttgaaattctaatgcttagcaacaattttagattgtttgatttttataaactttataatctctttatagagctactgataatctcttgcaatttgtaggatttccaaagtgttgtccgaattcagaggcatacagtactgaattttagaccatgaaaaaacttggaattaatttagagcagggatcagcaaactatagttcatgagctaaatctggtcagcagtctctttttataaagttttattgaaacacaggctcatctatttatgtattatctgtaagggtaaagctgaaagtatgccctgtaaggcctgtatttggccctttaaagaaaaaaaaaaatggcttattcatgatgtagaggaaaaacttacttaacaacgggggaagttgaggtacctggagattagttgctatcttattttgaagttccccaaaaatagactctgaaaaaaagwtttgaatttagtttgtttattgtggaagtaatccgaacaaacattaatagaagattggagaagagagacaaggaaggaagaaagccaataatgtgttattaggcaagtgttattaattcatgtgttttcttggtggacaactgaaactcaatcctactgagcgactctggggaaaaatgtaatgcatgttccttagagttatttcatctgagggacaatggagttggggtctttatatactaattttattggaggtttatggcaacactgcctgcatcaagcaagtctatcagtgccattttttccaatagcatatgcttatttcatgtctctgtgtgatattttagtaattcttgcaaactatattgttattatcatgtgtgttatggtgatcagtgacctttgatgttactattataattgttttggggcaccactaaatcatgccatataagatggccaactcaattgataaatgttgtgtgtgttctggctgctccaccaaccagccattcccgtgtctttctccctctctttggccttcctattctttgagacacaatattattgaaattaggacagttaaccttagaatgacctctaactgttcaagtaaaaggaagtcagatgtctcctactttaaatcataagctagaaatgattaagtttaacgaggaaggcaagttgaaagccaagacaggacaaaaactatgtctcttatgccaaacaattagcctagttgtgaatgcaaaggaaaagttcttgaaggaaattaacagtgctactctagtgaaaacatgaattataagaaagcaaaacagccttatcactgatacggagaaagttttagttgtctggatagaagatcaaaccagtcacaatattcccttaagccaaagcctaatccagagcaaggccttgactctcttcaattatatgaagatagagagaggtgagaaagctgcagaagaagaattttgaagctagcagaggctggtttatgaggattaagaaaagaagccatcggccgggtatggtggctcacgcctataatccagcactttgggagtccgaggcaggaggatcacgaggtcaagggccaacgtggtgaaaccgtgtctctactaaaaatacaaaaattagctggtcatggtggcacacacctgtagtcccagctactcgggaggctgaggcaggagaatcacctgaacctgggaggcggaggttgcagtgagcagagatcttgccactgcactccagcctggcgacacagcgagactccatctcaacaaacaaacaaacaaacaaacaaacagaaaagaagccatctctataacataaaagggcaagatgaagcagcaaatactaatgtaaaagctgcagcagtttatccagaagatagaggtaagatcattgatgaggtagtttccttaaacaacagattttcagtgaagatgaatcagcctaatggaaaagatgccatctagtactttcattgctaaataggagaagtcaatgccaagctttgaagccagacattgacttctcaaagcctcaaaggacaggctgactctactattaggggctaatgcagctggtgactttaacttagagccaatgctcatttacccttctgaaaatcccaggccccttaagaataaaataacagagctattctgcctgtgctctagaaatggaacgatcaagcctggatgacagcatatctgtttacagcatggtttataaatactgtaagcacactgttgagacccattgcttggaaaacaagatttcatttcaaatgtcactactcattgacaatgcacctagtcactcaagagctctaatggagatgtatacaattaatattattttcatgcctgctaacaaaacgtccattctgcagcccatggatcaaggagtaattttgactttcaagtcttattatctaagaaatatatctcgtaaggctatagctgccatagatagtgattcctttgttggatctgggcaaagtaaattgaaagcatctggaaaagattcaccattctagatgacatttatgattcctgaaaggcagtcaaaacataaacattaacaggaattggaagacattgattccaaccctcaaggataactttgaggggttcaagacttcagtaaaggaagttactgcagatgttgtagaaatagtaagagaactagaattagaagtagagcctgaagatgtagctgaattgctgcaatctcatgttaaaacttaagtggatgaagagttgcttcktatgcgtgagcaaagaaagtggttccttgaaatggaatctactcctggtgaagatgctgtgaacattgttgaaataacaacaaagtatttagaatattacaaaaacttagttggtaagaaaaaaaaaacttagttggtaaatcagtggcagggtttgagaggactgacttcaattttgaaagaagtactgtgggtcaaatgctatcaaacaaggttgcatgctacagataaatcttttatgaaagacrtagtcagtcagtgtgacaaacttgattgttgccttatttttaagaaactggcacagctacctcaaccttcagcaactacctccctgatyagtcagcagacatcaacacagaggcagaaccctttaccagcaaaaagattacaacttgctgaaaggctcagawgattgttagcattttttagyaatgaagtattttaaattaagttatatacatttttatgcataatgttgttgcacacttaagagattacagtgtagtacaaacataacttttatatgtactgggaaacaaaaaaatttgtgtgactcacatttgcgctattgcagtggtctggaactaagcccacagtatctctgaggcatgccgataattgagggtttctcgtaggggtattatttctattgcaatctatcttaccatgtgcaagggcagaagaggcttcaatagccagagaaaaaagtcagataaagagatgcaagaactgcagttgaaagttgggctggcatgtatkgaaatgttaagggctgagttattatgggtgtttgctaaaatccagcctaccactaktaatatccactgttgcctccattaacttcaccccattcctgctacatattcttctaggtggcaagagattacaatttcttttaaaaacccaacaacttagtacaggagacttaatggtagattttgtagtccttactgctgcaattaatcctaaaactataattaataatcatcatgcccctcctctatcactcattctrgattcctctcatccttggccagtagttctgtaggtgtaggtttgtcctatgggtaacaaagactttcatcctgaggggcttgagcccctggttactatgaccttttcagacagaggtcactgtaattgtttgtccatggttatcactaggcttgggggcaccaagagctcctcagtgagtcccctgaattctaagacatactgttcattatcattttgcatcaatacttctttctcatcattatgattatgatttatttgtgtcagcatactcactgttttatattttccttctaatatatcaggatcaggataacaaaatgatcaggtagcagccatagtttagtagaacccttactctatcctcccttgtaaaagcacccctgcaccactaccacaccttggaaatcaagtgtgtcttttacagctgagttgaaagtggaacatgggaagcacacatcacccaactgggtcacttcgagagataataaaagggcacttatagtttgactttttggttctcagagccatgtattccacctgttagagacacaacaccatatagtagccactggcatttaaaggataatatccaaatctcacagagtaacagtgccatccacagactggtttgtttacytgtgcctttaagaaacaaatccaacattctgtcaggccagcagatttggggtaatgcaatatattgtaaaatgagtgatatttcagtcatttacattttgtcatctttcctttgctgtaatatgggttctttagttcaaggagatatcatataccatcttgtgaggataaatctcccattttccaagtccttggataatattgctagatgagacacttagaaaagctaaacccatatctaaaatatttattgatcccaataatgaaaaattactgctctttccaggtaggaaaatgtcagatattatcaacttgcaaccaacttgcaagttcgtctctgattatgagaaatcagtcatttgacggaggaagtagcttgaacaactttgcaagagagagcccatgcatagcgtacattcatgtcacagtaattattcatttcatgggccattacacaacaagtgtaatagccaagaaaaacaaaaacaacttgtcctactagacgtgtaattctatccatttgtttgttcagtgcatctaattcagaggacatttatacaagaggccaagatatacatactttgtgcctacttctataattatttccactatttcttctctagacattgttatctttagtcttccaatcttgctttttccaaagccacttactaaacattcaagtcatttgtaactgctcagtagtccatatatatccttctcttaaatatatgttctgcccctgcacaaytgatggctagatacactgctcaaaactctgcccaatgggaaggcttgtccatactattgtctttcagggatatcacagagtgaggatctagtacagagctttgaactcccaacaattgatcgcaatggcctatcaatgaaccaagtccaggttttactctagctccatcagccagttatatggaacttcccatgaagccataggtatgaaaaacgtgtcagtgaaacatggaagctagtctacctattcctgaagcttatttatattttctcagtatatttgttatattaggctttatctgtttaacatccagctcacctgatgaacagatcagtgaatagtccaaaatggggcagaactgacttgaaaatctgaagaggccatgttaagggtcatgtttctttcttagtgctggatttgcaaagtacaataacttgttctttaccttggggcatataggacagcatgtcccagacaactggactactacaaacttcaccaatgtgatacacccctgaattaggaagatttatctcccactatctgtctgagatatgtcacagtgtggttgtccttattgctagctgctgctcaagtttaaatagcatgctgtcgtcaatacaatgcaccggtgtgactttctgaaggatgtcgaaatgatcaaggtcccttcagactatattgtgttagacagcaagaaagttagcaatcttggtgtataatcaagaacacattgttatgcaatcatgtgaatctgaactgcttctgatccttctttctgatgagtatggaaaaaaatttatcatttcagcagttgtatactgtatatcagaggctttcttactctgctgtagaacagataacacatctagcacagaaactgtaaacggagctgttgtttcattaaatttgtagtatttgactgccatgtgccatgttctaggctgtttttgcaggtccagaatggtgagttaattgggaatatgatggagatgaccatcctggacctttaagtcattggtggtgggactaatctctgccatttcatctaggatgccacattgcatttgaattacatccctggccagagaggaggaagcggtattaaggacttgtactcggtctttcctaccataatggctcttactgaaaagatcagggaaccaactgaaaggttctcctggttgctaagtatatcaatccagattctatattcaaggactagggaaataatcaccagatgagtttgtggacatattatgtccactgtgagacagacttgggccaggcctccatttattacctggcatctatataccctataacagtcaggccttgatggtattcagggtctcttggtatccaacacaccttaaaatatgtatttttccccagtgtacagagaccctggtatttcrgcgaaaatattggggaattgatacyctacacatttgctatggtgttgcaggattcttctacaaggggacctagctttcctagttaataggttttgaatctactactgtttctgcttggaacactggctgagagattgtaaatttccgttgtagtcaaatactagctttttcagctcccctgatcttgatctgtttttaaatgtgtgtgtgtatttgtatatattcaaccttatattccattacttatatttcagcgcttaaagtctagagtcctcaagacttcttctcaggcatattctctcggtttttgctaatatataatattgatatcctgtggttaattaggttaataatcaccttcctcctatagaagggactgtttctccagctgggtcatgctgagacttaaccctaattatttttctggaagtaatgaggtaaagtggggcaagattagcttgtgagccatctgcttcaggtgaggtctttgtatagtctccagtaaaagaaaggctgctatcctctaacaactcggggtgaggcacttctgttggggttctaagaaattggaggactcagttttaccaaatgcatccacccgcattgtccccatcccacatatcatggtcatattctttcttctcagggccttacttcaccatataggacttactggttckgttttagcctttctcacaataaggcaacatattactccagctggagaagacaggtgtgtttaaatacagccacagagactttttggtctttgcaccttgccctgagtttacagtgagctcaactgatactgtcattttcttgctttaagcgctgcaatggcacttatcaacagccgcccaatttcataggtcctataattaccattgcctttacagctctcagatgctatgtgtaagtatcttcttccatttgtattttatcccaattcttcacagatgagttaacaattgtggtgctgtagtacaccagggattatcaccactgcaattacagccagmaatggaattcttgttgccatatgtctaacaagttacccaattctgctaacataccctgagtatctgctacttaatataagacaataatgtctttgcatatgattcctccaagcagaccagctgctggtcaggatcattggtaaggaagggggaagtaatagaggaaataatgtgttctttagcaagttaccactggtcagctggagcttgctggggaactctaggaaacagtatggaacacacacctcagagttataccataaatggagtgagagggtagggtattcatataccaatcaaggtgtgattctggaagcataggcacatgcataggcagagtgggctctgttatacagggaaagttctcaggtagagatttagctgctggatgttggaagtagaggagacatggaatgaaatggtaaaggctgaacagatatgggcaaggcactgatrgcatcttttataagtgacatctaacgtcttaktgtatgtgaagtmgaatggaaacaagagcacaggctttttgacttttttggtaatcctacgttagactgttactttcacatttgtccttagggaacgttgtctagttttcacttacttaaaagtggctttataaaaatgagccccaatccaatttaatgatcagacctcctctttgtggccagcccaaggataaagattaaaaaatagctcttgtttttttctccactgggctcaggaaatagagtttaataagcaaatgggtgggaggaggaagaggaaaagagggttagtaggattttttttttcactaatgggaaagatcaaaaccaagaaaagacagtggaagctttgtgtaataagtaacagtttttataaccctgtaactgccaaaaattactttatagttaaccaatccaatggcagaatatagatcataatatatcatattagtcagtgttctccaaagaacagaaccaagaggatatatttaggaagagatttattataaggaatagctcacatgattatggaggctgagaagtcccaagatctgctttctggaagttggagacccaagaaagcagtgatgtaattccagtccaggtctgaatgcctgagaaccagagcagcctgtggcataaatccttgaccaatggcaggagaagactgacattccagctcaattaggaaggcagaaagaaaaaaggggtgagttccttctttttccacctttttgttctattcaggccttcaatggattgatgatgtgtactcaacatgagtgagagcaatctattttactgcgcccataaatttaaatactaatctaattgggaaacactcacagcacacccagaaataatgttttatctgagcactctatgtcaagttgatataaaattaatcatcacacacatccagtggctggtgggatagattttagagcctccaaaggcaattttgctaggtgttcctcacttgaagatcggtggcctctttattagttagccttatttttcttaggcaatacatcataggccactcattgctatgcccttagggaaaggtctatatctatatcggtatctatacctatatctgtatctgtgtctatatctgtatatctatatcatctatctatgagtaggatttccccagtagtagccacatatactcagacatccaaatatttgcaaaaccaaaagtactttcttcagttcaccctagttgataagtaggcaaatgtgtgccttgacttcatccccactgtcctatatgtatgacagtgggggagttgtatcaaaactaagaaaaagatgatagaaatctacagcacggcattggggcacagcagcccagagagcccgaggtgagctcaaaagcaaccccaaatgtcaaatcaaggcagtatactttaagttagtgttttttggccttattccatggactctaatgcgttacacgtgcctacatttgagcttaccatgattatatttttagtttctgtatactgactggtattaaaattgaaagcttgaaagcattaccttgcttaaaatattcaaccaattgtgaactcagagttttatgttttgcctgcattcccactatttaagttaattaacgagtaaatttctagtatctagcaagccacatctgtatgactagactatggtggacttctttctaatgctcaaatattggaaatgtgaccaataaattctaatttcttttccttataaggaatcaatagttaacaacatccaggtttcttcatttttatagttcttgttcaataatgttaaatcaaacatttttttctttctcagtatatatatattttattcaaaaataggacttaagctaattttacaaagagacaaatttggaaagttttaagttattttaaaagtagacattttagctctcaatctgaatgatcatcagaataatatcagggaactcatttaaaattctgaaattaagccatggtcatatccctgaagactattaatccgtagataccattcagggcctggaaattggcatgctgtaaaactctcctaataattctgacaactttttagatttaagaaaacatctgtgaacacaccattgatgtgactttaagaggtttgtcttccattaccaactaaaacactttatgaccatctgatagtagataggtgatttccattcttttgaatttctgttattcgatttacaaagtagggataagattaccttttattcactttgggaggccgaggcgggtggatcatgaggtcaggagatcgagaccatcctggctaacaaggtgaaaccccgtctctactaaaaatacaaaaaattagccgggcgcggtggtgggcgcctgtagtcccagctactcgggaggctgaggcaggagaatggcgtgaactcgggaggcagagcttgcagtgagccgagattgcgccactgcagtccgcagtctggcctgggcgacagagcgagactccatctcaaaaaaaaaaaaaaaaaaaaaaaaaaaagattaccttttattttgattggtcgtttttggttgcaataaacggagacttaaccaagttacctaaaattagctgcggaaaactggggcactcagctctgggcactacctatccttctccctctcatgggccaaaggtttctctttcctggcatttctgtttccctctgttcccttataactttgatttgtcatcacacctgatgaccctgattgccctcatggctcacctctgtaaacaccctttcgtctttacctgccactattaactgcttgattattactctttctcaattcacattttttaaaacagaaagtctattggtcccagcttaacttttgtgccaggctacatcatatagtacttgatactctataaacttaccacccttgaatcagtgttcaccttttgcccgattagctgatgctgaaagacacagggtaatgtgatattaaatatggctgcctatggggatcctatagaaggaaatttggactttctcttaaaacagaatgtgtgagcagcattgtcaatgtctacgtagcacgtttacctcatatgtgtgttttcatgcttacttgagatcttgtatatgaaagcaacctgtgaattataaaactcatatgagttattaatgccattattaaaagcataacaatgccatgaaaatattagtgtttcattccaataaaaagctaaaattaaatgaaaaacatacctttctgtaagccaatgttattttgaaaaattatcattaatgagcccagattaattgctctctgattaatttacatttatcacgtttacttatgttgtacaatagctcccccctcatccaaggtttcactttctgaggtttcagttaagtgtggtcagctgctctccaaaaatactaaatggaaaattctagaaataaacaattcgtagtttttatattgtgtgccatcctgatttgtgtgattaaatcttttgttgttccactttgtcctgccagagacataaattatttctatgtccagcgtagctgtgctatatatgctacttacccatcagtcatcaatatcatctgctcctaatatcacaccatagacatcatcatggcttgatgatccaggaaccctgaaagcaggtgatcctccttctgagtattgtcagaaggtcattagtagcttaacactacctcacaatgcctatgtcattcacctcacttcacttatcatgtaggcattttatcatctcgcatcatcataagaaggataagtacagtacaataaggtgttttaagaaggagagataccactcacataactcctcttacagttatattgttctattttattattagttattgctgttaatctcttatgtctctaatttataaattaaatgtcatcacatgtaggctgtgtttatggtactttctgtagtttcagacatccactgggagttttggaacacattccccacgaatgaggggacactattgtattattcatactatcatgatgtacgtggaagttgcatgtgataattagttcattaaaggctataggtgtttttttttccttcaaatatgtgttagcaaatgaacaatatcagtaccaggtgagaggaaaaaaatatagatcattaatactgaagtaactaaaatgttcagagtaataatgttgctgcagaattgctgttctctgaagatttttttwaaaatcaaagcrctactgtttttcctaatttattttcttgaatgtaagttttaatgatacaagggttgttgcgttatttgttgtctggaaattccatccttttactttcaaatttctgaggaagaatttgatgcaactttctttctagaggatccagggttctcagcttgtaattcttaaakaattcttacagagggtaactgatgactgtcaattctgtggtatacctttaaaatatcagctaatgaatggaaaggttctaaatcttgaaaagagtacctgcttacactcatctatacatytgttgaaattcattgaactgtacactcaagatgtatccctttcactgtaggtaaattatacctcaattttaaaaattaaaggagttactttttatgtatgatatactgaattggaaacctcacaatgatacactgacaatattttttaagtttgcaaaatagtatatacaatatgacttcatttttataacaaaaagctatgctatatatacagatatttgtatagatgcatattattataaccactggaaaaatgtggaatgagaaacatcaaacttttaatttaaaaggtaagaaagagagaggagatagagaaagagttttactacttaatttatgttctcctgaaagatgttgcaattgcatgtatggtttccactttcttgtttctgttttctgcattatgatattataaaaaataaaaatagcaaattttgtactattattcagaaatacataattttgatgagaatagattctgagtgtactacaagaatataccttgaatattgaataktctcactattgtggaatacatattttaaaaagaaataattatcaaattctgtgtgacagataacctaagcagaaattagggctaaaacatgttaaagtgttattttaattaaaaattatttaaaatatgaaaacatgaaaaatggagaaactagtaagataatttttttgtttataaatgtcataaaaattgttagatctatagacactgggttctcagaagcttaattgttgaaaatttaggcataaaatataggtcaacataaataaccaaaaaataaatttctccaaaatatctgcattctaatcagatgataggattagtagagagagagagcctctggtctttcagaagcttataaaaagaacacttgtgaagccccttatacacacaaagcatatccaattatatgaatatttcaaaaagaatatttcttacctttatcatagagacatttatttccaagttggcaatacagttttatagatcatactatactactagtcttcttttttaaaaccaagaaatacgtcattttttaaactacaagtaacagtcatgcttcctgagcatctgtttcacctcccaatgatgcaaaacgatatttaggggaggggaaacacaatgaatatatttattctccaaattkcatacaaatattattaaacaaaattttaaaaattttctttgaatgtcagaatttaaatcctatgaataggcaaatagttytctccaaaattcagcaatgccctttcggcagacccccagctctgtctttatccaggactttgtcattcttctgtgtttgtactgcagcagcttatttcctacttgtttccttgtccctattttccactcattcttccrctttatgctctaaactgttgctggattatgttccaaattaaacaaatcctattagtctctcatgttcccagagggaattggtatattttttctgcagaaaacttaaggtccctaaccacagagataaatagttacaaccagagccttgaagagttgacaatccagaggcagtacagtcatgtaaacacataatcataccagtgtggtaaatataaaaaagagatatgcactacgtgcaatactgttaccagaaggggtgattaaccctgcatcagtaggtcatgaaggatctcacaaagaagtaaacatttgatctagttcttgaagactgactagcagtttgacagagtttccaggtgtagatatggtgagaaatttcttttggaaatctctgaaggcaataggaagactgaagagtttaatcttggttgaatgtgtggtttatgaagatcagtggtaatgtacatgaaggattgcctaggcaggacaagaggtttggagggtctagaaggaggatggaccagttagtagactgaattactagttcaagcaagagatggtcaggatcagagctaacattgtggctgcaggaaagaagaggaaagtttaaatggatgagctatgatggagaatcagtggcatttaatgtataactgtacatgatgagttagtgtaagtgtgaagtcagaacacatgaaaaccacatttctagcttgcaggactgggcgaatgttggtgccatttatataaaattcagtgtaggtgggwaagagcagatttgggggaaagttcatgagctccagctggggttatggaaggtgaagttattggttaaaattctaaatagagaactcaagtaggaggtgctgataggtggcagtagattttcagtggcatgtagagtaaaatgagaagagaagcaacaatagaaccctcgacaacactatcatctaagcagaagaatgagaaaggaaacagtaaaaggctctaaaaaaggatggattagattggagcaaaataagaaatcagtgcagtgacaggcatacaagccatagaaatacagagtttcaaagaagggacatggggaggccccttcaggcaagcagagggaggctggattctttattctttgtatatagggcagagactcatctgttacagttttttcatgttttaagattaaccaaagttaccactagttctacccttgtgtttttcattttatccctagttagtattgctagacaatagccgtaaggttgagagaaattagtaaacacctgaaggctttcagtctttccaccaaaagatttggatattactaaacatttatcttattttattttattttgaaaaaagatgacttacccagaagatgcatacaaacatactaatacatgcatactcaatatacttttcttctcaagttttggcattaattaattttggtaattcctgagcttaatggacaaaaaaggctatagaatatgtaaaattgtcttcagacctaatttattgatgatctcaatcactgagcatattgctttagagtaaaagagactttttaattttttaatttaattccacaattgacagttatttacttttcatatttttcatgttactatggcatgcatttttttctagcaaaattgaacatttttattaggataatttaatgtaacctttaacaaatttgtttggaaacctactgtggggtttatgtcaatacagaatatgtttgatccatacatagctgagtctgtctcaagatgagattacatttctagttatttttctttgaatattttttataatttttgaaaatcatcactgattttatttacattgatttaaaacatcaaaaaagtaactcgtaggttaggagtaataatagaatcaaaagagaagatgagaattttagaattaagtacatacatttgccattagtaggcaaaaggcaataataagtttcaggcttagaaatccaayaaggaaattgaacgaactgctacatttgagaaaataactgtagaaaatgtccttcctgttaaaagctaaaagggcccctcttgaaatctgctttttcttgaaccagaaaactaaacaaggaagagtttgtgattaaaggagagatacaatattaaaacacagggagtgatgtctagccctagttaaaatatttatatccatgttatttaacttgttctggctgctatgttaccactgcatctccgcttctgtgtcttttatgtgaagctgggctctccctcaaatgatgtgaggggctctgaaaaatgcctgcccataatgtctttcttcttggtctgctatgttacctgaaatcttagtaattgcaatggtgtgtttttaaataaacaaaactttagctagaaagggaaagaagtatttcaatctgtagcctccattaatataggcattagaattaatttatgcaattttctaatatctaaacgaacagaaaaagaacactgagaataaaggaaacagaataggtaaatattggtgttgtaatgggagtgggtggggattctaacttcgggaatcatgtagattctaaaggtccagggaactctaaagaattatggacaaccagaagtagcaaggtgaggaagagtggtatagcaaaaggaatgtgaatccaggagcaagaggcctggagtcctagtcctgactgctcctaatggcaaatctctctgaaatgatttgattcattgtcaaaagaaaaatcttaaaccagattactatttttaaaagtctttcaaaatctgaagttctgaaacatgttgatttcttaacttctaatgtgcatcatttctaatattcgattgtactcaagcgggaatgggctgagggattgatgaagtggcaaagtcagagagggaagcaagcatagtcatccacagaaattccacaagcaggtttggcagctccttttggataacacgtctgacatggatgctacattggtgatctgtttaagagttcaagtttcccccaagctagttgtacttggcgttttctgtggtgtcttccacaggcagaaactaatgttattggtagttcttattgcaagtattgaattgctggccatgaaggtaattctgggtagatttgccagaatctgctatgccttacatcatccaggagaactggatgattattacagactgaacttaaaagtatgccttatgaaaatgatgatattcaaacttaagacagaatgcctgttgatagacgaacctgttgactgcagtttcttgtagtccaggacatagagattacactgtgatttgtaaattgcatttgcactgtgtacggcgattacctttgatagctttctgatttggggaaagtaatttgacctctttaggcctcacttgcctaagttcacacagttcttgtaaagtaagcatggatagtgactggcatatcaaaagttctcagcaactattaactgctatgattttattactacaaacattctattggaaggaaataaaatagaagtcttcattccacatttgcaaactaaaattgtactgaaacacttatcaaatgttaataaatgtctttcattgttttaagtaccaataatttggctttccttgtaaaactctttttaatttttaattttaaatgccatgtaatacacttgttctctctttgaactgagatttatcaatgtaaacaagaagaacaattcaattcattaaattaaagaggatatttgttccaggctgaaaaattaagtggtttactacacataaatataaaatttccttcaaacaaaaaacacaggttcctgcctaagtgagaaaaaatgtattgtctaccatcagacattacattcagagtcttaggctcagtggaaagagaaaagcttacaagtaaattggtcagctaagcagttctttaggcataatttgaccagtttgtttcttagtaaacctgactttcaaccacaggtatcttttgtaatgctaagtaagaaacaaacttgtcttgtctttttcagctcagtagagttggttggtgggatgaaagtgttcccaccttagtgcacagaaagttcagcaaactttattagtgagtcaaactttactcaagtagccctgtgccaaacagggctagtattctaggtaatagagttcagtggggaataaaacactcaaggatctctgtctgcatgtggagtcataaatagataggtaaatagacgtgatagatagatgatagacagacaaataaaaaataaatagcctgacagaaagaaacctaccaaattctcataagttttatgtagaatgttaaaatacatcgatgtggtagaaagtgactgggtgattattttcgactgggttgtcagggagggcttttctgaagaggtgtcatttaaaatgaagtcttagtgggaggaagataccagctatgtgaagattatggaagagtgttctagaaggaaagaagagctggtataaagatcataggggaagagtttgtttcagaagrtcaaggaacagaaagaaaatcaatgtgagtaaaccatagtgcatgatgaagagattggaatgagacaagttcagcaaggtaaagcaggggcaagattaygaagtcaaggtaaggagtttgggttttagtcaatgccctactgaaagacattggaaattttaaacataagagtgagatgatccaatttatgtttaacaaacaaacaaaactctggcttcttgtaggaactgaattgcaaaaggactaggctggaagcatggaggccactgagggaactgggttaatgtatggctagttgttcatcatacctattacctctttttctttggcatacagtcagattgccttttccagcctcccttaaagttagatgtgatcatatgatagatttatcctcaatgtaatatgagtggaagctatgagcaccacttccaactcttaaccataaagccttccacatacaaccatccatgttctttccctctccaccggcttaatgtgaatacagcgactrtggaagaagccatgtattgaaaatagtgacatcatgtgatggaaagagcttaggtccraaatcactcactaatcaggaactcacaactaagatttcttatgagtgagaagcaaactgattatgtaatgactggattgaggattttacctcttacagtgtttagccttaccttaactaaaataggtattgatgcagtaaaataagtgatttagatggtggctgtaatgatgaaggaaaggtgatgaacagataacatatacaggagataaaataaaaaaaaacttgattgaaaatcagagaaaagtggtaaggagaaaggtagggaggacccctaagttgctcgtttgtgagctgtgtaaaaaaggctgtcatttacaatgttagatatcagaggaggaggaaatgtaatgagttcattatgacacctgttgattttgagctctcgaagtgccctcccagagcagctttctagcgtcatatttgagtctggaaataaggaaaacattctttgcttaaattagcattaattgggctcatactatgccattgtgctaagcacttcacatatattacttcatttaattttctctacaaatcaagtaaaagtaaagcaaactattcattttccarctttacggatgaaaacactaagacttacagaggataaataacttgcctatattaaagtttcatgataagtagtggagttgaatctgtacctttccattgatttataatagtatttgtttgatttatcattcatgggtctgcaagtctgctattcctctgctgaactcagctaagatcatctgggcctggctccaggctgcaggttagactcaagtctgctccatgtgtttcctcactgtcctcagccacctactacttggaatatgtatgttcttactatggtgggtcacagaagcctgagatgccaagccaagctgctgcatttaaggctgccacttgtttcaagatgctgactttccattggccaaagtaactcatattgtcaaagtcaacatccacatgggaagtggttaggagaagaaggttatactctactctctcagttttttctcaacttcccttccttccctccctctgctaagtgtccttagacataatttgaccagatcgtttcttagtaaatctgattttggccacttccttccctccctctgttaagtgtcctgttgattaaattagtggttagcaaatttggtacaaataagggtcggttcatgcattttaaatgtccttagcagagggagggaagaaagggaaattgaggaagaaaaaccaactttattgcttgaacaaaaataagatgatgccagagaaaacaagaaaagaaaacactctgaagagtgtccagaagtgaaagatgctgcagagctttgaaaaacataaaaaccaaggagtatccttagatatagctgtgcagaagtcaggatggcagaagcaagagtggctgcagtgccactttgatgggtggaaggcaggcactggggagggaatcagaggcggcaaaacaattatctgcgtgcaagtttgctatgaagagaaagtacaagagtataagaatgctggcttgaggaaagtgaagatagctaagctaactcgtgcattggttaaaagtgcatggctaactatccaagaaactaccaactaattgtgtgaccttaggcaagttacttaatctcatggtgtctcagattcctcatcatgaaatgaagataaatgtaaattacttcataaaatcaatgtgagatgaaaggaattattatatgtaaagtgcttaataaatgttagttattattgttttatttccagaatgggaaaatattcaacatgatcctatattgatgacaaaaggcttgcataaagaaaagattaaaaatttagggggattttatattatgtccttattattaaaaaattaccacccatctatattttctrttgacttaggtaaatgggagaaatctgattattttcttctgaatcattttagccaacatgccccctttaagcaagataaatttgttgtgtatctgataattaatgacattatataaaatttcaacttatactcatttccctccaaaatatatttatatgcattttagcaaagatagtgaaaataacarattagccaatgcttctccaaatttgtgagtttgctcaatttaattttatgttccaattttatattttaattatcagtcatcttattaaaatcttagtgatatatcagtcagtaaaaatcctctaatgcagctatttatttgtaagtataaatgttattttgcatttaagatttgttctagctaagaagtaagctaagtcaatttaccaaaaactactttcatctgacaatttcttgaaatctttcatgtattgtaagacacagactcctcaaactagaatttaaaatcatggacaatgcagcctcaggttatatccttctgttctttcatatatgccatttcctttccttactgcctcttgttctcccaractgattcttgcaataggccaggtaagggctgccaggtcactagccgcttgaaagctgggacctgatacagttgtatcccagagaaaaagaaggtatgtacttgattgttataacttttactattaaaaaaccacctcctagaaatcctaagtggcaataggcttcatgtgtcatcaaagttttccactatctgtaaaaaaagatgttaaaatgaggtttgataatggataatcttttacaagccatgacgcttttcayagagtcctagctaaccactaatttaatgaaaagcctcctcctttgtactttcacttcataatctttacaactttgtcgaaatgtgtcaagttgtagtgatggttctttgtcttttgttttcaaatacagaccccagttcctaagcatgattcatttccttctgggtgaatacatcttttgtttccttctaggaaaacttcaggttgtatctttgtaaaactcaagatttaactcatttttttctgagctaaaagttgaaaagattttttttaaaaaaactcataacagtttcataaataaataatatcaaaatcccggagccctatattgttttgtcattttctcaaatctaataatttgtgttatatagcatttaatgaaggctgccaccaagtcttaaaktgtgtgtgtgtgtgtgtatgtgtgtgtgtgtgtaactcaggtaccctttataccaaaaccatgttctcatattgataaggtggactattcaaagakatataccagtttaagcaacttgttttattatttttggaaagatttggtggtcaaaacattacatcagaatcactttatcataacatataggtgaccatttactactatgtgtaaaacttacctgaccacacatatgtggacactcaacaagtgtccagtgattttactttgccattacatttcctagtccttgggaacgattacattgagttgacagtttatactttaagatttgaaaagaaaatatttctttcctattgcttattagtattgattaacacctaaggtatttactaaatttactacccataatcttagtgttatttccagctttatatagatggaaatagcatggattctgagaaagttctgcttgttttagacatgcctcttctgtgattcaacagtatggctatgcacaggttctgtaaaagtttaaggcgcagtgtccacattttccaattgagactatttcattagggcttttgtgaacattaaggaagttttaatagtttattgaatgaactggactgccaattgtaattgaggactaacagatttattaagacacaaaacatgcatgtagactatatatttatatattgggtcaatcatttataaattgcaaaaaaataaacaaattaaattcttggtgtatgtaggaaaataatgccaagttttggaattatatataggtactcacacataactaacacaaatctccaatattaggatatgaaatatgatatggatgtctccttacctacaaatattgggatgtttgagtgtgttgcatgcaatagagctgagagttgaaatttggtgagaatgtatgctttggtgctgaggttttcataatcttgagttaagtaacaatgacacctatgaacttaattaattcaaaaggatgaattttattcacatagaaagtttttcttagggaagatgtttgatagctaaaattagggcagaacatcagaggacccaggtcactaacttgaaatgtatgtaaggaggcttgtatgtaaggaggctacagtgacttttcctgacaatgatcatctcttcttggagcagaaaggtagccaagacctacttgagcatggatagtggagacaggaaagagctcaagagtgacaaagtagtgaggataagtgagtggaatagtggtaaaagattaggattatgcttaaatatcttctgtaagagttagaggtgagtgagttgagaaaccagagttaactggataggcctactcccatatcaagattaaactgtcatcattctgtctgttaaaataacatcattaagggtaacattgttccagatgacagaaaggcacaggtatggggtgaatgatttgggtgatcaataataaacatacaaaatggtatcaataatatatttgtttcttttctttatcattttagtctcaggtttatttttmtaaaatttcttaactatatttaatattaaactctaagacatttagtgttagaagcaaaattgacaatttgcttattcacagcattaaaaaatattttcccttccagtcaatattctcttgctaaatcagagtgactgtaaaacaatctaagcagccgttgagaggggaaaattaaaaaaataatgaaattttcacaaactgatttctttggacacactgatatttatcacactccactgatttcttcagttctcttctggctgtaaaagcacgtgttgaatatggtgtacatagagtatgcacagttattttttctttcttagcagcagtaggaagaacatcttttcagcagctggctctttcacgaagcagttgattattggagtttggattgagttttctggtctaggtggttagcattcagatgggtttcttgagattacttagcyattttactggcagcattttaaagttgcatgaccatttgctccacaggcttgttttaagcagtttctttgagaggcaaggttcttttaaacatcactaagacaaagcactcattataacgttctttagcatttytttccactggacattttaaaagcaaattgcagtagaaaaccagcatccgtgttatagaacttgacagaatatcacaccttcaaaggaaaatgaagtaactgatgaaaacacaaaattaatgctaaaattaaaaaatgaaaatgactcatgcattttagaatacacagactcccttgagatctagatcaaacttgattcttcctactatctaaatggactttctgttataattctttattttttatttcctcagttattctttctgccccagaaaaaacaaagagattatcttctgtttgtgaaaaacatctctataatttttccaataccaaatgggtaatgtccatttgcaccagccctgtaacttatctgtttcgtcrttgttagtttgtgcagttatttaggtacatcattaaaaagaagtttttaccttgctgccaccttattactatcattttgccaatttagtcaggcagcaaaaaaaataaaatcttacttttgaataaggtgatggatggtcacatgtattgattttttttccagcttgaaaccccctaaaattgaaaataaaaatttataaacccacaaaatcaaagaggaaaaaaagagaaggcattagagaataggttattttagcgaatttttgaaaaatgtaaacagaaggaatagtggtaactggcagagcagagtcactaggcataggactccccctaacagaagaaatgaagaaaagcctttacattttgagagaaaattcttttcaatctagaatattctgtcagactatcaatcaagtgggaagaaagaacaaaatttttagcattcagaaactcagtgatttatgtcacatacacactttcttggaaactactggagaatgtgcaaaacagaagaaaattcagaagtgaggtcatagaatccagaaacagggaatccaacaggaaatgtggtcaagggcagcctcaggatgacagctgtgtaagatctggagagcaacagatctgaatgtgagccagagatacaggtccaagataggtttccagcataaaagaggaagtgctgattgatatttggaagatgtaaatggggcttagggggaaaatttggatagacattcagaacataatgttagtaaaaaatgcagtaattcattactttgggtaataaaaaaaacccaaaggcatggaaatgtaatcttcatacactattcagctatgtaatgaacactgtatgtctgatcataaaaatgtaaaccttgattattaatgttacaagtattataaaacagtatttttggtaacttagggtaaggtaaaatggagcagatayataaaaaacacctaagtccttattcaccrtaacaggaggccaataggtggtatccagtatcaataaaccaagagatagcagaataagcataccattttaaaatgtagagtaaaatcccagaaaaaaacaatcaaagtatttttaaagagatgtcccagtgagcagaacatagggtaggactaagtggatgaagaaactgctaatttttataaaaagatttcagagataggtagagagaaagagaaattaaatatattttatttcattataaaactatatgtatttgtaaattaaatatgccatttaattttgtccataatttactccaataaagatgttttaaaagtgaagttcaaagaatgagaaagacmaaagaaaaccttaatatttagatttacaaagatattttcctgaagatatgtagaccctataccattgaagctgtaaaggatacatgataggtattcagggttgatattcttccaagaatattgactgtggaaagaaaaagaaagcaggattttaaaaatctggtccatgaatatatattctacaaggaaggttgctcttaccagtaaccaaagccattctgttttgatggtcattggcttcccagggaacaagtcctaaagaagactgataagatttctctatttttttatggtgctgggatgctttgggagtttctgtacatcatgataatttaggttgtgctcgtctaagaattacagagtggcatattttctcctactacagaccgttgttgaaaatctgctcatcctccaactcttgacagtgaatattcattgcctacataagatgaaaaactaaactaaaaaactgataatttactttttaagaatcctgcctctatgccctattttcattataccttggttattgttttggtttaggattttggttattgtttaaaagaacataatttataagagtctctaagaaactataaaagtctctgtcatttaccaatgtaaggtatctgagttggaaaagaaatgaacttcaatcttggaatttaaactttaagcttttacattaatgcttctgttcctaataccctatacaaatctgtataaactgtgtttggcttactttaaaaagttaaaaattgtaaaaagaacttcacatattcttgggttagtcaattctaccagatttttcttcccctccaaattaatcattgctgggctactatagagaacagggttgaacttaccagagtgaaggctccttctggaatgtcaaacaggtattcacttctgaggcccctcttacatttggaccaacatgaatcactgtttcagttagatttttagtgttgataagtatccatgtaattttgaagtctagtccataatacataaacaacatttctatttaccactatacactagatcaaaactatgaatgaactgctaaataatcaaaatgacttataaaccactcatatgatagaaatgtaaattttactgatgatacttctttaaagactctattttaatgctaaactttctctatatcttagtctaccaaaacatagaactgaagccttttagtgtttatggttaaatacctggaaaaataatgtcaaaagtttatgctccagctcatcttctcctgcagattgatgattgtttgtgttatatccacttttgtgtgtgtgttatatccactagagactttgaaattagaagactcaactcaattgtgtaagcttgttaaatcacatccttaaatgtgatccttaagtgtgaaaatgtgcccattttcagactagtgcttgtcttgatgtgagttgttgtagggacacaggaaagggtagagaattcaagacttactaagaaattgtcctatttaatcactatattaaatatgttttatgaagaaattttgatcttccaagaagaagtcatcaggatctcttggccagaccacatatggtaaatatatctgtctggtactgtgaattgattgacattgaatacactgtagtggaggatggtacttgacagttgttcagtgtaaccttgtcatggtagggacacagtagagtaggataagaccaagtgacagtgtgagccattctaggtgagcagctttctgacagtgttacataccatattgttttttccacagggcagtttaattccatctgaaacacctgctgaaactcagtgcatctcaatatagatggaactgtgcttacctcagttaaatgagaaaaacttcacttaagaatcaggtgtctctcttgcacccagtagctctctagcaaggatctagaccattaagaattccttaaagacaacctagggcaattttttgttgttgtttagtacattattttatgtttaagatcagaaattcgtcttgccaagttacttgctttgtttgcctcatgtaggggcagatatgaacttacaagagaagcccaactaggtggagaattctgtcatgcatatgcagtgagactatggtggtctcttgggaaatgctcagcacttgatctttacttttaaaaatcaaaaattcaaatggatgatggcattcccaaatgaattgcttatcgggggaacccgcccgcaatatttcaacgtatattctttccattttccctaagtgttggctgatctgagaaatgaagagaaagagtacaaagagaggaattttacagctgggactccaggggtgacatcacrtatcagtaggaccatgatgcccaactgagccacaaaaccagcaagttttattaaggatttcaaagggggatggtatgtacgaagagggattaggtcacaaagatcacatgcttcaaagggcaaaaaaggagaacaaagatcacatgcttctgaggaaacagggcaaggacaaaagcaaagatcacaaggcaaagggcaaaattagaattactcatgagggtctatgttcagctgtgcacatattgtcttaataaacttcttaaacaacagaaaacagcgttcgagagcagagaactggtctgacttcaaatttaccaggacgggattttttccccaccctaataagcccgagggtactgcaggagaccagggcgtatttcagtccttatctcaaccacataagacagacactcctagagcagctgtttatagacctcccccaacgaatgcattcctttcccagggtcttaattattaatattccttgctaggaaaagaattcagtgatatcttccctacttgcacctctgtttataggctctctgcaagaagaaaaatatggctgtattgtggccaaccccacaggcagtcagaccttatggttgtcttcccttgttccctaaaattgctgttattcwttttcaaggtgcactgatttcatattgttcaaacacacatgttttacaatcaatttgtacaatagtggtcctgaggtgacaaatatcctcagattacgaagataacaggattaagagattaaagtaagacaggcgtaagaaattatgagtattatttgggaactgataaatgtccatgaaatcttcacagtttatgttcagagattgagatgaagacaggtataaggaattataaaagtattaattttgggaactgatatatgtccatattaaaatgaaatatttgcaatttatgttcctctgccgcggctccagctgcttcctccgtttggggtccctgacttcctgcagcagttgctatttggagcatagcttctaagaccaayttttgttcattttttgtctacattctaggaactcatgagagccatgtctttattagttttcttgaaagaaaccagaaacaaagaaacagagaaaagagagagaatggaaaaaggaaggaaggatgggagaaaggaaggaaggaagggagagaggaaggaaatgatttttctggtcattaattttatatctcttagattcctccttcctttctagagttaggagtattatttattatcctatatgttgaaggtgttgaaattaattgtaccaaaatttgtaatgcctygttaatatataattttccaaaggtaaaagtattagtcatgtgcaaatataaattgagcatatgccaatgtttctatttaaatcattaataatgagggaatcagtaagaagttatgactggttgaaagagcatttagaaagttagatatacataggcaatgtttcaataaaatggctgtgttagaagcaaatctagttgatgtctaatgagattatgaatttacgagggtgcctattctgccaaataaaaattattttttttcacaccagacaaaaatctgcaagttaactaaacagccttgctaaaccttggccctttaatcaacatcaaagagtaagatgaactraataccttattctagataccttttggttggctttgcstttatgtgacagaaacaacatgccacctacctttctgccttatttgcaaatctcaagaaaaactttctgacaccttctgggtactgtgtattgcggttctgggcctactagcctgtgatctattccttgctttatccctgccctgcagtgctctgtataatcatagctaaatttcccaggttcctgtcagctgacttgtgcttggatctggccagtggcatataaagtcaggataggtgaggaggaaggtaaaagccagggcattcctctccctctctgtctgccttgaggaagcctctcttacattagttgtgtctcttctgtggttcaagattgccgtgggcagtccccactggtgtttctctcttctgcaggaactcccaaagccactggggtctggtgatcctgcctccctcttttgaccctccaaaagcttcctgcagttgcttatttgggttatcctcactattccctggttgttttctcatctcccatcatccaagtaatcaattgcaagaattaaacttagttttaaatgttcagagttttgttttcctagttagaccttaacttatttagtagtatttcattttttattcttattgttaagccttgctaagcaactcagaagtttataccagtgatgatgcgttctcaaaactacttctgtcaatgtcaatataatgcttcaaagatatcataaagaaagaattatttacaatgattctgagagattatggctacaaaagctacatttctacagaagcaagggaaattctgtaaaaccaaatatgagttttttgtcattcaactttagttttttcttgaaacttaggtattcatacatacatgaaagaaggcagagagggaaagagagagagagaatcaatcaaattggagtctaaaataatttttataatacatataacaaccttcacaataaaagttgtcttctcaatcaattcttttggactcgatttgattgctttttatgccacaaattgtatctccaaaaaattggcctttcaagagacgcttcttgaaatgactcaatttttctatcactgagtatcaagagtaacagaaggacttctatgctctccaatagtatctgccatggaaatatttctgtttttagatatttttgtgttgtgtgatctattgtaattggaaaaatatcatgttgacttttctttctgtggtttttttccgtatgcatgtttgtgtaaaaatctatttttaaaagattttcttctctgcyagtgcatttttgaagtgtgtcggtacatggtactgcattaattaagaataaatatcccaagccatttgatatatttgtgtcaccccaaaattcataggttcaaattctaacccttccaaggtgacggtaggaggttgggcctttgggaggtgattagatcatgggggcagagctctcctgaatgggattagtgtcttcataaaagacaccccagagggctggtttgctccttctaccatgtgaggttacagtgagaagacagccatctatgaactgggaagaaggccctcaccagacattgaatctgccaacacctcggtcagggatttcccagcctccaggactgcgagaaagaaatttctcttgtttataagccacccagtacatggtattttgtttggtctaatataccacttttaaccattcctttgttatttttggtggaactggtgctgagattgctttgctcagccaatatagtaatagattttactggttttcaccaccttagtgcttcaggagcacccaaatctcagagttctttgcccaaccaaccttttatctcctcactttcattctttctaagccacaatttaatttgatttttgtaaaagtactcaacacacttttttctttcctctgattttgcaaaaagaaaaaagaaaagataaattcagccatcatagtttgtttcatcatatttctctttctcttttcacttaatgtgtattttcttctttatgtctacctcaaacctgaaatatgtgcctgttttcagttagttcagtagataagcatgatatatgtgacaaaagatatatatatatatattttttatgttaaatctatttttttttatccttggcttagccatatgcctaaaagagcctagaactgtatctcaacatcactatcaactttggatgcttcataccttttcaaaaccttttaaattcaagatgaattttgacatctttttatttttcaggcttttaaatttgtcatggtcagtgattcaaaaactaccaagtaaaggatctgacttctaagttaagtcactttccttgtgacttggacattttacttaaatagggaactacatcattaaaattctttttttaattatcaaaagatatcagtcaattccccagaagtgaataatcacaatgttttagctcttttagtccttccttcttttggaggaagatttatatttccaaataaaatgctgtattctttcttgatttatcaatttcagactttatggacatccacaatgataatagaggaaataactcttgtacattaacttcatcaacttccttactctaatgttctcaaaagagatattgtgccttattttgttttaaaattactagtgtttatagtaatatgactttgtatatattattcaactgtcaatcagatagtaaactatgactgtttcctatctcatacaacttctttcttcctcctagattcataattattgtattttttcatacatatatttcacaattttgtaaatgcttgatctgtcaaaacgaatttccaaacattctatcagttccattggtcattagttccattttttcccttacaggtttctctcacacttcctttcctctgtactcatacttcaatctggactagttagtttccaggatggacacatacctcttattgtaagacttcccttcccaacttacctgtcttagattttctgttatgttcttgtactggtcaaatgcatctcctcagtggcttcttgaaaaagagtgcatgaaaattcaaatttttgaagttgttgaatatttgaaaatgcctttattctttcctcaaactagattgagagtttggctgagtatagaattctaggtcagacctaagaccatctgcataacatgcaggacccagtgaaaaattgaagatatgcagtttcttgctcaaaattatcaagaatttcaagatagcgacagcagagcactaaggaaagtgcagggccctcccaagtgcaaggccctgagtgactgcacaggtacatgcccatgaagctggccttgggaggtcctttcagcatggagattctaagttctgggaaagtgactatttctttgataattttgtctaattctcttctgtattccttatgtgtagaaccccaattagctggatattagatctcccaaaccggctctctaatgtttttctttattattctagtatccatcttgctgtctttttgcccacttcctgggatagaaattggacttttcctctaccccttctgttgacattttcatgtaaattattagtgttaatttccaaaagccctttcatcaccatttattccatttaaaaagtagcatgtttttgcatcatgtatcaatctcttttctcaaagttttttktttcttaatagttcttttcagtctctgtttcagtttattaagtcatattaatgtttcagtggtgagcaccaataaagaaattttttaatctaccaggagttaatgcaaaccataaatacccttttgtctatttctttttgaacaatataaaaattataccacagttaaatgatgtaatatgactcagttatttcagatggttaacactgaccagaaacacttgattggttccttgtttagactcgatatgatcttactgttttcttatcttcaaggagaaacaaattgatcttgaaagcatttctaactctttgaatgtttacatctctgtacttacgaggaactcttcaacaaactggaaattacataatgtccatttttgtagaaaaagttaatacctcttgaagtaaagaaatagtttacctaaattgtgacttttggggaagagagaatatattcctttgtacttaaaagagtttttttcagtcacatattctctgcttcaataggattattttgctcctttaaatgtagactgtaaacacatttttaagagtaatactgtttgccatactatttttgttgtatatgtttaaggtagaccaacatgatgttttatatacatatacagtgaaatgattagtacactcaagcaaattaacatatccatcatttcacataggtagcttttttttttttttttggtggtaaaggtacctaaaagtctactctcttagcaaatttccagtgtacaatgcaatattattaagtgtagtcctcatgctgtgcattatgccattgatcccgtttgttttcattgtgttcaattatagaaattgtttggggaattatttatcctataaaataaaggtatcatggagctttacagttatatttgcctgtatgaaaaaaatactggaaaagtctttacgtccataaaccctgcattttagattaaggttagggtttaatttcctgagcatcgacctgcagaatagataagacttcattatttaacagattttattatcaactttttattgttttagagtcaagcaggacttactgaaaatgacacagtagcttcttgttctgatagtttctatttatgcgatttcatgcgcttctgcttatggccagattttaatgttaatattaatatatattataggtatataatttcttttaactttagctcttctgattcttagtatggatttcttacaaccatatccttttcacttttgtatttcaatcagatcacaagtgggaacgttgatagttatataataattataaattattttaataaattttatttattgaattattacrttttattcatgctctgtcacatgagggatatcctgggtattttgtatcctaaaatttaaaaagacatgcatagacacacaggatttttccatatgagaacattgttacttatgtaggtggtcattctgcaagattgggttatgtarcggtagcttagaaggtattcagagtacttggttataaaaactgcatcatttgacattgagtaacttttcatttggaatgtagcagttctgtatttgaattaaaatactcaataattttctacaactcagtactctttgttcaaaagaagaaattatgtgtcttctgcaattgcttgatttaaccacagagccaatcaattgctttcaaagatggtattgctatttttgtttctgtcttcttttatgtgtcctgatcgttagaaggtaaggaagtccctttaaaaactaagcagatcaaagtgtgctcagcacatattttcaggctgatttttaaagtcttaggaattatcaaagatttgtgtcattctctttgggaaaagatcattaatgatgctttagatttttttcatgtctttgataatataacttagaattctaaatattttaataaaatagatgaaaaatgaaggtatataccaatagcctctatttagcccatagcctttttctttctcaaattactgattacatattttagcttgcaatttgcaatttgataagtgcagacacaggtatacacttgtgaaaccatcaccatataacaagaaaattaacattatccattactctcaaaagtttccttgaacctcttcttccctgattcttgctttcttcattcttaaacaactagtatctactttctgtcactattaggatcatttgcattttctcaaattttatataaatagaactcctcctcctcaatgattgcatctagttttgttataaaaataatttggtcacctagaatgagttcagaagtatttacagttgatcaattttctggaaaastatgtataaaatattattacatccttaatttttttattttttatttttatttatttattttttttgagacagatttttcactcttgttgcccaggctggagtgcaatcgtggcgatcttggctcaccacaacctcctcctcctgggttcaagtgattcttctgcctcagcctcctgagtagctgggattacaggcatgcaccaccacacccagctaattttgtatttttagtagagacggagtttctccatgttggccaggctggtctcaaactcccaacctcaggtgatccacccgcttcggcctcccaaaatttaccagagaagtcttctaggcsaggagttttcttatgcaaagggtttttagctacaaatttcatttatttgtttcttcttgatatttgttagtttgtgtcttttaagaaaataattcattttatctaagttattgaatttattggcataatgttgtttatattattttatttgtataataacaatcaacatttttgtctactaatttatcttctttgtcatatctgggttaattttaactcatttatttttatcctcatcatgggtgaatttttctgcttgtttgcatgcctgaaaattttttatttgctgagagaccagttggggaactatcatatcaaaaagttgaaattatatgaaagtcagagaaatgtgaacgttgtcaatgagaaacaaataaaatgtggcttagtttctaygtagggagtgatcacaatgaacaggcatcttcaaaggacttacgagataggtagcatctcagatacgcctggtaaccaaacataatttaagacagtaacaaatggtaggaacatgkgagaaagagagttcagcaagagagaagcactgggatctaagatgatgtgagggtttttgaggaagagtgactacaccagtttgcttagaaattagggtgtgcataaaagaagcaacgggaaatacctgcagtttgacatttgaccacattgtttgcatgtcatacacccctcagagattgcaaataccttgaagaaggtattgttgtgcacacacacaggtacccatgcattatatatgtatatatgtatatataagtgtggttttgtgtgtatccttgtatatataarctaatgtatacatatgtattcttatatatgtactaatatctatatatagatattyattcttttacacagccctaggtgcagtaatagatacccaataatcatttatctaactgaactgggttttttaacacctttttagcaaagttgtctatactgcttgatacaacagctgttaacttggtttgctaccaaacacagtagccgtcctcatccacaattttctgggtcagaaactgctcagattagaacatcaagaacatgccctcaccctaagctttgggaaccagaacaacttatctatgccagaaattaagaacattgttttctactcagcttgtccaccctgattgatgaaagaagcaaaatcattattaaaaagaatttttgctaaattaagggaacttgtttattttatgcacatgactttgtgcataaaatattttattttcagctctgagaatttgtctattggatggcttaagaattaggtaaataggatgtgattatcttaaaaataaaaaaaattgtacagatatatacaataaagccttaacactttggaacccaccagtacagaacatacaatcatttgaaaattattcwtgaagatgtttgaccttgtattatctaggaagaaagtaaaataatagccgaaataagattgttgaggattgttgtatatataatttgattacaaaagcatatttgcaattaggatagtgatgatataaatgattacaattaggatagtaataataatataaattattccattaagctcgtgttttagttgtaaataatatttttacaatataaaggttttcctttttatgtaaatagaaatgtgcactcattaatgaaaatttagtgcaagaagcaaaggagaaaaaacgagtcctagtaaccccccaatatacatttctatccagtcttttggggttggcatagtgaatataggcktgtgtgtgtgtgtgtgtgtgtgcatgtgtgcatgaggggatatggttttactgagttataactatatgcgattacattttctaattgggtggtaaaaccttactgaagtgtttttccccagtggaagttttatgtccaattataggtttatatacctaattatgaattatcaagacataattcataatattttgtttttaaaccacattgagatctctgtgtgaaagggcatgttcattgtgcaagcattagagcctcttgattttcacaagtcttatcagttatagttgcagatgggatgaatcccctaggaacaaccacaggctgttgtgagttaggaaatgcacttgtcsatggtctcctagggtactcatcatctcatttgataatgaagatttctccattcttgacaaccttattttgcttcattctctattcatttatcagtgtgttttgggttcatttgcctataaaagaaaccacaaaataattgtggcttaaatgcaatttttgttgttcttgcatcagaaacaagtccagagatgggcgatttcattcaggtggacccatagcatgatatccaggccacttccattttttcttttctaccatgcttagtgtgtggctttcttttgccaggtcatttatgatcccagatggytgctggcctttagagagttccgctgcattccagacagcaagagaactccttccggtacagttagctctctccaaagaactgttctgaaagtttcaccaacaacctccatgcacatcatctgtggcaagaatttactcatgtgaccatacctagcttcaagagagcttagaaaatgtagtgtttttagtgggaaaatcgctaayaaataaaagtagaatgcagtttttcagggaaaaggaaggcaaccctttgaagtactattgtttttaagccaccttatattaccaagctgaactcaagtaattttcacaagaaagacatatgatagtatatttctaagccattgcaggactatggaaaaacaaaaactctatcttctactttcataaataaaggacagtttgactaagaataatgttcttgggtcataaccattacaaaaatctcaaaaccctctgtatcttgatccattataaccacatttggtgtttcagacaagcctcaaagccaggcttaatttttcctttctaagtaacctgttttggttgcctttttgttgtgctttgttttgcttattctgtattaataagacttatttattggtatatacaatttatttttcaatgttattgcctgctgatattttatcatacaaaagtaaatggcataaaaaaagtaattgtttacagcttcctgagtaagacgttttcatttaggtgtgtcttttttttcccatagagaaatgaactattgcttmtgggtggagaaatgtcaaatacctttgctgaaattcttaacttgcctttgtatcttcacccttggcattgaaaattatccaaaataaattgctaggaaatctgctaaattatctctaagggagtgcctaaaagtagccgcaatctactctcttttgcaatacctctgaatagaatggaattaaattctgtctgatgacttaggaaaatagacaagtagtcttcatattgcttatctgtagtatggagagagtaaggaatatgttccttttgtacttggtaaagagcagtatcttcagaaacacgcagcttacaatttaatgcatagaagttgccaaagctgttacaaacttgttaaggtaatttgtatcaccttactttattagttacctattgctatataacaattatctcaaggcttggggcttaatacactaagattaattatctcgtggtttctgtaactcaggcatctagctgagtcctatactttaaaattcctcagagcattgggacacatcatcctaaggactcaaacatgagaaaatattttcaaatttgcctcaggtgaaaaatgagtgcagtaaatacactaaggacacatacgtatattttttcttgtctcaattaacttttaaaataatgtttgcctttcgtctgtctttattgctttatacagtgaataatagcgaatctagcagtcagaaaagcactctttgtttttttgtttattttatgaagtcttcttttaattttatttcttaattttttatttatttagtagtttttttggggggtacaggtggtttctggytacgtggataagttctttagtggtgatttctgggatttttgtgcacccatcacccgagcagtgtacactgtacccaatatatagtgttttatcccacaccccctcccactcttcctctgtgagtccccaaagtccattatattattcagatgcctttgcattctcacagtttagctcccacttataagtgagaacatactatatttggctttccattcctgagtcacctaacttagaataatggcctccagccccatccaagttgctgcaaaagacactattttattcctttttatggctgagtagtattccatggtgtatatatatayatatatatatatatgtatatatataccacattttctttatccactcattggtcaatgggcacttaggttggttccatatttttgcaactgtgaattaagaagagtgtcctttgaatattctcctagtgccaacattaaaaaaacagaaaaaccatagaataaattataggaatatacttttctgaaaatgtctatattgtcttgaattttcaggaagactatctctgaaatattatacttaaactagctacccatactcctaatattattgcgagctgaatataatacctaataattccttacataataaagactggtcttaattatatcaaaaaaaaatctgaaaataatgctatttgttgacctagaaatagctaygttaaaaatcttaactgagtgtatttaatactgtactattttccatatagttacaataaattccttgctctttctctctttggctacttttttgaartagactaagatgcttggtgaagcagctggaaagaggtgatgttaacgtcgtcgacttaaagaagaatattgaatatgcggcatctgtgctggaagcagtttatatcgatgaaacaaggkaagttttaaccttcttctcttttatcttctttgattctctcccgtttttcttcctctttcttgaccctyctttatctcaaacaggaatttagcatatcttcctgtgaaaccaaaatcaaatcttattaaaatttgaaatgttcttcttcatgtagctaattaactggactatgattctctaaaattaatacacattttaatccaaatgtttgaatgtcataagatagtcaaacactaaagtgaaaaaaaaatctcctcttcccccatcctcagtctccttgggctcagacttttaaatgtcagagttacgtgtaggcttatactggttttcactgatgtaaggattttccctattatctcaaatgtcagagtccctttaggaaaatgggtgttatatgcccacacattctcatgagatgtgtctaacaggccctctatgcagggattgctaaggggcatcccaaatgtgtgtttttgatcatccaaacctagcctcataattagcagttgtaaggagattaggaaagggggacttatttgaagagggttrccagcttagtgctgtgaccctcaaagaggctgttcaccccctggaggatatttggcaaatccaggagatgtgaccagtgtctcttggtgttcaaagatatctggttcctaattctcttctcaaaaaggataaaagtgacaggctaatcagggctacctgtgaattcagagctaagagggaacctgtggggagagaggcatgcatttccagcatttgacatggaaaaggtgctaatttttttcacagccataaagcaggtagaatagaggtctcttaaagcaccaaagactacttaagtcaaatagtgaaaaagaggctgcatagagtaagtgatggtataagagccagggtaggaattataaaaattcagctaaaatagtagaaaatatatatattcaaagtactctcttggtgttagcaagttgtctctgaaggacccacaaatggtccccaggagaaaaaaaataggcagcatttgggcatttgtcacatagatgacagmaaaaccaccagtctagccagaccctttggtcctataatttcctgcctctcgcaccgcattgctaaacaaccagaagcagcagtgagtgggaatatggaggtgaggacacccactaggccccttccactcagcaggagtccatgcctgtcccaggcctaagcttggggaagatgagcaatgttaaactggatgggcaactaaataacattggtttttatttacctatgtgtactggacttcacaggcacgcagatacacacacacacacacacacacacacacacacacacattgtttaataagtaaaaaattcacatgatgaaattcttgcctctaccctggtcacagtctactctgtttctcataaatttcttatacatctttccagtgatttattacatatttttattttgtatttttgcctcatcctttcatggaaggtagtatactacgtaaacagtctctcattcttcttttttcactgaaaaaggaaacttaaaagtttccttttattttattctgattttttaaatatttgacaatgagaatttttactaatagctggcagaagaggccatattgagagctttgttgcacaagcgattctttctttgtctgcagagtgaaactcctctactaaagcatagcttggagaaattatttgaggraaagraaacaggctgggcacagtggctaacacctataatcctagcattttgggaggctgaagtgggcggatcacttttgagcccaggagttcacaaccagcctgtgcaacatagcaaaacctcatctctacaagaaaacacaaaaattagccaggcattgtggcgtgtgtctgtagtcccagctatttgggaggctgaggtgggaggatcacttgagccagggaggccgaggttgcagtgagctgagattgtgccactgcactccaatctgggtgacagagtgagatcatgtcaatagataaatgaataaaagaaggaaagaagaaataaaaaaagaagaaagaaagaaagagagaaagaaaaagaaagaaagaaggaaagagaaaaaaagaaaaaggaaagaaagggaaagaaagaagagaaagaaagaaaggaaaagagaaagaaagaaaggagaaagaaagaaattattttcttggtgaatgttcactgaatgtgtatgaatgtacatgattcttctaagtaaacagaatccaaagtgcaaattttaaaaatatctgatgtttttcccttgctccctcatttttatgtgtgctcttattgttcacaagatgattcaacttaacaggtttaagatttattcaatctgtccttgaacagatattttcttttctatttatctataaaactttagaaccaaagaacgatttgaagatttcgttattcatcttctaatggcataatgctaactacctggtttgcctaagtgtcctgtctgtcatttaatagattattatatgctttatttatttattcatttttctggtgcatttcctttccctgagaagtatgactccatggatatttgctaacttagttccctatgatccctaactcatttaaatgtrtattatacctaaagtatagccctttttcatttgaaaattgctcttttgcggggaaaagaggttgagcacaacgctgccctgcttcgtggtagaaattcatttatttttttccttcacataacaaaacattccatcttttaacaccacattattcctaatatttactccaaatttttattattttattataatgcttccatggcatcatgagttttaaattggattaataataataccccacatttgtatcatcttcaaagggctcttagtttcattatctcacattagtgtcaccacaatcctatgtgattggcaggatgattattactttctgcattttactaatgagataattaaagctcttagaagggaaacrgtttgacacaggtcatggatggaagtgttggcaaaactgggactaaaacctaacccatgacttcttatttagtactccttcctctatacctgactcttctcagagtattcctataaaacagaatggtttttagtgacctctgaaagatttagatgacaacatataaaacattttgatagctggaattgtaaatcctgtagctaacacgtattaagggcccactatatgctaaaaaatcttctaagcattttatatataccattttatttaaacatcataaaagtcctatgaaatagaaactctattattaccagattgtatatgagaaaacttaaatcacagaaaagttacatagcttaccaaagggaagacagggagttgaagagttggattagggccttggcagtctgaccctagggcttgggctatgaagtgcaattctcatcctcatcccttttctaacatttgatgaaaaggtgacttcagagacactgaagtttgatgaaagtgcacaggttgtcaggatcatcagccccagtggtgtactgattgtgtggcatctctttccaattctgccttcagtagtttcatgtggctagcttgaaaatggctaccgtgggagtatccacacccatgaaaaataacatgctacaaatcagaatttatttttttctggagagtctgttgttaaacatttaccatcataccacaggtcagacctaagattacctcttacaaatctcctaagagctgcgatttcatgatcaaaatatcagcttaagattttttagaacaataataatttatgtggttgattttctatatacttagtaagatacacagcagtaaactgaggatgtttctgttgagatgtccatacaattattaaagtaccatttcccttaaaactatcagtaaaacagagattatgtaaaaggagtcaggtccaagaagcatttagttgcttttaaactttaaaaaccttttgacttctgaaatgytttttgatagaaaattcgatgccgtgagtattccagagaggtattgtttgaatgttgagctggactgaaagaaaaaagtcagcacaaaataaagcaatgtaaaacacaaattattaattggtttaaaacacacacacatacagagccttaatgattgcagaatttcagttaagaaagcaatcaaaacaaaaatctccctttaaagatgattttggtgagaaaaataaaaagtttctgaattctgactcttagtggagataatagcacaataccctaatgaatatgactgctggattttttaaaagacattttcaaatgcaaatgccaatcctttatgagtcttgtgttcagaactgtctctagaggctattgtttttcaaacttacaaagttttaatccagaaacatgtagcctaaaaaaatatgttcgattgtccttatttggattgggatattgccaagcaaagtagcatttttggcctcatgcatagcagggcaggcakctgcctgagagatatactttcaagatcggtattgtgcttactaatacctcctaaaaacacaatttataactttctttgtttaacatgaaccaatctgtctcataatttcgatgattagcgcttagactctggattcagaaagagtaggttgttcaaagtctggattctctacttaatactctttctttaaggaagttactttacatccctggctttatcatctacaaaataagagtaaggacaatgttcacttcgtaaagttgatatgagaattaaatgtgtaacaatgcctaagagtaaaatttaaataataacaagatatttctattttaaataaaattcttatttattacgtatgagtaaaatgcaaataactctgggatacataacacatgaagctatatgatttacatattctaataaaggtaacaaatgcttccctgagagcagtttttaatcctgagaaaatgaaaacgggtactggtcaccaaggaatgaaagcataaaattatggaaaagagtgcctttcccttaatacagagtcacattatctctgtaaaaacatcagttgacttttgcrtcttgctaaatctagggatccttaatttggggttagatactgcattgatgtcaatcagtactttgagaagttagtctggtagaaagaaattgagcgtcatttagggtacattagaggctaagatccttgaaattactgagtagagggactttccaaggaatcttcacycatttaacaaatacctgttgagtacctgaaatgaataccagacacactggtaatcagaatcaggagcaaaattgtgcaggcagctggtggctagaactgggtctagaattgtgaagacaaacctaggcacaagaacaaatgctcaaacaagaaacagagagatttagagagagacccaagcaacagtgacagattacaaggaggaaacaccaagtatcaacagtaactgataaccagagggagtaacatggggtaagaatggggtaagaatttatacagagtcagacttccaaaccagatatgtctagacttctagacttgcaggcatttttgagtattaatgagtttgttctctggcaaagctctccctgcctattcttaaagacatggcttctaacaagaggactaaaggtaaaatatgtctggaatatgctagatatatgtgcatggaagctcagaaatatagtgccatttagagatatgaattataactcaagggtctcagaatttttaaatacctttactttgatgctaacgttcaatagttggagctcctttactgtttgaatatgttctccatcctaaagttcttgagaatggtcagtgaatgtttacttatttcaccagtctgtcctggctgtcactttcctttgcagccagctctctggcttcagactgatgaattgttcctttgcatttttttcttcttacctatttttttcctcaagtccagctgtgtatagccaggatcccaagcatgagttcaatcccttcctcctgttctccaaactgaagctaaaatcagctataattgcaataaggcattagtgatagatgcttacttttttcttttttctttttttcttttcttttttttttcgagatggagtctcatactgtcgcctaggctggagtgcagtggcacaatctcggctcactgcaagctccacctcccgggttcatgccattctcctgcctcagcctcccgcgtagctgggactacaggtgcctgccaccacacccagctaatttttttgtctttttactagagatggggtttcaccgtgttagccagggtggtctcgatctcctgacctcgtgatctgcccgcctcggccccccaaagtgctgggattacaggcgtgagccaccgcgcccagctgatagatgctttcaaaaatctacaacttaagccctttcatagaggtcccttatcaagcatcttggtgcrtcctctaatgcctgatgcccatgtcacagagaccttccactacagaagtccttttgacatgtcttgctgtcctgagttcaggacctcaagttctgtgactaaaataaagataggggccaatcaaaattaatgtcattcatctctaaggatcaacccctatgttaaaagactgtgcagtctaaattcacatttagaaaaaacatgacagttttctaaaggacacagaacctgagagtgatgcagctgtgctcatggtgaagacaagcttgagcattactttctggagatgtttagcctcttggaatcccattgtctcagtcttctaaatgccaaaggagagcccttactttttttagtgtaactaaaagacctattcaaagtattttttataaaacaaaagaattagtctgcactgaaggtaaaataaagcctatctatgtagactaaaccaattttttgacttttcaaatgtcaaagttttttcactttcaactattaaggtttaraaaacgcttggaattccatatcaaaatgggctaccatgttatcccactaatttaaatcaagggaggggataaaattggaggtgwggaacaggagggtagttaaagacaggcaggtagttaaggaaaacttgagtatttaaggcaaggcatggagctaccaaagaggagactagaaagaatagacaccaaagcaacaggcatatatgacaaatatgaattgcccaattaacagaaagcagggttactgaaaagggtaaatcaaatgccacagggtgaaccactggatgagttgggagattcctaatgcyctgaagtagagtttcagcaaagagaaaaagctaccagccagaagatgatactatgaggaattaatgtggaatggcttcgtgaagaaattagtatagactatttttccagaatttgctcgagyacaaaaaacagagatagaccaatctactgatttggacatatacttgaggaatcctttttgtatgtttttgttcacattgtttttaggatgaaaggttggtatctgtagcccagaaacgaaaagtttaaaaaacgtatttagcatgacaagaaaaaaaaatgcttcctagaaagattaggtcaagaagtcatccttttatggctgcatagtattccatggtgtatatgtgccacattttcttaatccagtctatcattgttggacatttgggttggttccaagtctttgctattgtgaataatgccacaataaacatacgtgtgcatgtgtctttatagcagcawgatttatagtcctttggatatatacccagtaatgggatggctgggtcaaatggtatttctagttctagatccctgaggaatcgccacactgacttatactatgcagccataaaaaatgatgagttcatgtcctttgtagggacatggatgaaattggaaaccatcattctcagtaaactatcgcaagaacaaaaaaccaaacaccgcatattctcactcataggtgggaattgaacaatgagatcacatggacacaggaaggggaatatcacactctggggactgtggtggggttgggggaggggggagggatagcatggggagatatacctaatgctagatgacgagttagtgggtgcagcgcaccagcatggcacatgtatacatatgtaactaacctgcacaatgtgcacatgtaccctaaaacttaaagtataataaaaaaaaaagaaagaaaaataaaagaaaaataaacaagaaaaaaaaaaaaaaaaaaaagaagtcatccttgggaagttatctaggaagagagaaatagccaaacattggttgaaaatgttgatgtggccaggtgcggtggctcacgcatgtaatcccagcactttgggaggccgaggcgggtggatcattaggtcagcagatcacaaggtcaggagttcaagaccagcctggccaatatggtgaaactccctctctactaaaaatacaaaaattagctaggtgcgctagtgcacacctgtagtcccagctacttgggagggtgaggcaggagaatcgcttgaactcaggaggcagaggttgcagtgagctgagaccatgccactgcactccagcctgggtgacagagcaagactctgtctcaaaaaaaaaaaaaaaagaaaagaaagaaagaaaagaaaaagtgtagatgaacttggagytaactagtgcacagccaagggtcttcaagtaagcaaaacatgagtagcattgtaaaatccgaaagactcactggtatttcattttaaactcagctgcttagcatgggtaaatgcgctgcaagagttatggctaacgtatgaataatgagctgctaaacttggggaatgatgtggagggcaaactctttatgtttaatcactacaacctgcacatcatgatggcactcactcatgtgtgctcctttggcatttagagtcagaataagagagaggaaaaakagaaatagattgggctaatgawcggcttttattaatatttcaattgtaagtgataggaaacccaaccaagccagtttaaacaaacaaatgattaacttattggctttcatggccaaaatattgatggctagtggtgactataaacacaggttgatctagggcacaaatgatgtctgtcagcaggtccacctctgttttgcttgctctggaatggctcttttgatgttttatctggtagcaagatggtgacagtatttccaagcttcacatcctcacaccatcaaatccaacaggaatgagaaaagttttctttcccataggatccgataagcatatccttatgtttcattggctctagttaggtaacatatttatccctcaaccagtcattgtgtccaggggagttgaatatacaaggtcagtcgtcaagcatcccatgagaaagataggtggtcaactctatttaagtcatacgcttaagaactgagaatggaggaaagtgctttctcaaaccacaactgtgttgtctctgcagtgaaaactaaaatgtttctgttagtgtcacaagcaggggacctggatcggggtttgtgtgggatgtggtggaaagcccttgattggcagttcagcaactcctttcttggctttgmtcctactaatgattagtctctaatcattgtttttttcacgtggaagataaagtctccagtccctttttgttctggaattgtgtgattttatccatggttccaaagtccccctgtaaagacttgctcatgactcaattactctgactaccaggagggtgacaggaggaaactgcttatcatttgcttagcatttataagtatgggctcttgtattcttcaaattatttccatttggaaaagtccctgaggaaatcagtttgaggaaaatgtgctaagacgttgctggaactcagtgaatcattaaaaatcaagtaatgatttttctgaattccatttttgtggtgtgagttgtggggaggggtggctgtttggagtgttgtgtttgtaggctgttctcaccctgtaggtggagtgtgaaaatcacttagaaaaagttgcartactttttggttggttttcctattttctgtccatctgtggtgtgttactttctacaaactttcaaaaacagcctcactcctgaaaagggggaaaaaaacctgaccagatcttttgagaaatgactaacaaaaaagctctatgtgttgaataagatctgactattagtgatgttttgattcagtgtaatataaatgaatatttgctgcattttaaaaagatgttttaaatattattcttttccaataataataataatgaaaatcatttgacagttacatccaaggcaacatattattcaatttgcatatatgatttcatataattctcaaaaatgcctataaattagatacttatattctttctactataaagttaaaaaatttaaggcataaagaaagtaattgacttgcttaggattatataattattaagcatcagagacaagttcaaacttaaatggaatatatcaaacatctatttttctcttttttcctagccaacagagcccattttttccctaattatttactcccttttttaaggccaagtgattcaggggacaccaacatcagccccaggctcaggatggatgactcctaaytgatattaaccagttattgttctccagttcactaatcagtgagtttaggcttggacatgtgatatgattctggccaatgagaattgcataaatggcagaatgaaggggggtgttggcagaaggtttcctcttcataggaagggtgtcatgcttctgggtggtgtatctacatctgatacttacagtgaatacagccatcttgcttcaagcagaaagctaaacctaatactaaagttgttcatgtagaaagacaaaggaaaccttagtccttggtgatatcattgacttcctgattttaaaaaatcccttactggagtcaacttacttttaactgtttttaaggaaatcaatcaatttctacattatttgagccactttcatttaggtttgatgtcacctgtcattgacagcattcttacagccaggtaggttggacttgctccaaattcatgttcttcatctctaatccttcccaggagtcactttaccctaacaataaatcctaatgcaaatgtttgatttctaagttaaccactaataattcataatctagtttcccatgaaatgaggtaataggttaagtttccaaggtaaccctcaaaacactgatcccatcataaagtcgaacaacataggtgtttcttgagcaagtatcaagtactagaaatgakggacttacatttttctacatacaaagatgtttgtacattctttactatatttatatagcctacttcccaatatatttttcttctgtctactctccatytcttttatctcatttccatccccatcagtctagctggagtcaccattatctgtgaggctgtctcaggcctatctgtgtagacacacattagtcagttccacacagggaccttgccgtcctgcaggctccacccaggagtaggggctggggatagggtggggcattcagctggcttctgctgcaggatcctggaaacttatctggggcatgctcccacccttctcacagtttgtcttggattagaggtcaggcaggatccagtgttccttctcaagatctctcctgccttcctttctgactactcttcgttaatctggggtatctttggacaatcacaggaatggaaactttactctgacttatcacatattcttctattatcttttcctgggtctctcttccttccatgggacatggatttttccctccttcaggtaggttattgtgtgtcatttacaacttgagtcagtgagtgaattcatggctgaccatatatacaaagagttacaggatcacagaaaatactttttaaattgtttttttaaacatttttacacatgaaaaatatctttttctacattaaacaggatgtgactaaaaacattgacatatacaacatatgcatcaaaataagcaaataaaaatgactttattcttcatctgggctaatacctaactagtgcaaatacytgaatattttaaaaatccctaaaaccagagaccctatgcctatgttttytatacttttattcatttattcaacaaatatttgtgaaggacacactatatacactgatacttattttgctattctgtttggctaccgttacctcccagttgtcatcatccctactattttggcctcatgggtgtagaaagaaatatattccttatctccccttacactcttgtcttccaaatatacccctgctctactraggacacattctccacccatggtctgttgaaaattgacttttttagttctcagtcaagtaacatacagataattcccatttgtaacatcattataaaagattcattaattaaaatactttcatggggactcttctgactgttcctcccgatataattcaccaacatgcctcatcactgacggtgaaataatgtgcataaggaaataagcagtgccattcagcacatgtcatagaaaataagtaaatcgtattttcttggtatagagcttccattaattggcaagctgtgaatgaaggagaacagtgttctcaaaccttagtagtcattgaaatcacctgaagggcttgttaaaccagggtgctgggcctcactcccagactttctgattcaataggtcttacagcatgggaactttcatttctaacaagttcccaggtgatgctaattcttctggtctagtgacaacaatttgaaactactcttctagatgatgtcacaatgagaccatacacaaaaaaaagagaaacagagagaccattagaaatttggtggttagaaatttaaggtcttatcaagactatgccccaagtgttgttccaagttgtaaatgagataactttgtgctaaaatgccccaattccaacctttttttgtactgataaaggaactaagtctcacgcggatgaaatatttcttccaaaactacacagccaataggtgatgaagccaggagtttgactccagaggcagtctttctaactacacaggatgcttattaatcaaaatttgttaatcagtggagcattaggctctatgcctaatggaatattttcaaaaatgtttttgagccaagaggatttcctggtgggaagccaagagtcatcagcaaggctttgggcagttttctgcctcacccattaatcccaattccatccccaaatgactccaaaaatacaatcttgatcccagctctccaagcaatttgactctttctcaggcccttcccctcaacattctttgggtcctttctgcctctcctggaggacaggacctccactgcctccacctttgcttcctagattggatatggaggaggcaccaagcactccgtaggtcttaccttggagaaagccacatctaacttcaacattatccttacttgacctcatttaygccaagatttgccttttgggaattgagctaaggtcggcataactgacttctccacccaaaagttcagtcttcatagtcactcatgtacaatggtcatcttctcacagttaaaaaaaaaagttgggtcgaggagaggctaacaataccagaggaacattgaacaaatctatcaggaaactttttttwaaaaaaaagctattgagataaattggtaagcttgccattttaaatactttttggaacaaaacagggaataaataaacatgcttcagtggtggcctgaaagaaataattcaaatgtatttagcacttagtaagtaggttactgacaagtagatatggcatttcaaatgtattacctatttccatcctgacatttaatttattgtacttcaaagtgtcctgaaattttgtcatccagatatatttctctatgagaaaacaattcaacatactagcactggaaattaaattcaagcttcctccaactaaagatttcctgacagatcaagacagatcaaactcctttaagactttttaagatcaattctttttaaccataagtttcaaggcagagaggagatagagaaaatgattactggcattagcattgaccgaatgtgaaggcagyctgggtactcagtatgaaaaaaatgcgtttaaagtggaggataacttatcaatcagtaactcagaccctgaaaccagacatacatgaccaaaaaatgtgacatggacactcctggttgaatgactttgcacaaatcactcaagacatctgtgcctcagtctatttatcagtaaaatagaagtakcaataataattagatctttctcatggtggtattatgaggattaaataagctaaagcttggtttcttgcctggttcttagtaagaaagcaataaagcagctggcattatcatctatatcgatcctcaaacagttctgaagcctgagtgaaggattggtgttacctttagagttttggtttgttttctgtttttkggtggggggttggggggtaagggtgaagaagggtacaagcagctcagaacgcagacatagrttaatcaaagarataatactaatggactctcctaggaggaaaccacttactccaacaagagtattcctactatggaaagatgaaccacccttaattcctccakctgtcctggaagatattcgcaacatatgagttcagtaccacctttagccccaggccagtgaagctgcttcccagggcaygattccccacttcagggggcctgacaagggctctctttggtgttcctctccccatggtktgccccgcaagaccaagaagaacctgaagctcatggccctcttccccctycagatactgtaggaccctggaattccctgctcttcccagtatgttcctttaccttattttgggcagaagaccccagcattctctacccaaaggtccccaagcctgtctcctacatcttactgggctttcttattaggtctttcctctcaagggacccaggacgctattggtgtttgtaccctttcaaaccaaggagtggycaagaagcagctcctttcaaagctaggtaggttgatggagactgtacttgggggctgaggtttccacctgtggtgcagagtggagctgcaggttgctggcccagcgctgtcacacaaggagmtgagaactttcagttcacccaacttgtctgtcttttatgaaacttattaaaaggtagaaggatagaacatatagcagtttagtcacctgatatataactttaaaatacttagttaaatggtatttggatgaaatatgctcctaccctgagcccatgaaatgttaggggaaagaamtgaatgagttcgttgctgcgtgaaacatgtcctttataagaatagtaaagcaggaaaggaacatttcaaacttgagaaaccagtatmtcctaactgcacctagcacttgaattttagcacttagaaggtgtaattgcgggtaccaattgcccagaaataaccacatcagtacatgaatgtaatcattttccaagagtccactgtggacagaaatattttcactgacatatgattgtaagagtcaaaatcccatgacctctccttccgtggccgcctccttctttacttcccttccctgcaaactttttagttcaaaatataagccctttgggagttaygtcatctgatttcaagagaaaattatgattataaatagctcygaaggattagttgagtcacagattggatgcagggtcagytttcacagttcaccggctgccatctgcacccaggtcgtgtttagaaacycttgactttatgctttattgactccactgggacaaaaactaaagtcgtatcaaacaccagtgggagcatttttcagaggtaaacagtggtaacattttacacatatattccttatcgtttctttttctgtatagcacgttttaagaattgcttttttcytttttttttttttttgacagtcttgctcttgtggcccaggctggagtgcagtggtgtgatcttggctcactgtaacctctggttctgggttcaagtgattctcctgtctcagcctccccagtagctgagattgcaagcatgcamcaccacacccagctaaatttttgtatctgtagtagagaaaaggtttcaccatgttggccaggctggtcttgacacattttaagaatwcctaaggaaaatgtaccagtcatcattttttcacgttgtatgtttcttaaaaacaaagtcttcatttttaaaaagcatttacaatgtaaatgattatgcacactctgccctttaacattagaataaagagcaatgaagctattagatgtttgtaaaacaaaattaactatgatagttgagatcctattttatcatcctccttgcacaaatttctttcaaaaatgaaatgaggacaaaatatatgttttacatgtggcataatcttatacaagtattcagatattttcatgtcttagataaatgtataggaaaattctttataataattmtctgccsgtgaaaaagtacaggatgacaatgactagtccatattacattatagtttttgttcctgcactgtctagcgtggtcagatgaaacttgaggagctgctcatgttgatcagacggaagaagacacagagtacaaggcgggtacgagggaaagggaaaatgaataagtaagaagaggtaaatggaggggagtagggagaaatatgtctttaggtttattagtttattttcaaaatttattcaaatttaggtttgatctacctgtttttcaactttcttctctccaaactggaataaccatcttaatgaacctgtgaacacttacttatgtcttcattagaagtttcttactcttctctatgtgataaatgagcataaaagagctaatatttgacagaaatactgagtttcttggctaaaggcatataaacaatgcatactttttttaagttttctttcctgtgactttaaaatgctatcaaaaatgtttagttttttttttctacaccaaatatatatgtttccccacaatttgtttcaataatatgcaacatgattattcaggaacaacttaatctaaaggcaatgaaggagatgattggcagcagtgaatttgctcccaagatgttgttgctgcataagcagcaataaatttgattatatcaatcaaattgcacaggagtatacattaaaacttctaccatttccatccttactccactcatgaaggtratcagttacaattagtctaatgtaaatatttctagacactttatagccattcagtggatatatattgaccccctgctctgtgtcacacatgattttagaagctgatgataaagcagtgtacaacagaaggccaactctttgctctccaggtctttgcagcccaggctgctagactgtaagcataaaatgaacaaaccaaccagtggacatatggtatggcatctagtrgtggtcagtgctaagaagattataacagggtaaggctgggcatggtggctcacacctgtatacaatcccagcattttgggaggctgaggcaggcagatcacttgaggtcaagagtttgagaccagcctggccaacacggcgaaacccaaccctgtctctactaaaaatacaaaaaattagctgggtgtggtggcacgcctgtaatcccagcaacttgggaggctgaggcaggagaatcgcttgaacatgggaggcagaggctgcagtgagccgagatcatgccactgcactacagcctgagcaacggagcaagactttgtcaaaaaaaaaaaaaaaaaaaaggaaaaaagactatagtagaataaaaagacaaaataaaaatgaaaaatgcttactattgggggcaggcacagggatgccctctctacctaaatgcagtaaggaaatgattcacacaaatatctgagtacaagattctaagtagagtgaatagcaagtacacaggccctgagrcaaaagcaagcttggcagctttgcatccagcaaggctagtgtcactggagcaaaatgaataaaggggaactggttaaaaggtgaggttggagacttagcttgagatgacttatgtggagctttatgaataaggcattgtggtctgacttaaactttaaaagaggcattctggctgtagagggaagaagagactgacaggggtcaggagcaagasggggaggccagttagcaggctgcacaggaggccaggcaagagatgatggcagcttggcctctggctcattcgttacaggtgggaatacaaaatggtayagcaagaaagtttagcagtttttgcaaaactaaacacttatgataccatccagccattgtgttccttggcatttactcaaatgagttgaaaaaagctgtacctgtttataggagctttattcataattgtcaaaccttggagcaatcaagatgtccttcaatagtagaatgcatagactatctatgcacacaatagaatattatttagcaatataaagaawttagctatcaagccatgaaaagacatggagaaaaatgcatattaccaagtggaataarccaatattaaaaagtctagccttttactatatgatactaagtatctgatggtctggaaaaggccaaactaaggagacagcaaaaagatagtggttgtcagggaccagaggtgagggaaggaaggaaggttgaatagatgaagtatagggattttttttagggcagtggaactaccctgtatgatactgtaatggtagacatatgtcattayacatttatcaaaacccatagaatgtacaacagaaagtgtgagtcctcatagaaactatggatgttaattaataattatgtattaacattggctcatcaactgaaataactgtaccacaataataccagatgtcagtaatatgggaactgtgaaggtgggggtggagatgagatgaatgggaattctctgtactatacactcgatttttctgtaagcctaaaaaataaagtctaaatgaagaagstgcctgagattgtggctttcaggcagggatagcatagtacagagttctctaggtaatcatgcttattcaaaaaggaaaaattaaaaacttcttgaggagaataaaaaggtcaagttaagttggctggctttggaggcttcccccatttcacacactggagtagcagagatgcatgcataggcagatgaagmtctcaaaggccattgttgtaactgggctgtagagcagagaaaaatctttgagaaacagacctgcagctactatttctgtcagctgaagagaaagttaagtcagttcttgcacacagagacatacaactgaactcatacccagaytcacttcttttctgctgtacacattctcctggtccytctcttcaaccttctgatttggaaagaagttctctcatacaagaatgaacaattttcaaaaagaaaccaacatggaatccatataaaaaaataccacaagaacaaaggtggaaaagatagggaaaaacacatgacaaagaacccatgccagaggaatgtacaaatctgtgagctcatcctatgaactcaagaacttaatgaaatcatcaattctgtagaaaaaaataatacaattaaaayaaagaaaaaggtttcaagaggtaaataatatgataatacaaggaggtgaaacatgggtacacataactcagtcagcaaatggaggaggaaaatgaggctaccctgtagagacagccaagccataagccacaaaacttaaaagagacataactgaaaacacagtagagtgtttgacaaataaaatactttaaagtttaaaaaaaaaagaaaaaggtaaacaaaacaggataagatcaagacattaatttttcaaaaaaagtttagtggaaaaatgatagatatggaaactagataaaagagatctctgataggcataatccatttccctgaagaagagaaccaaacaaatggaacagaaaaaaatgtatagtctgagaaaacattaataatataccattaaggccgggcgttgtggctcactcctgtaatcccagcactttgggaggccaaggcgggcggatcacctgaggtcgggagttcgagacaagcctgaccaacatggagaaaccccgtctctactaaaaatacaaaattagccaggcgtggtggcacgtgcctgtaatcccagctactcaggaggctgaggcaggagaatcgcttgaacccgggaggcagaggttgtggtgagccgagatcgcaccattgcactccagcctgggcatcaagagcgaaactccatctcaaaaataataataataagtcaataaaataatataccattaagactttgagccatatgtttataggacaaaatgatacccaactcaataccaattacggtctttgaaaagtagtgaacttccaaaatraaagaccatttttgcaattgtgctcagttaactaaactaactaaactcaaaacaccattcttacaactttgtctattcctctcacagcatgcacattggtcttttagatacataaatcatatcacatcctgcttaaaataattcaatgacctgccattgcaaatatgacagaatccttccaaggcctgatattagcttacttatacctatgtttgcctcccaacttgggtcactctctctctcagtcagtatactccagccacatttggcctccttcctgttcctcaaacatgccaatactgatcatgcctcgggcctttgtacttgcccttctttctatctggaatagatagaacagacttcccccagactttcctataactaatacttcctcattgttcrggtcttaactatctgatcatcttatctaacatagtgtttcctcwcataattaaccttatrtcataattcttattttatttttagtctttcttttaaaatataagttctacctgataagggatcattctcattttttcaatttttaatcacttcatttagtttgacaataattctgtaatgtttaaacagtatggtgtttagatttataattgctaaaaaggcattttatttcattgcaaataggatttttacatgagaaataggactggtatgttctattaaatgaatattaatagagaactgagtctttatattctattttatttataacctacactggtagttatcacgcagcattcataaatgatggaaagatgatttcttatccaaaccaacagctacacaacacacaaamacacacacacacacacacacacacacayacacacacgasagagagagagagagagagagagagagagaggagagagagagggaggagaggagagaggagagagagagygagatatgtattttaaggaatgggctcatgtgattattggtgctggcaagtctgaaatttgcaaagcaaactggcaggctggaaaccctggcaggagycattgttgcagtcttgatttcaaaggcgttctggaagctgaattcctttctctttgggggaccttaatcttytttcttaaggttttcaactgattagatgaggcttacccataatttagagggtaatctgctttattcaaagtctactgatttaaatgttaatcacatctaaaaaatactttcacagcgacatttaaattggtgtttgaccaaaygactggccaccataacctacctatggygacacataaaattaaacctcacggaggtagttgttgccttttcaagattcccttttcaagttacacaatagcatattccatgctcttcccttaacacactgtygtcctttatttgtgtgtccctaattaatccgtatcattatttctccctaaaattatatgcactttcttctcagtagatgacctcatgcatcacgactaaggatttccagcctcctaagtaccactctactatgtggaatatcmcttccatatgctggttttgtcatgtttggtgagctctcttggatcatttatgagtataggacatatagccttaaagccatcaacatgaaatttactgtggaggaattggcaccatcagccaggtttctgtcattctaaggagattagctgacaaaactaggctgcagtggaatgcttggagcatggtgacatcacaagattacaccacaatgattcctattccacttgttctacctacmctgtatctgatcactgcataagagatagtagaaatggcattatctttaaagtagtgatattttcaagccatgaagtttagtgacttgctgaaatgggctagggaatctaatttcaaatgggcaaaaagataaacaaactattttgctttaattttctagttcagtgttttaggggtaaatcaaaaccatccaaatgtcagatcagaaagaaagttaaaaatcatatagagtaagtattaatcagtattaacattcaactctaaatattttttatcgttatatgtatacacgtatctttgtgactccagaacttatgtttattttttataasgtatttcataaatacattcatgcttatttaataccatggaaaataaatattggcaaatgacttttctgcaggtttataggaaacagcagcatatgtgagaggtcatttaaaggaacatgaagagttcctctcctgcatattaccttttgagcctctctttagtcagattgagttstttgtggagacctcctgttttttgtcctttgttttgtccctgctttttgagatggcccctgccttgtttctgaggcattagcatgtacaaccatctctggccaccttccaacattagctcataatcgttaggcctaggtctgggcaaagagattttcaaaagcagatgaaacccaaaggttgaagctaacatgtgccagagtttttagattggtgcacagataaggaaagaaccaagtcaaatggcaggcagagctggcctgtgttcttcctagaggcaaagttcaactgttctgtaagctgtttctgtatttggtggggagcctctgggatgttgccagttcagacctctaggaagttcttgactgccgaagctgactggccttaaaataacgatgtttccttagtttcctctttaatggcagctgttattactcagcagtccagtcaattttatctacctggagcttatacagagcgtggtcattgtttcagttcctattcactacctcrctcactgggttgatttcctcagccagcagctctaaacccatgagagctccaccccgtggtcacctgaaatgcgctttaaacataatctrtttgatatcatgtgttttcattttttttttcacttttaaaatctgtgacattgatagaatggatatcgttgggagcacttaagtggttattttcctaaaatttasaggtacttatccaatgaagtagcatctgtgaatgacttttataaattgcaaagcctaattcaaatagcatgtactatacttaagatacacacaagattattaagtatatgacaactattatrgattcaatcccccttttttcttcccactccagttacttcctttaatagcagacatctgtttatgaattcacttccctatctttccttagttttattcattattagaatagcacactaaagatattaacagtcggtacctctagactggtgtatcattgtgctgaaatgtttgggaagctgcaaatgctcaagtctattcgttgttgtcttcatatgatcaatttgagaaattaagagctttccaaatgttaatgaattttttttctttctttagagagtacatattaaggaataatcagagagtgattggctatattttaaatcccattgcaatccttgtttttctgttatatgtttttcttcacttttttataaaaaagtttaatctgtataaatttttgtagaagacttctggatactgaagatgagctcagtgacattcagactgactcagtcccatctgaagtccgggactggttggcttctacctttacacggaaaatggggatgacaaaaaagaaacctgaggaaaaaccaaaatttcggagcattgtgcatgctgttcaagctggaatttttgtggaaaggtaagtgaaattgttggtatctcaagacagtaacatttgaaaggcagcagatacattcattttttcaagggtatgagcagtctatatttcacttattgacgaaaactgtgatcataatgataactagaatgaacaaatttgggactttatgatgaacttacctataacaaaaacacctggtcccggatgcattctttttatttattttaagttgacatgaagactgaaagcaaagatttttgaatgacctttctcctcaaatgaacctttgtgaacaactgtttaaaaacaattctgacacatgtatatgttacacaactaattttacctgaataaaatgtaacatttcatgaaatacattctacactgggtagcaatctacatgtcaagatcacttaggcttcctctgccctaaagacagaagaccatttgcttccctyctttccataatggaggaaatctctctcatgctcacttttgataggttattttttttttcaacatttctgtcactgaagcaagggatatttgatggcccctagaaacgcctagttatatcatcagagttttcaatgtgaaacacatgctaatatgacccaattttacattctttcagcccttaagaatacagcttattttttccatctaggaaacaagatatttcctagaactaaaactacaaaagactcgccaaaatagacattttatgtttgacagaattgaaaagtagttatcagaaatcccttagattaaaaaataattacatgaaattatatgtggaatgattatttgaatattttagaaactaataaagttgagaaacagagaaaaattttgccaatatgcctaaaattaaattttagagaaactgcattatttctcatcttctgatatctctaggcattaccgttaatcaatattacaaacttgaatttttttctgctaaagggacartggaaaacacatttgaatttctaaaagtgtaaatgagaatgcatggcaacaaatataaagcttaaagatggttaaatacactgtgcaatttaaagaagatgacttttctctagcatcaaattaaaaatatctaaatagtacatcagaaaatctgtgagagaatcacagatgaaacatgagagtatgtttgatttgctaaagaaatgtatattttgtcttctttgtttaaaaaaatattacagaacttggcaaactgggaaaaaatgtaaactgtggaggaagatcaactgattttccatttccattcaagagaaggttataatatataaaatatctgaatatgctaaatttcaattttttcatatgttacataaaacacatttagtagcctataaaagtataaaattgttcttcaggtaactaaattagtaagcagtctttaagaaatcaatgtgctaagaacatatagaaataaagtcttttttaaatcactgttgaatccccactagtaggtgcataaaaatagtgggacaagtttattggaaattttcaaaagtaatcatcttcaatcctgacagctgaaagtctacttgaagtcttgttgcttcttcctttaaacgcttcctcccaagattcaattccctggcaagccctggcaattacttacccaaatgcattctgaatccactcacttcctcatctccactcctgcaaccacaatctaagcctccactatctgccttcagaaatacgacagtaactttctaactgggctcctctcctcctaacttgaccaccccaaccaagccattccacagtgatgtttttaggatataaattagttcctgtcattcttttctttttctttttctttttttttttttttttttgacgtagtctggctctgtcacccaggttggggtgcagtggcgcgatctcggctccctgcaagctccgcctcccgggttcaagtgattctcctgcctcagcctcccgagtagctgggactacaggcacccgcaaccctgcctggctaatttttttgcatttttagtagagacggggtttcagcgtgttagccagaatggtctygatctcctgacctcgtgatccacccacctaggcctcccgaagtgctgggattacaggcgtgagccaccgtgcccagcctagttcctgtcattcttaagcttcaaaccaccagaaggtttcccaattcacttgagcctggttaggtccctttctgctttctagcctcatctactgcaaccttcatccttgactgaacacctataccagcctgatttcaatttcaagaacatttctaagctctttcctgccttggagccattcatcctgttattttctctgtcagaagtggttctccccacccttcaacatggcgggctggcccttttaccgttccagaggtcttcccggatcactctatgctgttcctcactattgctgcccccagccagtggtttacctcctagcacttatccctgtttgtaatcatatattgtatcttatttttcatttctcctcaccactggaataagccctgtgaaatagcaacaatatttcccttgccttccactaaataagtctgttgccttgcagagtgcctggtataaatagtgttgttttttgtttgtgtgtttgttttgtttttctttgagacggagtctggctctgtcacccaggctggagtgcagtggcttgatctccgtttactgcaacctccrcctcccragttcaagagattctcctgctgggattacaggcgcatgccaccacgcacggctaattgttttttgtwttkttagtagagacagggtttcccatgttggccaggctagtctcgaactcctgatctcaggtgattcacccgcctcggcctcccaaagttctgggattacaggcgtgagtcactgcgcccgtccttaaaatagtatttttaaagagtttttgaattatatcttgtaactattatggaaayttccacaaataatccactacatttccagttagactttcaccacctttaggagcccaggaaattcactatcatttttcagaaacttgtaatatatcasctgtttactaaagtgtgagacaactgggttaagatatctccgatgctcattctaattcaaggatgagtcaccttaattttccatcttagtgttctatttctaattttccatcctagaattctattcctgattatagaattagaaaagtatgataatgggaaagttttgctatctctttggaagggtaatcctctttgtcttcctttacattccatgtaatgagaaagtatattggtattcatttctcaacctatcccaagtttaagaaactcagtagcatcagaggtcccattgaggccagagagctctaaagacataagattttgaaccaatgatattggctgcaaagtaatgagaacagttaaaataataataaaaatgatggcttacttgtactgagaatcatttacacaaaaagcttataattattctcattttacaaatgaatgacattaaatagtttccaaaggtcacacagcagtgagtggctaacatgtgattcaaagcatgtgttctctttgcctttctgtgccatgaagtcaagtcgagctaacgttaattaacattttaaaatttyttaatcctgaatgatttttatattgacgcttttgcctgttcatcatccttccatttcccctgcacctccatttttttagtattaatagtaatgactagaaacagatggaaaagactgtttccaaaaaaaaaaaacacctgagtatcactgttgatagtaattattctagtcttgtatagtatgattagtagtttccttgctttgcaagattagaataattatacctatatcaatggagtaattaatataagtatttttagttttaactgttctaaaatctttcaatagagatataggataatttcttattctacctaatcacccacatccaaaaataatttatgactatttaaaataaacgtaaagtggaagcatgaaagtgttgtgcttaaggtctctagaataaaatggagagctacttcatcaagaaagcctaggctagagatgtaattaaacacagtattttcattctgaacttccaactagtcaagacttaaaaggaaaacatgataaattgcttagctttgattatctttaacaaatgatggcttttacatagaaactgagtaatatgtcccatgcatttttaacataaggaacattgaatcaaaaaatttagtatcttctatagcggttttataaaagacgtagaatattgtccatgtgaccatttcttacatcgaccatatttatcgttatatttaattaagctatggcattgtccaggccttttgtagggagaatttacagccatgtagcctagaaattcagctcgttgtggactaacttgatataaaaattaagggacatgattaatctcaattgtattctttcttcccaggccttggaggaggaaacatgtttctttcagagtcccgaatagaagcactattactatatcacatgctaggctatcatattgattcttttctcacatgaattcatggagggggttcttatatttggtttatgctatttgggttgcccagcagaagatagaaaaaaatcaaatcactgattattaaaaacagttttgttggctgggcgtggtggctcatgcctgtaattccagtactttgagaggccaatgtgggcggatcacgaggttaggagtttgagaccagcctgaccaacatggtgaaaccctgtctctactgaaaatacaaaaattagttgggcatggtggcgcatgcctgtaatcycagctactcaggaggctgaggcaggagaatcacttgaacccgggaggcggagcttgcattgagcacagatcacaccactgcactccagcttgggcaacagagcgagactctgtctcaaaaagaaaaagaaacacaaaacaaaaacaaaaacaaaaaaccacttttgttattgatactattatggaaatgaaaataacattgttttctttctgaataactttcttaatattgaatgacaatttgaacaaacttaaacaatttttgctagtatgatttccccaatatcattaaataaaagaagggggacctatgtaaattctgatgatactacatatccccctctataattttaatataaaaatataaaggaaatattttaatgacatttagcttccagactaaaaattttggcatataaatggacataaaacaagaatgttctgctgtcagggatatggtggcatgttagaaagttgttgcatatgcaaagtgtagtgcatcttttaatatgatcaagttcagggaaggatatctttacatggaaactaaagtcacattaattttgcrgggtgattgtgaatagagaatatattacattgtcacattgtagatgyttagtaaaaaggtgactatagttatcattattgacacaaagggagtctgtaactaatgataagaggtgaacatgtcaaaagtaatcttttccctgatatttaagaaatagttgaaaactttgaataaatgaattttatatttacacttatttttgtcttttttagaatgtaccgaaaaacatatcatatggttggtttggcatatccagcagctgtcatcgtaacattaaaggtgacataatttcattattttcgtgtataaaatggtcattttaaaaaattctcttaaaaaggctatgagaaaatgagaataggtctttactgcagcctacatcttagaacgttaaaaaattcaacatatcctaacaatttaaaaaatgaactgtgttccaaatcatgactcactgtagattcaaatgactgatttacacaaactatatcaacatatatatatgcatgtttgtatgcacacacacgtgtgttttttttcttaattttatttatgtggatcttgaattcattttgaaatggcactagtacttgtcaaaatgtacatattttgttatgaatatattatggaagagttaaatgcatgttataaaaagatattttagtcaatgatgtttaaatgacaaaacatacagaaggaaattatttaggattgtaggtctgaaaaaatacaaaatgtaagataaaattaagaaagaaaaaacacttctctctcttgtctttggcttctcctgtggctacactattctaaggcccaattgcagcgctacatatgttagaaataatcagagttgaaactctgaagtgagtaaagttattggctcacatacttgcctcattgtgtgtgtgtgtgtgtgtgtgtgtgtgtgtgtggtgttcatgtgccttgtttctaaatgttatttctacagaggcattttgtaggctcatccttctaaacttgtttcgattgcctaatttaatttaacattgtctcctaaaacatctgcatattggtttttctacattaaccaagaatttaaaggatattggcagcagcagatcytgggttgatttatttctgacttattgtactcctttttaattttaaatttgtgtttttaaaaawtttaagcatcttctttgcaattgttttttcyctgctgcatattagattttaatctcattaatgttaaaagatagctcatttttctttggtgctttttttatatttatgtttctctgcctcctgtcagatcagaggggacactagattttgataggagcgcaaaccctattgtgaaatgtgcgtgtgagggttgtgcactgctgatgaggtggaacagtttcattccaaaaccatccaaccccaactcagtctgtagaaaaattttcttccacacaactagtccctggtgccaaaatattgaggaccattgcattaaaggatattaatcattcctcggttcttgagagattttgccttctctattatttccttaacaatgagcaaraaaattactcatttttattttatttattttaagaatytttgcttaaaaaccaactaacaaaatattttagtatgagagaatgtagtattttttctaaagtgttgtatagtaaaaaagatataaactaacaggttgagagagggaatatcaccaagtaaagaatgttttagttaaatarttcttattttctgagaagcctccttgtcctgtttgttctcaatctgatgacataaaagccaagcatctgcagtagtttagaaatgtaaatcatcagggtttataaaaaattctcaagaaataaagaattaaccttttactcagtgggaacccccaagttggaactgtaaatataaatagcaaccttctaagagtctgaactaactcttgtttgttagctttggagtttgataaaagatttattgacctcctttgagatttactgatgtaaaatgccttctaacagaacttataataacttttaatatataaagagataaagcaagcatttggggatcaaataagggccaaatgcaaggaatttaataacgacatacaagcaaaccaaaaactgtttcattggtgcttgtttccaagtgattaaaaataccatttgaagctcttactattattttttgaaggaagtatttttaaaagagactgaatactttttatcagatttttagtttggttctagcatattatagcacatagagttggcctccagaaaaatgtgttgaatgaaatttgaaacgtgcctactcaaatagaaaattaacgcatagctttatggttgcccacttactgttcaatactaaacctactgtatgtgtataaacagtaggccttcctgctagcagtttctgataaccattagaatggactacagtgcttctatagattttcaaagcaaaatcatgaggtggctggagtggtttatatccctgctcactctcctctctctctgttagggggtactttccagtttccctactggcctgcttgcttccctagggaactgcatgaaatgcgagtattactatcctcctcctcaatcaaaaggcccacttccttttcctcaccacttgtccctcaagcaaagtattagtaartcagccaaagatagagcaaataataatrgttgaaaagtagtgtaaaaaataccttttaataattaaagatagtgtatactctatctcgctatgatatttacatatttttctatctttctttctttctttttggagatggagtctcactctgtcacccaggctggagtgcagtagtgcgatcttggctcactgcaacctctgcctcctgggttcaagcgattctcctgcctcagcctcctgattagctgggattacaggcgtgcaccaccacacctggctaatttttgtatttttttgtagagatggggtttcaccatgttggtcaggctggcctcgaactcctgacctcgtgattggcccatttcagcctcccaaagtgctgggattacaggcatgagccaccacaccaggccgatatttacatcttaaaacaggacataaatatcaaaactttatgccaaactgcaaactcttatggtgaaatttcaagcaatgtagcaagtgagtaagaaagaaaaaccgggactattttttctgtatttcccaattgacatcatctatgtaactagcaattctaccctaaattgaggtccactctgagaaaatgatttatggcaggaagttggagagagattaaagataatggcagtattatggtattatcaaatgtattaaatcactttagtaactttgggattaaagaaaaggttttgatgctttataaagcattatggcctcaattttgtggacccatggatactaagtggtcctgtcctatgaaactctggtcaaagtgtagtttgacatgctaaattgaaagatgacctgctaaatgtacaatgccttatcttttgaataaattctcgtagaaacagtatgatattggcacctaaagtatttattcttttttctacaggatgttgataaatggtctttcgatgtatttgccctaaatgaagcaagtggagagcatagtctgaagtttatgatttatgaactgtttaccagatatgatcttatcaaccgtttcaaggtcagaaacatggaacaaaagtgaaatgctcttagmattggttatttgagtaagaatgaaaatgcagaacatttgagtaattaagcaattcattttaggatgttttagttagcaggtcacagaattaaggtgatgaggtctttatatgatagaaccattctccacaagtcactgacacatctatatatccacctagagatcatgaggccactatagcctcattccagcaagatgccaatatcccctgacttattcacaaaacactcacatagggtttggcagctatgtcttaaagaaatatgactactccagcattcctaaaatacagaatgaacctttattgccagcttttcttaaattagaatgaaggggtttctaattaacttcatttagaaccatccaagcaatagatttgatacagactactgagcagattgtagcttattactttcatcatttcctgtagaatcatcacatttttagagctataaagtactgagagwtaatctattttaacctctttgtattaagatagaaaaactagactccactaattgtaactggaaatatttacccttctacgaattagccttcctactctccggaagatactaaaatttcaagcctatagtacaagtaaggctattatttaatytgtcctagtcaaatacttgggggttacaatctttctttttgggaatgaaagttaacatgttcatgaagtggtttttcagaacaatcaacatttgacataaagaaactactgtccacatctgactcactaatatgttccatgacaaacagtgctcaggttgatttagtaccacttttttggtcaaaatataattataattattactttccacagattcctgtttcttgcctaatcacctttgcagaagctttagaagttggttacagcaagtacaaaaatccatatcacaatttgattcatgcagctgatgtcactcaaactgtgcattacataatgcttcatacaggtatcatggtaagacagtctttgtaactgaggtttgttagtttggaagcattccaaacttccattcckataagtttctattgtctctttaatgcccatagaggtattctaagtaataagtattataaagaataattgtttggatttttgaagcttaatgtgttataatacacatttttcaaaaaatactttaagtcagtgcaaaaaagataaccagaggcaaaaaaaaaaaaagtttcccaaaatttggactaccaaacatttttgtttgtaaattcctttattctgcaggagtcaaccaaaaaaagtgacctagagaaaaagtctttagaaagaaagttatagcactctttttctcattccttatgtgctcctaacctgaccttagtcgcttttgctctcttactcatattactaatcacagtcaaattctaatagggatttggggaaattattaatgtcaatttttgcaaaatttccttcctcttctttgcatttgatgaatcagtgaatgggtgactaaacgattcagtgatgcaaagcctgaaataacagtgagtgtatgacaggaactctgagagagttgggaatttttgtaatgtcttagaactcaggatgattcccagaaggtaaaaagtgaggaactgaccttcctgtgaaggtgcaaaactgagctgggttcaaaaaaggagcaggccatgtgagatttctaaatcctagcacctgctttaatcgtgaagtgcagtgagaaaatgycatttcagcctaggaggcaaccagaatttcatcatttaaaaaaaaattcctgcttgaatgcattttttttacacttgctacaagtgtaaagggagccaaataaaagtctactatatcagcttcacctggtgtgaaggtgacattgaagagatgtgggtgtcatattaattggtaaatagagaaaatcaaatccacaatgtggttttaccctcagaattataaggaagactgttatgggaccaaataagccgttccaacttctctgtaagactagggaatttggcccagcctcgcatgactcctagaaagttaaagttgttagcaaagatcacatagtcactttctgagacagctatgacttaccaaatataaatgtaactttctrattttattcatcctttagcaaaaatgtgtcactggcctctttactcatccattaatttaaccattacaaaaatagtctggtggtagacctttagtgttttccagaaccaagaaaatacctttgaactaaagagaataatgagaacttttaccatagatggagaaagggaagacaacatgagtttatgaatgtattgactattttgtctaaactaggttacactgtcagcttgacaatttttggaaagttattttaacaagttttctctacattaaaaagtagtgataggtgactattaaatttcatgtatatgaatgtgttggttctttgaaacaraaaagctttatagaaattttcattaggaaaaaatctttagttctttctcacccctcagatttgatataaagaagactgggccatctactttagtgttttagttgatgccctgctatttcagggtggccctatcagtgtgacatttatgaagcactctagtagcagcccagtactgtcaggagactaatgcatgttgtcatctgcaagatgttttaaggaccattcctgaaagggattgcaattaagccattgtccttctgtttgttaatgtcataagggacgccctcaagtctggatgtagacaatgcygaggagagttgatgctcatacacctgcttgtccccctatctctctccttttgtcacttgatacatttgtagtcctgtgccatggtgacagtgatgcacagtaactcagtccatttgctaaggagcaaatgttttataaagtgctgtcaagtcaccttcaaatgtctctttgaacatggaattatacaagggccttggccagaaaacatttgcattagagggctcctggcmctgcgttctctctaatactaagagtagaaggaggagagatgactgtaaatctagttcctttggaatttttagtgcactgactacacagaaacagtcttccacactttggaatgactgcatttttctctgatcagtctacagaacatttagtactatatctttctacaaattatgtggaaattctgttcttataaatggcttccaatatgatactgtttggaagaggaaagagagcatggactcaggaagcagtcagacacgagtttaaaaccatgccccaccactttctaattcactagctctacattgcttcccttgtcactaaaatgcagttaataataccagccaccttatagaatggcaatgaggagtaaataaaacatttgcaaggcacctaacctagtgcctaaaacataatagctattaacataccttaattaattaattgtaatatgccaattttctatactggtaacttacagcaaacttcttcagcctattcaaaggaatagagaaaaatagtgtcaaacctcataaattctagctaaaagaattgttaattatgtgtttttagatacacaaggaatcaagaaataaatgtgattttctgacttgaaattctccccaccctttatataatacacatacatactttgtataatacacatatttactttttctgtcccacaggcacacactcacacatcctgagtaattcagacatgaaaattacattttaagtcctaagtcaaaactctattagcttctacccattcatatactaaaattagctagaaatcctacttttgaaaccttagaagcatgtgttcagcatattgccttctttatgtaatgaatgctattgtgatccgttgaaaaaatagaaactttgaaatcagacagatttgggtttgcattcctgctctgccgctagatacgtatgtgacctttgacatgttgatccatttctctaggattcagctttgttttctgcaacataggcataaaaatatttacctataaccatcttataaagtggttttaagaattaaatgagatcagctaactaaagtgtccagttaatgttaattcccttcctttgtttctgttataatacatgttattaatagcagtcaatacctccttataagttgatgactgcccgctctagagtaagccaacctgagcatttctgcagacaaaatacaacctaaaattctgatgaaatacagtgttgcattgctcatgatttatcctcttaaccctttatttctgcctattaggaatcagaagaaccttggatttgtattgaccagtgctgtagttgggaagagtgacaggatttaacctcgttctctctggcttgccctcaggagtcatttataaaatttatgaatttaagcacctgttttctgagttagaattcyttctgataccagcacaaaatgaatcagcagctaaggaactaacaatcagtccagaattctacttttgctaatgcaaagtagatgtgtttttaaattaagtgtgaaagttcagtgtttcctctcttcctatattagtttgtagtggaacttaatgatatagtccatagtgcagaaataagtaagggggatttgtggagaaagtactatttatgggaggcagaaatgaaccaaagtaaaaacaggaaatgtatttataataaattttcacagctagcaagataataattgtaaatatttatgagtcaatcactaattaattccatctctgattttctaatttaatttctttttactattgacagtttatattctgtgttatcatagtagataatgaatgctgccttttttaaaaccacagctatatttataaatacataatttgaacccactcaaaaatttaaataagtgrtttttttccattttctttaataaaacaatgggtttctagggtacaaaactagtttaacttcaattgctattcatttcatggtgtttagttccatagtttcattgggaacattggaggctcaatcccaattcagacctctataaggtaactttcttccttttaatgactcacaattaaatgtgtctatgaacacagaacagctagttatattaacttcttttggctctgaaaattatttctgcttcactcatccagttgtgaggcatttgtacatgaattacaatcactaatgatatgttagctattatttcccagatttaatgcctttatcaattcatttaacatagtaagttcctagcaaaatgccatttattctttattttaccatatgacaagacatgataggtgcagtgcatacattaacccaaaacttctttttaaaccccataggggaaagatcactaatgccattttcaccacaactgtagctaagagggtaaataacttattttcctgaggattaacagagatttaaaaccaggactgattccatggtctcttaccactgttgcctctttttaatgcaaaactacaatttaacaaacaaatactaagttcctaatatgtgccgaatatcatgataggttatgtgaagggagctaagattaataagattatacctttggtacctatgagattcaacaattgtcactgccttcatttttgactcatggacctacaatggctttcttttaccttttacacaaaatttaaattcatcaattctcatcaaattagtccattaactctttccatactctccatattcttcagttacacttcacttgattctccaacacgattgtactattgacaattctattttaatacagaccctatagtatgattctacatttgctctttctatttgaaattcttctgtctccatccttgcacttaactatcagcctttttccagccttttcccaagatctactgccaccaattagcctttctctctaggctcttaaattgcatctttattctgcaaacttttatcaagtgtgcacatagtttacatgatctctttctgttgtttttcgcaaagtcttttattgttttaagtgtacagaataagaccactcagagtgagtgtcatagcattttggattccgcattcgtaccatcaagtgccatctatttatagtgttctctagtagaacttgctgtggtgatggaaatgttttgtgtctgtgctgttctgtatggtaaccacttgtcacatgtgaccaatgggcatatgtaatgtggctagtgtaactgggaaagtgaatttaattttacttaattttctttatttttaacttaaacagtcacatgtggttaccatattgggtagtacagtataagggttttacaaaatatgagtgatgaaaaaactattgaattatttctaaatgaactaawaatagcagggaacttttgttaaagcatctagttagtaactgaaagatgaatgtatgtaaagcggatagtcatggatttttacatgaaagcatttattctttcttttaacattattgaagttaattgcacagccatttttatgtgttatgaatagaaaaatttgtgaatttcagaaacttctaaatctctaaacatgaaaatgaagtgcactttctctagtaagaaagtgaatatttttaatttttagatgaaattttttttcatagtagattgttctacaacacttgggctaaaagacattttaataatgtatgagctgtatgataaaaatcaccaaactgtaattgatttcagaagaacccaaacatgtatggctgtaaattcaaaatccagttagggttcaccttttaaatcatagaaaactactcctttttcaattagcaaggacaattatattctgaattttgaacttatatgccatgaaacaatcattgacttcatgaagcatccatcttgcacaattagtggaggtaaaataggaaacaaattaaaagaaatgaaaaataattttatatgattacataaacagggtgcactgaaagtccttttcaaagaaaggaaagatgttatctacttcttgaatataatggattctttctgtaatttactagcactggctcactgaactggaaattttagcaatggtctttgctgctgccattcatgattatgagcatacagggacaacaaacaactttcacattcagacaaggtaagtytgaaaaagtattaactttcattagttaaaatttgaaatttatttttctgcatatcacttaagaggatttttaaaaaataataaagattctaataagaacaggtttaattaatttttagcaaaatttcttaagctgctaacaattgaatcaattaactactattttttaagaatcttgtgtatagtattttgtggcatatctagcaatttaaagaacatgaaaatgtttaagacaatctgtctctgcccagaacttacactgtgaactaccacacaagtcagacatctattcactgaggcaaatcttgcaacataatgcttaaggtactggtttggtgtcattatgtatttgaaagtaatacgagtgtacttctgaaaacaaaatccaaaaattaaatctcattttcaggccaacatgaagtattaaatttaaaataactagaaaatgaaattatttgatgatggttacaatggaagttatttaaatcaaataccagagtagaagtatgttagtctgttagggctgccataacaaaataccacagaatgggtggcttaaacaacatgaatttattttttcacaaytatggatgctaggagtacaggatcacagtgtcagctggtttggtttcctctgaggttgctcttcttgacttacagacaacaccctttttgctgtgtcttcacatggtcttttctctgagcacatgcaccccagtgtctcttcctcttcttatatggacaccagtcataacggacttgggccccactcttgttacttcattaactttaattacacccttaatagccctgtctccaaatacagacacactgagagttagggcttcaacacatgaattttagggcagacacaattcagtccataacagagagttaccctaacctctttttagttaggcacagaagtcagtatctgagaagcaggatttggtctaggccccatcaggatccaacttactttacatgtgtgggatcctgaaatttctcttttactagtcaggatgcttaataaggagatatatgttaagagctgatgtctctcttgaaccactgcataaatctccattcttgttgaggaaagattagatctgatttttttttctaattaatagactttatttcttagagcagttttagattcacagaaaaatcgaacaggaagtacagagttgcatgagttccatatgcttcctcctgctaccttaaagtttcgttgttattaacatcttacactggtgtgagatatttgttacaattgattaaccagtatcgatacattgttattaactaagttccattgtttatatgaaggttcactctttgcattatgggttctatgggttttgacaaatgtataatgtcatgtatctaccattgcagtatcacacacaatagtttcacggccctaaaagtctcctgtgcttcagctatcattcctctcttcctgcccctttacccctggcaaccactggtctctttaatgtctctttagttttgccttttccaaaatgtcatagagctgaaataatacagtatataattctttcagactgggttatttcatttagaagaatgtgtttaatgttcctccatgtcttttcatggttgacagcttatttcttatcactgaatactattccattacatggacataccatagtttgtttatctattcacctattaaagcaaatcttggttgtttccaaatttgggcacttatgaataatactgatataagcatacatgtgcaggctcttgtgtggtcagttcatttggttttttaatatatatatatttttaacaactgattttccagatgtgggagttattgtttgatgtggggaatatagaaacagtttattaaaatattagacactttagaacttaaaggaccctaagatgagtgagatccacastatagatcatctggtctgatatccgtcatctaaaaatagaaaatgaagacctcgagaggtagagtgacctgtctatatgcacttggtcaggtgatggcagtggcagaattgaggagtgagaaaagggacactcactgtcaatccagttcttatataagtctgctcccacrgccagagatggacacatgataattccaagctgttaaagcctgaaatggggtgggcttacacattgtagccccttgatggagacagaggaagagttgmaattcaaacagtgaagtgttggggagggcattctgtctgtccctggaatggaggaaaccccagggtcccagagattgatacagtttggagggaaaaggaaaacgtcagagtctggttatgtagcaggaatgttgtttttctacccatatttgcagagtatagggagatttttgcttttatttgtatttaatgtcaaaggaaaacaagactatgcagatcattttgcttaacaaaggctctctacatccactggatccacgatgtggaggattttaattaaagatcgctcatcactgagctgggctctgtacaggaaaacagttctaggggtttgagaagaaagcaagtgatttgttatcagtgaatgccagttgccctttcgactttgaaaagtaaaggccagtgggctggcctcttccagcagcagtgttagatcatcactctagctttctccttttactattcatctgcaagtggatgaagagtcctgatttacttatgcatttggctgtggagagggaggaggaggtggtggaggaaaggagggggatgacaaggaagaggaggacaagaaggggtagatgggggcagagaaggaaaaagaagaatcatgtttttttcaatttatattttaaaactctgtataaaaatgggaaaaaattgtctaacagggtcaactatttaatgaattaattctacatgaacttgaaaattccatgaaccaaaatgttgtaatgaccaaaatgcaacaatataacatgatttttaactctcaatattgccttcatccaagatgaaataaggtcatatgtcatttatatcactaattctattttattttatattattcattgttacttggattgagagtgttttttccaatctggaaactaatttactacataatacaaaatggctaaaatgcgatttggaacatagggcaaggctagatttgagttcaatgcagatattataatgcatgaaatccttgaaagtgtaaataaatggaaataatttcctctttgtgaaaagaaaatgccaggctacatgttaccatggatactggatgttgctcagagtctgttcttttcttagcagtcaaagaccatctcaaacattagaccatgctgcattctcagcatccttgttagctttatgagacaaaatcatgcatactttgctacaattaaatctggttcaaaaacacattttagcttgtttctgaaagagtagatggtgatgcttggagccatatcatgtaataaccctgacaaatctgctatggctagatttggtgccatatagtgcaaatgttactggaaaatcacagctttccccatgatctcagcaaacttctagaaatgcacacagtgttttgcttgggaaacatctcttcaattatctcttcaatgagaattatacatgtgctttgctagttcatatttctgtatattgaggtatgattattcattaaatcctttttaggccttaactaagattattaaatggaaatctattttagaaatatgtgctattaaagacatatattatttcatctttatgatagtgctagaaaaaaaaagaaagtaatagtgcctggtaggtcatttatcatatgttggatgaataataaagcttggtttatctggcagackatcagacacagatcttaaacaggctgcttgtataaaatgccagatttctttagtttttgttttctctgttgttattaaatagtttttattgtgtacatttatggtatataacatgataagatacagatagtaraatgattattatacagaagcaaattaatatatccatcatctcacatagctatccatgtgtggtggtggtggtgttgttttagtgggaacttttcattttttattttgtccttgtctactctatcataaatattcagtggcagggccagtgctaggttataactaggactttacccactgaaaagcctgaaacagtaagtctggagtgaggcagttttacacttgacagcattaagtatctaccaggagataggagagtgagagaagcctcggtgttgggtaagtggtagcaaacttgctacaagttttaacttgactttcttttttgctatatttgttgtcaatattcaacttgccaacttatatgaacgagttcaccattttaagagattgaacatagtgattttgcttccattccacacttgcataatgatctggcaacctaggaggatagaggaaggacaagcccaggttccattatacagatctgagaatgcttgaaatatttcaggcttaaagttagaataccaaattcatcaatgcaacttgaagtataccaatttatttcataataaaattatattaaaatacagacaggtgagaaataaaagccttcccttgatgtattcatcattttaaaaataaaatcttccttttaaatgggtgatgaagcatacattttaagttttctttaaaaacgacttttctatcttaattttaaagcaaaaggatctataacaataaaatttaatcacattataagagagtaaaaaactagaatcataaatagatcaaatgattttcatcatccccttcacctgctacccaaagtaattttagtttaaaggaacagggatggtatcaacactcttgaatgggtacaaaggggtttgttcattcactgactgaataagacgttaggtaattttattcactttgatatatctagagtattttgcaggtgtctggattacaaatcagaaggaaaagccataaacacatttaaactataataatgataattaaaacaacgctaagcaccacaactaagtggggtttatcccaggtatgcaagtctggctcaacattcataattcaactaatataatctaccacatcaacagggtatacaggaaaaaaatcacatgatcttatcaataaatgcagaaaaagcattttacaaaacattccaacccacgtttatgatataaactccaactaggaatagagaggaccttccttaacttgataaagaatatctatactagagtagaattgtggttatgagggactggggtggagataaaagttaggaagatgttggtcaaaggatacataatttcagttagatgggataaataagttcaagagatctattgtacaatgtgtcaactagagttaataacaatgcattgtattcttttttttcttgtttttttaattttttattatactttaagttttagggaacatgtgcacattgtgcaggttagttacatatgtatacatgtgccatgctggtgcactgcacccactaactcgtcatctagcattaggtatatctcccaatgctatccctcccccctcccccgaccccacaacagtccccagagtgtgatgttccccttcctgtgtccatgtgttctcattgttcaattcccacctatgagtgagaatatgcggtgtttggttttttgttcttgggatagtttactgagaatgatgttttccaatttcatccatgtccctacaaaggacatgaactcatcattttttatggctgcatagtattccatggtgtatatgtgccacattttcttaatccagtctatcattgttggacatttgggttggttccaagtctttgctattgtgaatagtgccgcaataaacatacgtttgcatgtgtctttatagcagcatgatttatagtcctttgggtatatacccagtaatgggatggctgggtcgaatggtatttccagttctagatccctgaggaatctccacactgaattccacaatggttgaactagtttacagtcccaccaacagtgtaaaagtgttcctatttctccacatcctctccagcacctgttgtttcctgactttttaatgatcgccattctaactggtatgagatggtatctcattgtggttttgatttgcatttctctgatggccagtgatgatgagcattttttcatgtgttttttggctgcataaatgtcttcttttgagaagtgtctgttcatgtcctttgcccactttttgatggggttgtttgtttttttcttgtaaatttgtttgagttcattgtagagtctggatattagccctttgtcagatgagtaggttgcgaaaattttctcccattttgtaggttgcctgttcactctgatggtagtttcttttgctgtgcagaagctctttagtttaattagatcccatttgtcaattttgtcttttgttgccattgcttttggtgttttagacatgaagtccttgcccatgcctatgtcctgaatggtaatgcctaggttttcttctagggtttttatggttttaggtctaacatttaagtctttaatccatcttgaattgatttttgtataaggtataaggaagggatccagtttcagctttctacatatggctagccagttttcccagcaccatttattaaatagggaatcctttccccattgcttgtttttctcaggtttgtcaaagatcagatagttgtagatatgcggcattatttctgagggctgtgttctgttccattgatctatatctctgttttggtaccagtaccatgctgttttggttactgtagccttgtagtatagtttgaagtcaggtagtgtgatgcctccagctttgttcttttggcttaggattgacttggcgatgcgggctcttttttggttccatatgaactttaaagtagttttttccaattctgtgaagaaagtcattggtagcttgatggggatggcattgaatctgtaaattaccttgggcagtatggccattttcatgatattgattcttcctacccatgagcatggaatgttcttccatttgtttgtatcctcttttatttccttgagcagtggtttgtagttctccttgaagaggtccttcacatcccttgtaagttggattcctaggtattttattctctttgaagcaattgtgaatgggagttcactcatgatttggctctctgtttgtctgttgttggtgtataagaatgcttgtgatttttgtacattgattttgtatcctgagactttgctgaagttgcttatcagcttaaggagattttgggctgagacaatggggttttctagatatacaatcatgtcgtctgcaaacagggacaatttgacttcctcttttcctaattgaataccctttatttccttctcctgcctaattgccctggccagaacttccaacactatgttgaataggagtggtgagagagggcatccctgtcttgtgccagttttcaaagggaatgcttccagtttttgcccattcagtatgatattggctgtgggtttgtcatagatagctcttactattttgaaatatgtcccatcaatacctaatttatggagagtttttagcatgaagggttgttgaattttgtcaaaggctttttctgcatctattgagataatcatgtggtttttgtctttggctctgtttatatgccggattacatttattgatttgcgtatattgaaccagccttgcatcccagggatgaagcccacttgatcatggtggataagctttttgatgtgctgctggattcggtttgccagtattttattgaggatttttgcatcaatgttcatcaaggatattggtctaaaattctctttttttgttgtgtctctgcctggctttggtatcagaatgatgctagcctcataaaatgagttagggaggattccctctttttctattgattggaatagtttcagaaggaatggtaccagttcctccttgtacctctggtagaattcggctgtgaatccatctggtcctggactctttttggttggtaagctattgattattgccacaatttcagatcctgttattggtctattcagagattcaacttcttcctggtttagtcttgggagagtgtatgtgtcgaggaatttatccatttcttctagattttctagtttatttgcgtagaggtgtttgtagtattctctgatggtagtttgtatttctttggaatcggtggtgatatcccctttatcattttttattgcgtctattagattcttctctctttttttctttattagtcttgctagcggtctgtcaattttgttgatcctttcaaaaaaccagctcctggattcattaattttttgaagggttttttatgtctctatttccttcagttctgctctgatcttagttatttcttgccttctgctagcttttgaatgtgtttgctcttgcttttctagttcttttaattgtgaggttagggtgtcaattttggatctttcctgctttctcttgtgggcatttagtgctataaatttccctctacacactgctttgaatgcgtcccagagattctggtatgttgtgtctttgttctcgttggtttcaaagaacatctttatttctgccttcatttcgttatgtacccagtagtcattcaggagcaggttgttcagtttccatgtagttgagcggttttgagtgagattcttaatcctgagttctagtttgattgcactgtggtctgagagatagtttgttatcatttctgttcttttacatttgctgaggagagctttacttcccagtatgtggtcaattttggaataggtgtggtgtggtgctgaaaaaaatgtatattctgttgatttggggtggagagttctgtagatgtctattaggtctgcttggtgcagagctgagttcaattcctgggtatccttgttgactttctgtctcgttgatctgtctaatgttgacagtggggtgttaaagtctcccattattaatgtgtgggagtctaagtctctttgtaggtcactcaggacttgctttatgaaactggatgctcctgtattgggtgcatatatatttaggatagttagctcttcttgttgaattgatccctttaccattatgtaatggccttctttgtctcttttgatctttgttggtttaaagtctgttttatcagagagtaggattgcaacccctgcctttttttgttttccattggcttggtagatcttcctccatccttttattttgagcctatgtgtgtctctgcatgtgagatgggtttcctgaatacctcacactgatgggtcttgactctttatccaatttgccagtctgtgtcttttmattggagcatttagtccatttacatttaaagttaatattgttatgtgtgaatttgatcctgtcattatgatgttggctggttattttgctcgttagttgatgcagtttcttcctagtctcgatggtctttacaatttggcatgattttgcagtggctggtactggttgttcctttccatgtttagtgcttccttcaggagctcttttagggcaggcctggtggtgacaaaatctctcagcatttgcttgtctgtaaagtattttatttctccttcgcttatgaagcttagtttggctggatatgaaattctgggttgaaaattcttttaagaatgttgaatattggcccccactctcttctggcttgtagggtttctgccgagagatccgctgttagtctgatgggcttccctttgagggtaacccgacctttctctctggctgcccttaacatttttttcttcatttcaactttggtgamtctgacaattatgtgtcttggagttgctcttctcgaggagtatctttgtggcgttctctgtatttcctgaatgtgaacgttggcctgccttgctagattggggaagttctcctggataatatcctgcagagtgttttccaacttggttccattctccccgtcactttcaggtacaccaatcagacgtagatttggtcttttcacatagtcccatatttcttggaggctttgctcgtttctttttattcttttttctctaaacttcccttctcgcttcatttcattcatttcatcttccatcgctgataccctttcttccagttgatcacatcggctcctgaggcttctgcattcttcacgtagttctcgagccttggttttcagctccatcagctcctttaagcacttctctgtattggttattctagttatacattcttctaaattttttttcaaagttttcaacttctttgcctttggtttgaatgtcctcccgtagctcagagtaatttgatcgtctgaagccttcttctctcagcttgtcaaagtcattctccatccagctttgttccgttgctggtgaggaactgcgttcctttggaggaggagaggcgctctgctttttagagtttccagtttttctgttctgttttttccccatctttgtggttttatctacttttggtctttgatgatggtgatgtacagatgggtttttggtgtggatgtcctttctgtttgttagtcttccttctaacagacaggaccctcagctgcaggtctgttggaataccctgccgtgtgaggtgtcagtctgcccctgctggggggtgcctcccagttaggctgctcgggggtcaggggtcagggacccacttgaggaggcagtctgcccgttctcagatctccagctgcatgctgggagaaccactgctctcttcaaagctgtcagacagggacatttaagtctgcagaggttactgctgtctttttgtttgtctgtgccctgcccccagaggtggggcctacagaggcaggcaggcctccttgagctgtggtgggctccacccagttcgagcttcccggctgctttgtttacctaatcaaggctgggcaatggcaggcgcccctcccctggcctccctgccgccttgcagtttgatctcagactgctgtgctagcaatcagcgagactctgtgggcataggaccctccgagccaggtgcgggatataatctcgtggtgcgccattttttaagcccgtcagaaaagcgcagtattcgggtgggagtgacccaattttccaggtgccgtccatcacccctttctttgactcggaaagggaactccctgaccccttgcgcttcccaagtgaggcaatgcctcgccctgcttcggcttgcgcacggtgcgcgcacccactgacctgtgcccactgtctggmactccctactgagatgaacccggtacctcagatggaaatgcagaaatcaccgtcttctgcgtcgctcacgctgggagctgtagaccggagctgttcctattctgccatcttggctcctccccaatgtattgtattctaaaagattgccaagagtagattttaagtgttctcacctcaaaaaatggtaaattgtgaagtaacacatatgttaattagcctgagttagccattccactatgtgtgtgtgtgtatatatatataaatgtatacatatatatatatagaaagatatatatgtttcaagacattatctcgtacgtaatatatataattttaattgtcaattaaaaagtaaataattcaaagaaaattatctatttataaaaaacctacaactaacatcatacttaatggtgaaaaagttgaagctttcccactaagattgtgaacaagggaagatgtcccctctcacaactaatttttgtatcatactggaagtatgcaatactaatgcaatacaactagaaaaaggaatttctctcttcccatgaatcttgggaagagagaaataaaattatctttgtttgcagatgatatgattgtccatgtagaaaatctggaagaattgaccaaaaaactcctggaactaagtgattatagcagggttgcaaaatacaaggttaatacacaaaactcgattgcttttctatatgccagcaataaacaaatgtaatttgaaattggaaacacaaatatcatttgcattagcaccactcaaaattaaatatttaggtataaatggaacaaaacatatacaagacctttataagaaaaactgtaaaactttgatgaaataagtaatacagggacagatatttcatgttcatagatagactcaaaattgtcaggatgtcagttcttcgcaacttcatctatagatataatccaatcccaatgaaaataccagcaagttattttatgattctgacaaagtgattctaaagtttgtatggagaggcaaaagactcataatagctaacacagttttaaaggagaagcacaaagttggaggactgacactacctaactttaagacttgctacaaaaccacagtaatcaagacagtgtagtattgataaaaggacagacaaatagatcaatgaaaaagagtagagagcccagtaatgaacctacaaaaaatatagtcaactgatctttgacaaaggagtaaaagcaatacagtgaagcaaaaataatcttttcaataaatggtgctaacacgactgaacatccacatgcaaaagcaaaaagcaaagaagaatctagacacaractgctatggtttgaatgtgtttcccagaattcatgtgttgcaaacataactcccaatgtgacagggttggaaggtattgaggtcaggagtgttctatcctgataaataaattaatgccattataaaatggggcttgccagagagggtttgctctcttgcactctctgcctttctactatgtgatgctttccaccatttgatgatacagcaagaaggccctcctgagatgatggtatgttgatctttgactttccagttaagaactgtgataaataaatttcttttttttttttgataaattacccagcctcaggtattctgtcacatcagcataaaacacactaagacacaggccttataccmtttacaaaattaactcaaaatggatcacagacctaaatttaaaacaaaaatctataaaattcctagaagattacatagaagaaaaatctagatgaccttagatttggtgatgactttttaaatataatatcaaaggcacaatatatgaaataataaattgataagttggatttcattaaaattaaaaatttatgctctaccaaagacactatcaagagrctaaaaagacaagccacagactggaagaaaatatttgcaaagaacatctgataaagcactgttatccaaaatatacaaagaatgcttaaaactcaacaataagaaaactaacaacctaatttaaaaatgaaccaaaaactttaccagtcactccagctaggaagatatacaaatggcaaataggcatatgaaaagatattccatatcatgtcatcagagaaatccaaattgaaacaatgagataccaaatagatcaataggcaatacacatctattaaaatggccaaaatccataacactaacaacaccaaaagctggtgagaatggagcagcaggaactctcatttattgctagtaggcatgaaaactggtatagccattttggaagacagtttaccaatttattacaaaattgaaactactcttaccatatgatccatgaattgcactccttggtatttactcaaaaaaattacaaacacattcacacaaaaacttatagcacagatacttatagcagctttattcataattgccaaaacttggaagccagcaagatgtccttcagtaggtgactgaataaataaactgtggtatatgcagacaagaaaacttgagtgctgcaaggaaattagctatcaatcggtgaaaagacatgaaggaaacatgaatgcatattactgagtgaaaggaaccaattgtattatcttcttctcacactgctataaaaagctggcagagaatggataacttataaagaaaagaggttcaattgactcatagttccagatgccatacagaaggcatggctggtgaggctgggaggcctcaggaaacttacagtcgtggcagaagggcgaaggggaagcaagcatattttcacatggtggcaagagagggagtgaagggggaagtgctgcacacttttcagcaaccagatcttatgagaactcactcattatcatgagaacagcaagcgggatactcacccccatgatctagtcacctcctaccaggtccctctaccagtactggagattacaattcaatatgagatttgggcgggggacacagatccaaaccatatcaaataatatgcttggctctgtgtcccccacccaaatctcatgttgaattgtaatcaacatttggctcataatatggtttggctctgtgtctctcatccaaatctcatgttgaattgtaatcccataattcccatgtgttgtgggagagacccagtgggagataattgaatcatgggggtggtttcccccatactgttctcgtgatagtgaataagtctcacgagatttgatggttggataaggggaaatctgtttcacttggttctcattctctctcttgcggccaccatgtgagacttgcctttcaccttccaccatgattgtgaggcctctccccagccatgtggaactgtaagtccaataaacctctttcttttgtaaattgcccagtcctgggtatgtctttatcagcagcttgaaaatggactaataatacattattccacttctggcccctcctgaatcacatgtccttctcatatttcaaaaaaccaatcatgccttcccaacagtccccaaaagtcttaactcactccagcattaactcaaaagtccaactccaaagcctcatgtgagacaaggcaagtcccttccacctatgagcttgtaaaatgaaaaacaagttagttacttccgagatataatggggttacaggcattgggtaaatgctcctattccgaaagggagaaattggcccaaacaaagggactgtaggccccatgcaagtctgaaccccagcagggcagttatttaatcttaaagmccccaaataatctttttgactccatgtctcatattcagggtatgctgatgcagggggtgtgctcctacggccttgggcactccacctctgttgctctgcagggtacagcccccatggctgctttcactggctggcgtccagtgcctgtggcttttccatgtgcacagtgcaagctgtcggtagatttaccattctggagtctgaaagacagtggctgatatggtttggctccrtgtccccaccaaatctcatctcagattgtaatccccatgttttgagggagggacctgttgggaggtaactggatcatagggacagcttctcccatgctgttctcataatagtgagggaattctcatgagatctgatggtttaaaagtggcagcatcccccctgcactctctctctcctgctgccatttaagatgtgccttgcttccccctttgccttccatcatgattgtaagtttcctgaggcccctgcccccaccagccatgcagaactgtaagtcaattaaacctctttcctttataaattacccagcctcaggtactatctttatgacattgtgaaaatggactaatacagtagccctcttctcacagccccactaggcagtgccccagtgaggactatggggactctaaccccacatttcccctccacactgccctactagaggttctccatgaggcctctgcccctgcagcagacttcttcctggatattcaggcatttccatacatcctccraaatctaggcaaaggctcccaagcctcaattactactgtctgcatacctacaggcctaataccatgtagaagccaccaaggcttggggctttcaccctctgaagcaatggcctgagctgtaccttgtcctctttcagccacgactggagctagagcagctgggatgcagggcacaatgtccaggatgcgtgcacagagcagtggaggccataggcctggcccatgaatccatttttccctgctaggccttcaggcttgtgataggaggggctgccatgaaggtctctgaaatgccctggagacatyttccccattgtctgggctattaacattaggtttctctttacgtatgcaaatttttgcagccttgaattcctccccagaaaatgggtttttcttttctacctcatggtcaggctgcaactattttaaacttttatgctctgcttctcttttaaatataagttccagtttcaggymatttctttctttatgcaaatgagcataggcttttasaaacagccaaaccacatcttgaacactttgctgcttagacattgctttcaccggataccctaaatcatctctctcaagttcaaaattccacagatttctagagcaggggcacaatgccatcagtctttttgctaaagcatagccagagtgacttttactcaaataagtactcaaatactcagagtcccaaataagttcctcgtctctacctaagacctccttatctctacctaagacgtcctcaacctagtcttcactgtctgtatcactatcagtattttggtcacagccattcaacaagtctgtatgaagttccagactttcccatatcttcctctttttctgagccctccaaactgtttcaacctctgcccattacccagttccaaagttgcttccacatttttaggtatctttatagcaataccccacgctcagtaccaattttctgtattagtccattctcatactgctataaagaactacctgagactcagtaacatatcaagaaaagaggtttgattaactcacagttccacaggccatccaggaggcatggctgggagtcctcaggaaacttacaatcatgatggtagggtgaagaggaagtaagcacatcttcacatggtggcaggagagagtgcgaagaagaaagtgctacaggcttttaaaccaccagatctcatgagaactaactcactatcacaagaacagcatgggggaagtctgcccccaagatccaatcacctcccaccaggtccctcccctaacactggagattacaattcaacataagatttgggtagggacacagagccaaaccatatcagcaacatactgtatgattccatctacataacattttgaagaaggcaaaactatggagacagtgaaaaaaatcagtggttgccagggttaggggagagaaagggatgaagaggtggagcacagagggatttggggcagagaaactactctgtatggtactataatagtagatacatgtcattattcacttgtctaaacgcatagaatgtacaacaccaagagtgaagcctaatgtaaactgtggacattggatgataatgatgtgtctatgtaggttcatcaattgtaacaaaaataccactcttgttggggatgttgacaatgggggaggttacgcatgtgtggtagaagaaagtacatgggaaattttgtaccaacttccattttgctgtgagcctaaaacttctctaatagagtttatataaaattttaaaatatcatacagtaaaaaataaaagaaactaagtacttccataattctcactgttcaattataggatgttttctggtcacatgacttgatacttgagtaagtcttattagacattcatgatgtctaaagaaatcctctgttgggcattttgtttttaattcttaggtcagatgttgccattttgtataatgatcgctctgtccttgagaatcaccacgtgagtgcagcttatcgacttatgcaagaagaagaaatgaatatcttgataaatttatccaaagatgactggaggtgagtttcagagaaaacctagaggaaatttaatttcaggaaaggaawaaattatgcgatttaaagtcaagaaaaaagatkaaagtygatgcattccccaaattacaaacttaattactgtcgactggatgactctgagaaggattagtacttagggactttgttcagagccagactgtgttaaagggacctgaagtatttccaggtcaactcaacatccatatgtctgaataagaccacacacaacacaacaaataattttatatacataattacacactctctggaatggagctctgctcaatttttatcaatatggggtgttacataaattcaaaattttggcattatattcattctttcatatattttttttaaaagatgtggagttaaggtttttttaaaaacaaaaagttaaacgtgggaaaaaaattccaatatactaaaatgacccaagtgcagaggaaatcttacatgtttctccaaagcatctgtttgcttgaaaaaaattacatggtatattgatacttgttgctatgtagggaaaaataacaagatgtacccccatccctcttataacctttcttctctttttcttgatcctttggtcattatcatctccttcaattgacaatagggttgctggacttcacaaataaaagtaaaggacaatcaattaaatatgaacttcattaatcatagaatcttcttagtatatgtccctaatattctatgggactctcttatagtaagaacagaaaaaggcctgtatttatctttaacaacaatcttattaaaagtcatttaattgactagaaaaggtttccaattgaatgtaaatatcaaaggtttttgctttcatttttgtttttttaaatcaaggtaaaaagaaatatccaaaaggaaagtgacaataaaaacattaaaaaacgtaaaagataaaaatcagagtttaaaataagcctaaatctcctgtgaacactttttcaaattttcaaagtttcctggttcttcaaggccatatctagagatatgggctcatttttgcaactctagaaaatgctgtcaggtagagggaaggtggaactttcttttggagacacagttcaggcctttcattttacagttgacccttgaacaatacaggggttggggcacccccattcaactgaaaacccatgtataccttttgacacttcaaaaacttaactactratagcccactctggataggaagccttaccaataatataaaagttgataaatacataatttgtatgttatttgtattacatacaatattactacaataaagtaactagagagaagaaaatgttattaagaaaatcataaagaatagaaaatatatttactgtttattaagtggaagtgggtcatcaaaaaggccttcatcctctgtctttatgtggagtgggctgaggaggagaatggaagaggagggattggttttgcttctcaggtgtgacagaggggaaaaaatatgtgtacgagtggtcccacacagttcaaacttatgttgttcaagggttaactgtattctgcaggaaatagtagcccaagaggatttacagtctagaaatgccaggatctaactgtgaaataattttaaagagaccactgttgggctatgtagcgattagatgggcaaaggtaggaacaagcagacaagttctgagatatttcctaaagcctaagagagattatttacatctagggtattagtttattttcttaatcagtgattaccattcccatagataatttttataatattaatttgttgttattcaaagaaataaacattttttcctcaaagttcactttgttgctatttcagtgtgattttatttcctattatattttgttatttaccattttaaatattttattctaatagtttattgctgtaattgtctaagtttctgtttggtaacttcagagtcattttaattgaatgtttttaaagaattgttttaacaaatagtgtacatattatatacattttagaatttaatagattcaacactttccaaaaatctataaaatacctatttgatgctatacgtttgataacattttactaagaattaaaatatggatatcttcttaaagactgatgttttctgtttacatatctgtttatttcttaaagtacttttagtaaaaataaatgcattaatttaaaagttttcacaagaaaattttataaattaagtaatgttttcttattttgcctaattattgacatattattagttggttattgataacatctagcatttactgatcatttatatgcaaagcacaatatacttattagattctattgatttccttaaactctaatctcattttccttagcaaacataaatgttcttattcagttgcttttcaaatatgggtcttgtcatattttcagcgaaaaaaatgtaattgagaataattttattaatagcttcctttcccttactacttgaataaaagtaagtaagcagagtattgattctcatggcttctatctaaaaattcaatagaaatgttgagtgctcatgattttcagcaagaaccatcaatatgtagttttgttttgtttttttttcagacggagtcttgctctgtagcccaggctggagtgcagtggtgcaatctcggctcactgcaagctctgtctcctgagttcatgacattctcctgcctcagcctcccgagtagctgggactacaggtgcccgccaccagggctggctaatttttttttttgtatttttagtagagacggggtttcaccgtgttagccaggatggtctcgatctcctgacctcgtgatccacccgcctcggcctcccaaagtgctgggattacaggcgtgagccaccatgcccagccaatatatagtttttttaaaaaggcaattaaatagattatatcatctttaagtaaagtatctttgtgcaagatcgtaattcaagtttccttcacacttttggttcagcttatcctactggccacaccacacaatgaaaatgaaatatgttttccagtacaagtgacttttttaacttatctgtatagagcaaacaaggaattgtggaacatgcaaggctttgctggggtgccttattttctactaagtgtgaggctttgtgacatggttattgtatttacagtgccttggttaaaatagtcagtaataccaatggctctctttatgttagggagggtcagatcccaaaagcttaaacagaaaatcactactcactttagcatcttggtttctctggggttcttatgatggaagcttggcacagaggagtggtccatgtgtctgctttggaagtgggacctcttgcgttgaatcttatctgagccatgtaccagctgtgtgactgggtgactcagtctcctttggggggaaatattaatgctccctcaggattgttaggaggattaaatgtctttgtatacatacaaagcaactagttgctaaagtattttattatcggtattatatgaagacatttaatccttacagttcagtgccttgctgaataaatactgaatgaatagcactggttttattaatagtagtmgttttgattaaaaatgcaaaatgaagaagaatcagatagggtcttgaaatctcatgctcttcttatctctgtctcttctctgagacatcaaaccttttagtttggttgacatgtggatttagaatagtctcaggccccactggactactttttttcctcaaagcattgaaatactatataatactgtatttggaatagtttttctttaaaatggctaaagttcctttcagattaaaaataataatatttaggaattatgactgcagaagagttgtgggagtgagaagggaaagcactagctcttcagggaggtgtgaacatcgttgccattctcgctgctggcaacttyttagatccatgacagttaaaaggtaaaataatatcaaacttgtgtgtggactttcacatttaaaaagtagcatcttttgtgttcatatccattaagaactataaaacatggtgagtgattatttattgaagtgttccacttcagaacaataaatggctgaatgaacctttctccttttggtgactctgcagggatcttcggaacctagtgattgaaatggttttatctacagacatgtcaggtcacttccagcaaattaaaaatataagaaacagtttgcagcagcctgaagggtaggttttgtgttttttttgttgttttttttttttttgtcatgttaaagttccaggggcttggcctcagaaaagactgtaattgtttcctttgttttgaataatataagcatgtccttggtttgacaggattgacagagccaaaaccatgtccctgattctccacgcagcagacatcagccacccagccaaatcctggaagctgcattatcggtggaccatggccctaatggaggagtttttcctgcaggtgcctctttcacactctgtgcaaatgtttttggaaatagtgactgtgcatattagcgtacaccttttctgtatggaatccagggcttgtgacttactattatcaactggccacctacacattcttgggggtttcagcaaaatttattagtctatcagaaaggtgtattaagtctatgtagtgtgatacatgttttaaagagattcaaattttggatctgagatgctactgtcaggaaagaaaaataaaagcagctaagaattgttatctgctgttaagacgtaagtgccacagcagagacagcaaatagctttcataatagaaagagtagataaggatatataacagttctgcataaatcttgttggccagaattttaatggaggccaagaaatattgctttagctgggtggacacatgcctaactgaaataggcaacaacaacaacaacaaaaatctaatgttacgtcagaaacaagcccggataaggattgtgactggcgttctctgccacaagtacacatcttttctttatacatgtccctgttttgcaacccccacaatccaagctggagtgctacaatacaaatgtgatgctaaccactcagagttagcatcaaattgcacaaattaagggctcagtcttccacaagattggctctacttcagatgccagctgcaaatggggctgtgggacaccagcacttctgaccagccagttacaagttcagtggttcccacaaccctctctaggtttgataacttgctagaatgactcacaaaacttcaaaagtgctatccttacaattacaattttattataaagaatacaatccaggcagagccaaatgaaaaggcccataaggaaaggtctgggagggtcttggatgcagagcttccttgctatttccagtggagttagcgagtaccaccatcctgccttgtcaatgttttcaccatccaggaagctctactgagctttcctgtccagagtatttatcaaggtttcattacataggcatggttgattaaaccattggacaygcgattgaactcagtctccagcctcacttccttcccagatatcccctggctggcttaaagttccaactttctaatcatgtggttggtttctggtgaccaggccctatgctgaaactatctaggggataggcccagagttgcctcattagcmtagagtctcctatcactcatgaaattccacaggtttttgaagctctgctaggaactgggaatgaatatcagataattttgttttattatatcacagtcccacttagagaagttcttttatttctgtattttcagattatttcatttctcagtattgttctttattttgaaagtttgttcattaattttatacctgttctgaagatataaacaccaaatatattactatgtttggatgactcacgtttctgtctcccattgttgatggacataatgtgtggtattttgaaagtttgttcattaattttatacctgttctgaagatataaacaccaaatatattactatgtttggatgactcacgtttctgtctcccattgttgatggacataatgtgtggtttcatttttatattgcaatttatattcctagagaaagttactgagtagcatcttactaaattcaaatattttggtcctaaaaatagtattgaaaaatattttaataatttrctttgtgctaaaaaaatacactaaatgtaaaaacctaccaaattctaaagrtcaactgcttattatggtcaattaaaaattataatgatatactcaatcaatcaaccagagatctttctgtatagccctgtgacattagagatgcaaaaacagaaaaataaagagatacaaagatttttcaggttaagaagaaatttttaaatatcttaagttgaatgattttgaaaacataatatttgaaaattgttggatgcaactgaagcagtgcttaggggaaattttatagcttcacatacttacattagaaaaaaaatgtgtaataaagtaagttatatctgtttcaccttaagaagctagaaattaagaaaattgaatcaaaataagttgatggaaggatataataaatataaaagccaaaaacagtgaaacagaacaaagacaaacaataacaaaagttaatgaagataacagttggctctccgaaaaagtaatgaaattacttgcaggatcaaaaagaggaaaaaactataaatgaaagagagaatatcattatagagcctgtattcatcaaaagggtgaggaatattatgcacaatttatgccaataaaattgaaaacttagatgaaattgtcaaaatttttgacagatataaattaccaaaacagacacaagaaaaaatcatgtagtctgaatattcatatatctgtttcaaaagttgaatttgtactttaactcttcttatgaagaaaactctaggcttagatgactttaattcttatttccgatttcaattctcaatattcaattcaattgagagatggagaattttctcaaacatttcaggaagaaataatgccagttttacacaaattcttttatgacatagaggaagaggaaaatttgacagcataattctcgacattacctgacaaagacttttcaagtaaagaaaattacacatccacatctgccataaaactgaaagagaaatttttttttaatttttaaaatttttagcaaatcaaatccagcaatttagtaagatagtgcatatcatatcataacttgagtcagtttaatattaaaaaattaaggtaattcaccatattaaaggaaataaaggaaaaaatatattaattatcaaccctatagatatgcaaaatgcatttgacaatattcgacagacattaattataaaaactgttagtaaactagaagtagaagacctttctcaacctgatcaaaggtctatagcgaatgtgatacttcacaatgaaatactgaacatttttattctaagatcattataggtactcttaccacttctattcaacattgcatttgaagttctagccagtgtaggaaggtaataaaaaacaaagtatagtttgaataaaaataaataaaactgttatttgcagaaacatgagcatctgcatagaaaacctcaagagatctacaaaaggctacttactagaattaataaatgagtttattagttgtagaatcaattgtgtttctgtatgcaagctgcaaacaatttgaaaataaaaattgaaaacagtatgctttataacagcataaaataataaaattttgggggaaacctttaattaaatgtatatgaaacctccacactgcaaaccacaaaacatttttgagagaaattttaagacctatataaatggagagatatgttaatgactgaaagactcaatatttctaagatgtcaattcttacaaatttttaataaatttagcataatctttatcagaaattgtaacaggcttatttgtagaagttgaaaggctgattctaaaatctgtatagaaatataagagtctaaggcagctaaaacaattttgaaaaagattaaagaagttggaggacttacacttcctccttatgtgagttagtataaagctacagtgatcaaggcactgtgttattggcatagggcatagggctaggcaaatagatcattaaaatagaggagtgatttcagaaacaggctcatatatataatgtcatgtgatctttacaaaggcaccaaaacaactacatggggaaaggaaagtctttccacaaaaggaaatggaacagcaattagtgaatgtatgggaagaaaaggaaacttgtcccctacctacaccttaacacaaaaactaattcaaaattaaggagtttaagacaaaacctaaaactataaagatcttagaggaaaacgcaagagaagatctctctaatctcgggggtaggtaaatatttcttagagaagacacataaagcattacccataaaagaaaaaaaaaatgaagtggaaaaaagcaaaactcaaaacttctgatcttccaaaggcactactaagaaaatgcaaaccatagactgagagaaaatatttgtactacaaatatctgtccaaggacttgtgtccaattgcatatagaactccaacaaatcaatagtaaaaagaaaatcaggccaatttgaatggatattttataaaaggaaatgtacaagtaggtaatacttacatacaagtatgttcattttctttacttatcaaagaattataaattaaaccataatgaaatatcatatagccccatgagaatgactaaaattaaaataattgaaaatataaggtgttaccaaaaatgaggaacaactggaggtatcatacatacatcacaggtgggaggataaattattacaatcactctggaaaactactggatatcatctactgaagttaatatgaagggatagttaatatcccttaggacccagcacttttacccctagataaatgagtatttatgcccaccaaatgtcttatataggagtagtcattatactactacttaaaaaaactcaatgctagaaacagtccaaatattcatcaaaaatagaaatggataaaaaataaatcatggtacagtcatacaatggaatatccagcaacaatgaaaaatagactaatgatacaaatgacaataaatctcaaaataatactataaaccaatttatatgaagttcaaaaattggcaaaattaatatatggtgatagaaatcagaacagtaggtgcctatatgggttaggattccttggacgaggttaaggcaactttctgggggtaatggaaatgctctatatcttaatcaagtattatacaagtgttcctgtttatacccttcagatttgcccataaatttccctttaattttttttaaaaagagtatatcataatgaaggtagctcatctctgacttaaagaagaccctaaaaaaattactgtgggaaaaaacaaaactaaaatcccagagactcctgaagattaccattagatctccaaataatatcacgatttgtattatccttttgttttactgatttcaaaacagacaaagaatacctgacaggatcatgagattagtaaattcaatgaaattgagttcagatctgttgaaagttcaccaatttctggatttttaaaagtaaacgattttcaaatccccttcagaaacatatgcagcaaaacagaaaaatgtggagctaaaggtcaaaataattaagtttatactgccaacaaatatgtctttcaagcaaaacaagtttttctttgtgaaacttaaactgaaatatgatattaattccaacaggtaaaatgttttcttgcattgaactaactaaataaatcccatattactctcacttattcttagtcatactgcataatgtacacctttggaggtaaataagcaatgaacctgaaactccttgctgtatgcatttctctgatttgacataagatattgaactgtgtctatgtatctatgcatatgtcctagaaattagcaggactgcagtggttcttgtatgttttatttttgttcatcctcacatagccatctgtaaaactgtcactttgtcagacccacagtactgataccattctgctctgcatttagccaaggtgactgggtttttcatctcrgacagtgaaaacagcacttttacaaagcaatttgcaaatatatgtcttcattcctttggaaggtactaagaagctaaatactgtgtcttaawttccactggctgtgctagagattttgaggtaaatcaaaagaggtctgtccagagctcatcatggtgctcagctacagtttaaatgtaaacatcttgtgtttcttgttaaagactgtattttatgtacattggtcaaacataagaagcctaataatgcaaattagagagataattggacttgacttcagaaaactcaagggtaggccctagcttctcattcttccaggagtgggagacatgagtcttccccttcctgtctctatacaccttcttaccttttcccatcctgcctacttcccaggatgattgtgaggagcaaagtgatagaacaaaagtaagagggcttcaaatgtgaggaattggtggtatttgttatcctgctagtctattttaagctttatactttccgaggcaaagtatcagtatactacaccattgcttatgaagtattttgttgtttgatagttacttaacgctgaatttctaaagatctgggcacaatttaaaagcacatttccaacacaatcatcaagtttaaaaagtaaccaattaagagaagtattttcctttttgatctgcagaatgtaatgctagacttgcaattccttctattggttttgaacaaaattagagcctggatagaaattcaaaaaatcagaaaagtagcaaaggaaagagctgatttttagaatttttcaagagcaacctttcaagaaaggttcgtgcgtgtgtgtgtgtgtgtgtgtgtgtgtgtgtgtgaatatttcagaaaaatgcagagaaattttgtgatgtgttaacttctaaatcattttcttattagtttgtctaccgaactcattttatttaacaaatggwctcagacactaagaattttttaaatgctgtatatttctggaagacaagctatttgtattattcttaaaaatcccatcaacgttatcccattctttagtgctactactttagtttcaccctctaaagccrtgagaaactagccagagatcagaattgtatccagaatttgcagtcttgagaaacgctgatttctgactcttgaataagctgctaatggtaaaaggcagtagagcgagttctcatttccaaggcattttcgcaacaagcctgtgatatttattaatacaattaatgtctcctcgagttttcrtgcagatcaacacacctactgacagtaatgggtagatttggaggatgctgctttattttaactatgactgataggagagagagatyaatatcagccaaaaaagtaatcattggtaaaagaagacaggtttttgctttttattctcctcttgaacacacatgtcaggttggcaagataagaagtcaatgcagttaatttttttacaaaaatagttacttccatcaaaatgtgtttgtattttaaactaaataacaataactacgtggatttttcccttcttcaactagctgttttgtgacacatgaaaaaaatctatatttgaacaaaatctgcatttattaatcattattaccttgttagccaagaagaaaaaaataattagaaatgcaagttatttggaaggaaaggtcaaaatgtttactttaccttgaattgtatacagtcaggcctctctatttttaaatgttgctagaagtagtataaagtgtgttatttcaaaataaatttcattgtccatagtaatacaaatgtacttagtccattctcagccaaggatctggcttttcaaaaaaatcataaacataacccctaaaattgcagaaatgaaaagaactgtagctatgagccaagataactttaaatgtaaaaaagtaaagcttttagtttcaagagccataaaagtactataaacaccgattacaccaggggttctaatattccataaaatatttataacattcacagaaatatagttatatcagaccaatattttactgaaagtgaatgtattagttgctgtaattattaaatgcttaaatgtttttcgtggcgttcttcgaatttagaagggcccatttgtagaagtaaagaagggtcattagagggcctaaattccttaaattttccaaataaggctagattagtgcatgctcctctcctctcccaatcaaattctctatagaaccagtggtctctcagatttcaccctcagccttagaatgtctccaaaggctgtccttaggaggagtgtctcctaagcccctgtccctgtggtcaggggattcctgcatatttgttatcgacgttgcttctttctccaaaattgaagtttcaatgaagagttttctcaagatttctatactttaccctgtcttatcttcttcattaaaacaaaacaaaacaaaactggccaggcgcggtggctcacgcctgtaataccaacactttgggaggctggagcagacggatcacaaggtcaggagttcgagaccaacctggccaatatggtgaaaccctgtctctactaaaaatacaaaaattagctgggcatggtggcaggtgcctgtagtcccatctactcsggaggctgaggcaggagaatcgcttgaacccaggaggcggaggttgcagtgagccgataccatgctactgcactccagcctgggcgacagagtgagactcctctcaagaaaaaaagaaaaacaaaaacaaagcaaaactatagaaatttttttggtttcagagaaatgcaaaaaacaaacaacaacaacaaaaaggtgctgttaggtcaatggatttcataccttattaatggctgtcagagcactttacaatggtaggaaggcatttaaaaacaattactagttctcttacagactttcagagaagaaacctgaaggatctccagggaattgtaaagacasgtataagctgtggggcctgagaacctcaggctgccttgagtttccatttckatgggactagtttttctacttactcctcatttttaaaagtgtattttggccccctgaaggcagcatcctcaaatgacagcgaaacctctaagaaaaatataaattcttctttcacaatgcttattgcgatgacctctgcttttaccttgatggaaaataaatattccttatcctgggacagaatgaggaaattataaaggtggccaaatctatactcagagattctaacattctctttatacaaagttctagttccttcatagtttacctacagggccccctactaatcttgcactcatggcctttattcaccctaaagagtaaataatactttgaaatatttataaataaattaaataattaatgtactttagcattcaatgtgctttgacagtgaaaatttaatattctaaattaattktgaggtacaggaagcaaatagaatataaaatctcttgctccatctgtaggaaggtcatccctgcatatatctgtcaaatgcctaagccctataggaaatatgttgccattcaacattctataaaatttagctcaagaaagtggctgggcacagtggctcacgccagtaatcctagcactctgggaggctgaggcagagggactacctgaggtcaggagttcgagaccaccttggccaacatggtgaaaccccatctctactaaaaatataaaaaattagctcagcatggtggcaggcgcctgaaatcccagctacttgggaggctaaggcaggagaattgcttgaacctgggaggcagaggttacagtgaaccaagattgcgccattgcactccagcctgggcaacaagagcgaaactgtctcaaaaaaaataaaaaaataaaaaaaaaaagaaagtaaatcatcataatgcctttctcaggccaaagttatcattttggggccaaagagcttgtaccacagagtataaaaatacatctattacatttgtgtccttaaataccagatagcagcatcttgacaaaaaaaaaaaaaaagttaaatatagcttagcagcatttaatagatacaatcttataatatttagggtggtgcaaaaataattgtggtttttgcaattttaattgcaaaagatacagctgactgtatcttctgattctaagactactgacaattttaattgcaaaaaccacaattacttttgcaccaacctaacaaatacacaaaagaataaaacgcagttgtatcagcatatgttaaataagcatctctaatatcaggttcccaaaagcctatcggtagctttatttctattttatttcatcaatagtaatattagtatttatattttaacataaatgattgatgacattattcttgcaccttatcctcaacatgttagaaaccaaatcaataatagtattcaaatctttcccccacccagatcatctggtttccattagtggcatcaacagactcctcctttccattcgcactggaagccaaggagtcatcctcaactcaccccaagtcatctctcatactgcagacaaactaatctttcaaaagtggaaatcctttcttgtcaattccttgctaggaaaaaagagggagaaaaagatgatccctctctattacatgctaaattaagcactacttcaatttcctgtgttttaaaactattcaatgtatgcattagacatcataaatacctttaatttgtacatattgcattcatgttgttgctattctaaattatggatttttttttcttttttttggggggatggagtcttgctctgtcacccaggctggagtgcagtggtgcaatctcggctcactgcaacctctacctcttgggttcaagtgattcccctgcctcagcctcctgagtagctgggactgcaggcacatgccaccacacctaggtaatttttgtatttatagtagagacggtgtttcaccatgttggccaggatggtctcaatctcctgacttcgtgatccatctgcctcagcttcccaaagtgctgggattacatgtgtgagccaccgtgcctgacctaaattatgtttcttattagctaaacttaatgactactaagtgtcaggcactgtctttatgcttcatataaataatcttagataacttcaggatagatactattacatctattatattttatccctaaaacaagtaaatcaagatcacaaaattaggtaacagataaggagaattcatttcagcaaaggctgtgctgtgtctgaagtaacagcaataacccctagacagcagcgattcagctgactgtatcttctgactctaagactagtggcattaataattcccttccatctgtcctttaagctgagtataaatcacaatttcaaatggaaatagtgttattattatccagaggaattaggggagttactggcagaggtcacagaaattcttattccttgttttcyctgagttatgacatagtgaaatgttcctgtttgtaactattttcctacttctttgatggccatatctagattttcctcaacaattctgattctagactttctgtctataactctcataatcaaaggcatggtttaggggaactgctctagaagatattctcaaacagttgtaaagctacatgttgacatgatgttgtaaagattagcatagaaagatgttaatggaaacagagtgaaaggaaaccgtggagtccttacgtattttatcctaagttatggacttaatgatgcaaggctggtgttgctcatgaaggtatacagccaataaattaggagaaaatagaacctaaaatgttctttcaaatggccaggaaattgaaatgaacaagaacaaggaagtatcctctcctctttctttcataagcacatcccctttaatgcaaaggaaagaaccaaagtttaataaaccttgtgatattagaggtttgaccagaacagcaacctttgttttagaagatgaaaatttaattacttctcatgaagtaaaamcccaatataaatggaattctttaacatatgtgctcaattaatctattttagatgagatcaaataataaaaaaattgatatttcaattttctctgagaagaaaacattaaaataagtttatgcacactgaatgtaagaatgttgaagaaattcctcattatatgttgtggaagatttaataaaacttggttaatggatagaaaggtgtttcacatcatatacttttaattttgaaaaacagttccgtcacaaaattttgatagtaaaggtctgttgatatacttggcataaataaattaacttggattgttaattaaatgtcagataacacataagatggctagttattttatggtgactttggaaaattccaaaagcaaatgtttgtttcttaaaagtcaagggattgtaatgccaaagcaaagtctccaggtactgaaaacattcctcatttttctccctgcaaaatgtccccaaatggagaccatccaagaaaaattatataaacttggaccatagcttttggttttataaataagaaaaaagtattgctaattaagaaatgaaagatgtggcttttctaggctttatatcttaggttgctcattattttagcttctccaacccaagtctatattaatgtgcttttctttctccagggagataaagaagctgaattagggcttccattttccccactttgtgatcggaagtcaaccatggtggcccagtcacaaataggtaattctgatgatttgtggtggtggaaagtgagtgtgtgcttgtcasttttcaaatgggtaaacgatgttgttcaaaggggtaacttgcatgaaaacctcactccatattcatgatatatttgatttttaaatggatctatgtggtgctgaataagacttattgaagcattttcacaaaatgaattcaataaagcaacattagtaaatgtaattgttatcrtggttgtaatccttttacaaaatataaaattttcttgtgtgggagaccattttatgttgttttgttgctgattattgttttctgtaatttaattctttagatatataggtcaactcaatgaaaatgttagtgcacttgttctatcactaagtttccatggtatgcttaatatagtagtgcacatttcatttggaaaaatattctgtcatgatgtgaatagattaaccaacaacaggaaatttgcaaaatgataatgctcccaaccacattcattcttatcatctgtatttgtgttggggacttcaagtccagtccattattaaaacatgtgttgcatggctcaaatacttgtaataattattccctaagccagcatttttgttactgaacaatatgatcaataaacacaaggatcacttcttagctgtgtagttatgctccagcaccacccatcacaaagcgttggggaaagctgcctgctctgaccttttccccttcccatccaagtttcaacagctgtttttctagagaccataacacaggtgcctatccttgcttagtaagtgtaaaygtggcaggctaaggacctgatgtggcaagctaagaatggaagtttctgaggcttgttgctgtaatgcaaattgctgccatgttagtagaggtgatgccccagttgacagtctacacatctcaggcatttaagaacatagaactggctgggtgcagtggcttatgcctgtaatcccagcactttgggaggccgaggcaggtrgatctcgggtcaggagatcaagaccatcttggctaacacggtgaaacccgtctctactaaaaaatacaaaaaattagccgggcgtggtggcatgcacctgtaatcccagctactcgggaggccgaggcatgagaatcacttgaacccaggaggcagaggttgcagtgagccgagattgcaccactgcactccagcctgggcaacagagtgagactccatctcaaaaaaaaaaaaaaaaaaaaaaaaagaacaaaaaaagaacatagaacttaaaatagtaccctaggtggtcaattaacactgatttaacttgaaggcatccattaaaactactgaagttttattaaattaaaaatgtgccttattatatactataagtaatccagttacttgaaatgtgaattacttttatccaagcatctgatggacaatctttaaatgtgcatatttacaggacattatcacttaaaaagcctmcctccagctattctcctatattcaggtggtagtccattgctctcagaagtgtttccaacaacaattcttgacttgaggcacccacagcagtcctgggatctgggatattgccatgtacacagaccttagaataggttgttgtctcctcctctgcctaaacatgggatggaaaatgctcccagaggacaatgcccttttctctgtgtgtcattttctatcttgatgagtactttaaatgtaaaagtcttcattcagtactgacatctcaaagtggtgggattaatgctgtctcccagagatgttacttttctcttcactgatttgacagaacacacacacatgctgtgaactaacactttacatccagagaataataaacaacaatttgaaatattaacacactggcagaaagctctgactgatatagtaagaaacaaaaagtaattgtcttcctgttacctgagaaaaaccttcaattatttaatttctttggagcttagatatgatttcttgttagtaaagaataaaatccaaaatgcacatgatgtgctttcaaaaaagataatgatccctggtgttgagagaggaaactatagtcactctcattggatctaaatgtattgttagcaatcgtatattatataaggctgaatagtaaatagaaaagccaatatacttgagttagcaagcttaaattgtgtcacttccatggcttcaagtattattttatagagcagttaaaccatctctaaagactgttattagattaaaacaatacaaagggtragcagaaccaatattttagttgattctygctatcccaggattgtcagaagctcttcattatttctgatttcagaattcaggaaattgtaacacttgaatttatctctctctcttctcattttggcttttgtaggtttcatcgatttcatagtagagccaacattttctcttctgacagactcaacagagaaaattgttattcctcttatagaggaagcctcaaaagccgaaacttcttcctatgtggcaagcaggtatgatattttcttttttgcattatttttcatctttgtggtgtttagtaacactttccttaatgattatatttctcacatctaggcagagaattctcacaagaattattagggagtattgccacctagtggctttatattatattgcatctgcctttgacaactgaagtttaatacacaaaatatgaaatactaagtaaggtgtgtactaaggagaatccagtgtggggasggagagaaaggagatgagcagctgccacgtgctcagaactgggactgagcatctactatcctgcttttctagtcggttttgtaaagtttttcaggttttccttgttcaccccatatcctgatggtgttttttggtttctttggttgttactgttagctcaaccaccattgtggggttacacattgctgatgcactaagacgatcaaatacaaaaggctccatgagtgatgggtcctattccccagactactcccttgcagcagtggacctgaagagtttcaagaacaacctggtggacatcattcagcagaacaaagagaggtggaaagagttagctgcacaaggtagtgttgtttatgaggccttactgccatctctctctgtcttcacttctcctctaagagtttggattacttcttctagatttcttcttctatagaatatgtaagcccttgatggtattgggaatttggctactctttgatcattcatgagaaagttggctcatttattagataaaaagaggttctggtttgtttgtgccacatgggctgcagatctgtgtgtcagtgggtgstggcaaactggatactgaaagatgagataatgaaatggtgacaaaactttgtggtaccatataaactcctgtgctttcgtagaggtgctttccagcctggattttacttggtaagtggcttttgtgttgcattaagtgtgttatcacttcatgtcagagacttgggtgtgttttttttctgtttcactaagttgcttttttgactcagaatttagacaggaattggggaaatcattagtaatcaaccaccacagcaatcgcatgggaaggtagctacagttatttctgacatattagctgcttcaaattaattagtccatttagtaggtttgtgagttagtattcaaacagttattatctttcgtgcaggaattagctttcatatccagatctggcccctgcctcttctcacactcattcccacagctctgtctcccttatacactacactccctgcacaatggcctcttggaagtttcttaaaatactccagggtctttgtagttattttttcagccagaaattttttccttgtgttttttgcagctttaatatactcaggaataaacttacttttcttaaaatggataatataagatcaaaatagagtgttaaatcatatttatagtcagaaagacacaatattgaaacgttttcaattatcccaaatgtcaaccataaatataacatgtttccagtgaaaattccaatacatttttcatggaatttaagaaattgatcctaaaatctatatggtattgcaaatacctaagaatactcaagacactcctgaaggataataaagygggagcacttgccatatatcaaaatttactcttatactgaagtaataaatttagtgtggctgtgatatagagataataagatgggccttgggaatagaccagagagccaaaaatagcacattaattcctgcagaacttgacagatggcagacacacacattcgtatatgcaatcttttgtatgttctcacatatttacccttatgatattcttcatttcttcttgtgtgtcagagctactatttggtatcatttctcttcacactggagtactttctcaagtattttcttataacacagttatactgacaaacaattagattttctttatctgggaatgtctgtatcttacttttatttatgaataattttacttgatttagaattgttgaatgatttttttttattttagcacttttaatgtgtaattctattgcctctggcttccatagtttctgatagtgttggccaaaaataaattgtattgttgcttccttgtatgtactgagtattatctttttctttctgttttctagactttattttgactttcagcaatttgatgatgatatatctaggtctttttttttttcagtattctacttagtgttcactagcttcttaaatccacaaattaataatttgcttcaaatttagaaagctttctgtcattttgttcaatatttttcttctgcctctttctctctgttctctccttctgaggattgtgttatgcataacttaggattctggaaattgtcctggatgctctggatctctgtcaatttctttaattgttctttctttctttctttctttctttctttctttctttctttctttcttctcttcctttccttccttcttttgttccttccttccttcttcattcatttttgattggctgctttctaatgatttatcttcaagtttactgtttctttctctgccacctcaatcctgctgttgatttcactgaattaactttttatctcagctacttttttcaattttattatttccatttggttcttttttataatgtctatttctctgttgatattttatattttcattcattgttagcatattttcctttaattcttcaagattattttctttaattttaaaaacatatttaaaaaacttgtcttgaattttttgaaatcaattttaaaactgactataaatggcctttctatggctctctaatttctagggtttttctgttaaatcctgctggtttaccctttaccccaacttggaccccaaccctaggctgacaaagcttggggctctcctcatctagtctaagtggattcaccattttatattcaagtaaccagaattatttgctgccttcccattccaagttgattctaccacatccaacaggaaagttggcttttgcttccattcccaggtcagagttggagaggaagatggaggagtgggagtaacttcaggcaagaaggtcacaggttcctgctgtttttacctgaatgtccaacaattttttaagaataaatgtttctcaaattattatgtccctttggttgatttccagagtcattgaatagttgtttttattaatgctgtccagttttacacttgctttttcatgaagagaaaaaactcgacttctttacatcactatagcaggaagtattcctcttcaccataggttttaagagaattaaatgagtttattaatataatttgcttagaagtgtctagagtactaagcgctatatgagttagctgttattactatattatttatgtttctgccatgtgttctagaaataagggttatagggctactatatagaaactaggggtgtccctaatgctgaattctaaatccagcaaaactattcagaaataaagaaaaataaagacattaccagattaagaaaatctaattactatggaaattggggataatttctatatagtaaactggtaaggaaagccttcactgaggaagaaataatttaaataaatacacaatggaggttagaaagagaatgatggagaggtctgggagggtgggtgktaacaaatttttaaaacggattggctaccacattatctaggaggccaagcttgcctgacatgccagaaacaacaagaagggcagtgaagcaggaagaaattggacaagtgggaataatgtaggcaatgtgatgagtggggaatgtggtgcctgacctttggttttggcccgagaaagacaggaaaccaaatgtagagttttgagaaaaaatgttgattgatctgaactgaggtttcaaaaggattactctgctacagaatggaaaatgtgcttttgtttgggtagtaaaaatagaaacaaggagatcagaaggaaggctgttgttcataacccaggagacacatgggagcttagaccaagtagtaatggttgagagggtctataatttctggatatgtaaagattgtggcagtatgtgtgagtagaaggagggtaagcaaaaagagattggattctggatatacagatattttgaaagctgaactgataggatttgttaccagattagatgtaggaaacaaagtgaagagaagaatcaaaaatgatgccaggctttttggttttcttacacattatttgtatataggtaaaattatataatcatttcatggaacaatttggcattctgtaggaaatttaaagatgcatgtgccatacttctcgacaattttgcttctgtatttttaccccagagagacttttgtgcatatgcatcaaagacatgtctaaaatattcacagcagcattgttcatgactgcaaaataaagtgtaaaaaacagtaaaattgatttatatactgtagtatgtacatattatggaacagtataaaactgttaaaatttaactaatcaccacaggaatgaaggacacagtgttgcacaaaataagcaaactgctgggctttagtaggcggttttcccytgacagtgtgaaggagactgagaggtttggactaagcaaaaytcaccacaacacagcaaagcggctgtgtccagactgcttctctagattcctcctcactgggcagggcatctctgcaggaaatccagcagctccagtcaggggcttacagacaggactctcaactccctgggacagagcacctgaagggagaggcagctgcagtcgcaggttcagcggatttaatctttcctgtctgctggctctgaagagagcagctgaccctaacaagggggactctcccagcagagtgcaccagttctgctaagggacagactgcctcctcaagcaggttcctgactttgcgcctcttgactgggagagacctcccaacagggatcaatagacacctcatacaggagagctgaagcttccagaggaaggagcagacagcaatctttgatgttctgcaaactccattggtgaaacctaggtgacagggtctggagtggacccccatcaaactgcagcagacctgcagaagatgggtctaactgttagaagaaaaagtaacaaacagaaagcaacaacaacaaaagcatcaacaaaaaagacctcctacaaaacctcatccaaaggtcatcagcttcaaagatcaaaggtagataaatccatgaagatgaggaagaaacagtgcaaaaacgctgaaaattccaaaagccagaatgcctcttctcctccaaatgattgtaacacttctccagcaaggacacaggactggacagagaatgagatrgattaattgacagaagtaggcttcagaaggtgggtaataacaaactctgctgagctaaaggagcatgttctaacccaatgcaaagaagctaagaacattgataaaaggttacaggagctgctaactagaataaccagtttagagaggaacataaatgacctgatggagatgaaaaacacagcacaagaacttcatgaagcatacacaagtatcaatagctgaataaatcaagcagaagaaaggatatcagaatttgaagaccatcttgctgaaataaggcatgcagacaagattagagaaaaaataatgaaaaggaatgaacaaaacctccgagaaatgtgggactatgtgaagatactgaagctacgattgattggagtacctgaaagagactgggagaatggaatcaagttggaaaacacacttcaggatattatccaggagaacttccccaacctagcaagacaggccaacattcaaattcaggaaatacatagaacaccactaagatactccatgagaagatcaacgccaggacacgtaattttcagattctccaaggttgaaacaaaggaaaaaatgtttaagggcagccagagaaaaaggtcaggtcacctacaaagggaagctcatcagactaacagcagatctctcagcagaaaccctacaagctagaagagagtgagggcaatatacaatattcaatattcaacattcttaaagataagaatttttcaacctaaaatttcatattattagaaataagtagaattttacttcctagattgggcactagacacacaaaagttcattttatcattatgattatgattatgtctaacatgtgctttatatatgtatctataattcatttatatacatgaaatattgcataaaaatgaaacaatgataagctattaaaatgcatctactaacatagtgatcaattttaaagtcactgagtatcagatattgccattttaattttccagtacctaccacttctagtcttatacgctgaagatgaaagtttctttattacaattgcattgagattaaaataagcaggtcatatgatgtttagagctttggaatattaattaagcatcagggctttgaagagaattccagatgtttgctcatcatcatattaacccttaagctctatttcacagatatcgcaaaaacatctccctagtcctagagcagggagagactgttgacctattatgcttcatttttattatctacttcaccctcttaaaaataaggttcattaaaataaagatgtttgtttccattgctgatgtatyccaagctctttgaacagagactggcacaaagtagaaattcaaatgattatctgcagtaggcagggaagaaagagagagacagagcgcaagagggaggacgagagaggagggggtagagaaaggaggagaagggaagaaggaaggagagaggtagaaaacctaccatctaggccccaaaatatgaaatatatgatcttgccatgcccttggaattctctctatgccttctctaatcatttatttccttctctcccacccatgagctaattattgttttgaattttgtgataatcattctttttttaagctgttatccctctttgtataattttaaacaatgtataatttagttttgtctgttttaaaacaatataaatggaactgtgccatatacattcctttgtgaattgctttccactcaacaagatgctttttaaaatttatccatgacaacacaaatgttgttctgtttcagcaggagttttctggatcttgcagaaaacatgagacagaaaaaaaaatccaaatactgtgcagatactttttaaatattagtgttttgtttaagtctgtacatatcatatccttaggccacaaatcaggtgcataaataatatacccttcattatttctctgtgaccaaacatagtttctagctatgtcctcatgctacctgtttgaagaaaatataagcttatcatttaagtgttttgastgaatcagagtaagcctggtcaatccagggtttctgacctctctttcctccttctttagatggcattgcagtccctggggactaatgttgtggtattaatggatttcagatgagcatcaggttcttgcttgacctctggcctctctctcatctttccagacagacagcccccattggtttttggctggtatcaccttctgactctgaccccttgctttcccacrgcaggccccyacatctttgcttgccacagcttgcttkctctcttttcttctccttctcattgtacttctcagggctgaaggacaggctggtcttcacatcagagtcactggggttgactgaatactgcaggcgctctctcaggctctcctgtcctgacattctacacagccacccctcctctattccttgcaygctgagaacacccaccttgttcagaatgctggataagggaacatgrcaaagatcttctctaacccctggatccctgactttttctcagaattctttcttgtttttccctcggaaataactcaaaatgcacagggatggccaaattcagagagcaggtccygtctcagactataactgtctaagtctcttgaatcttccaactcttttctcccttacaccttacttttggtttcatagggggtgaaaaatatgtcactggaagggtaaggagttaarcttttccctcctccaatttgaatggcaccttcatacccctttttgcttctcttagggaaaacctagatccatgtccagggagtgagaaacctggatctcctctggaagtatgggtgggaaggtagaacttgattaagtrttttccaaaaaccttttagccatgcatggatgtggcttttgaatttgaagacaaaggatagatgcctttgtttttggggtagcttagtaacaacccctgtgtctccttgtctaaataggcatgagcctgttataacaaacaagtagaaacaaaaccagatcagctaatgattcactgtatcagctcatcgagacacacaaaataagctttygtagttgtttcagaagagaaatgaaaaacaatatttgattactaaattaagtgtatttaaaatactattattcaaasaacatttatcaagtatgtttcctcactttacagaaaaagaaagattagaagcttatttttttctttgaatttaagtgatttaatgtgatggaactgaatcatgtgacacaaattaaatccataattttatatccattgaggtgtttcagtatggttagtaatgtcaaagacatatttcaggaggaaactgagcaacaaaaaagacatttttttattatggggaaatccaaatgaaagaacaaagctggaggcatcatgctacatgacttcaaactatactacaaggctacagtaaccaaaatagcatggtaccggtaccaaaacagatatatagaccaatggaacagaacagaggccccagaaataatgccacacatctacaaccatctgatctttgacaaccctcaccaaaacaagcaatagggaaaggattccctatttaataaatggtgttggagaatactacaaacacctctatgcaaataagctagaaaatctagaagaaatggataaattcctygacacatacactctcccaagactaaaccaggaagaagttgaatctctgaatagaccaataacaggatctgaaattgtggcaataatcaatagcttaccaaccaaaaagagtccaggaccagatggattcacagccgaattctaccagaggtacaaggagaaactggtgccattccttccgaaactattccaatcaatagaaaaagagggaatcctccataactcattttatgaggccagcatcattctgataccaaagccaggcagagacacaacaaaaaaagagaattttagaccaatatccttgatgaacattgatgcaaaaatcctcaataaaatactggcaaaacgaatccagcagcacatcaaaaagcgtatccaccatgatcaagtgggcttcatccctgggatgcaaggctggttcaatatacgcaaatcaataaatgtaatccagcatataaacagagccaaagacaaaaaccacatgattatctcaatagatgcagaaaaagcctttgacaaaattcaacaactcttcatgctaaaaactctcaataaattaggtattgatgggacgtatttcaaaataataagagctatctatgacaaacccacagccaatatcacactgaatgggcaaaaactggaagcattccctttgaaaactggcacaagacagggatgccctctctcaccactcctattcaacatagtgttggaagttctggccagggcaattaggcaggagaaggaaataaagggtattcaattaggaaaagaggaagtcaaattgtccctgtttgcagacgacatgattgtatatctagaaaaccccatggtcacagcccaaaatctccttaagctgataagcaacttcagcaaagtctcaggatacaaaatcaatgtacaaaaatcacaagcattcttatacaccaacaacagacaaacagagagccaaatcatgagtgaactcccattcacaattgcttcaaagagaataaaatacctaggaatccaacttacaagggatgtgaaggacctcttcaaagggaactacaaaccactgctcaaggaaataaaagaggatacaaacaaatggaagaacattccatgctcatgggtaggaaaaatcaatatcgtgaaaatggccatactgcccaaggtaatttacagattcaatgccatccccatcaagctaccaatgactttcttcacagaattggaaaaaactactttaaagttcctatggaaccaaaaaagagcccgcatcgccaagtcaatcctaagccaaaagaacaaagctggaggcatcacactacctgacttcaaactatactacaaggctacagtaaccaaaatagcatggtactggtaccaaaacagagatatagatcaatggaacagaacacagccctcagaaataacgccgcatatctacaactatctgatctttgacaaacctgagaaaaacaagcaatggggaaaggattccctatttaataaatggtgctgggaaaactggctagccatatgtagaaagctgaaactggatgccttccttacaccttatacaaaaatcaattcaagatggattaaagacttaaacgttagacctaaaaccataaaaaccctagaagaaaacctaggcattaccattcaggacataggcatgggcaaggacttcatgtctaaaacaccaaaagcaatggcaacaaaagacaaaattgacaaatgggatctaattaaactaaagagcttctgcacagcaaaagaaactaccatcagagtgaacaggcaacctacaaaatgggagaaaattttcgcaacctactcatctgacaaagggctaatatccagamtctacaatgaactcaaacaaatttacaagaaaaaaacaaacaaccccatcaaaaagtgggcaaaggacatgaacagacacttctcaaaagaagacatttatgcagccaaaaaacacatgaaaaaatgctcaccatcactggccatcagagaaatgcaaatcaaaaccacaatgagataccatctcacaccagttagaatggcaatcattaaaaagtcaggaaataacagatactggagaggatgtggagaaataggaatgcttttacactgttggtgggagggtaaattagttcaaccattgtggaagacagtggtatgtacccaaaggattataaatcattctactataaagatacatacacacgtatgtttattgcagcactgttcacaatagcaaagacttggaaccaacccaaatgctcatcaatgatagactggataaagaaaatgtggcatgtatacaccatggaatactatgcagccattaaaaaggatgagttcatgtccttggcagggacatggatgaagctggaaaccatcattctcagcaaactaacacaggaacagaaaaccaaatacarcatgttcttacttataagtgggacttgaataatgagaacacatggacacagggaagggaacatcatacaccagggcctgtcagagggtggggagctaggggaggaatagcattaggagaaatatctaatgtagatgacgggttgatgggtgcagcaaacccccacgacacgtgtgtacctctgtaacaaacctacacattctgcacatgtatcccagaacttaaagtataataaaaataaaataaaataaaataaataaaaaacaaatgagataacctgttctgttttatgcaacrtgtaggacaatcttaaggtgttaattgaattatttacactatttcttcccagaaaatacttaaaggattatacaagccagcttaaaaacttgaggactgtaacagagtatgaatagtgaatttgcccttctttttgttcagtgtgtaatgcagagaactttacaaataaatgcaagaaacagttgttttaccctcccctgattgactctcagagtttctcttgctccttctgaaaagtatcacagtttgaatcaagccaagtcttcctttcggtttcagagcatgtgaaaaagttgttattggaacaataaataagtaatctawctgagtaccacctttatattcctcctttgcttctctgtgaaaaacctaggtctgcgtccatggacgtcatcaggaaataaggctgaatggcttcaggctccattcccaagctctgattctgtggacacttagagaggctttttcagtgaatattttcaaatcrcctttaggactgctagataacaagctgctcagggagaatgaatagcagtgttagccttggcaccccaccccaactagttacagagcagtgactctcaaagacctacattcccctgtggtatttatctgtagttttatctcacgggtctctgtaagctttctgagcacatgtttttatttgccagcaatgcctattagtactcaccagtgggcctcactcttccatatctgttgcttagagaaagtaaaaattgattttttgaaagtaacgaaaacatgycaatgttactttgtattgaattactttaaaaagttgtatttataaggtatgtgttcttaaaatatttgctattcctttccactatctttttaattcaatcaaaacccttcatgtaaagcacagttcactttacattataacttctaagttcccaggactgaatcctaagcaattctgagagaatatacatgtacattttagatttcaaaagggacaaataatmagaggaaaacaaagtctttcagaaataaaaactagagcttgctatcattctctctctaattatggttcaaaatgtaattagaagtttaaatgagatcatgttagtaattttatatattttaaattattagtaaattaaattattatattatatatttcctttattgttcctatttccaatttaacctcttcagctttgtcttcagatcatgttctatatcatgttagcagtacaatagagcaggagtatgcatttgatagagtggaactttcagaaggtaagaatcatgaagttctaagaagtgatattcagagtcacttaaccctagaagagcttaaataattgtttgaatggtgtgtgcttgtgtgttatccattcattcactcattcctttattacaaaggtacaactcaaaagttttcaacctgggcagcctatcagcatcatctggactacttgatttttttaaagttcaacatgccctttctccagttcacagaggaaggtctaggtagaacacttttgtgcatttaaatcagtgcaacaggacatgtaggggaagagcaggaaataccagctcatggtcaggacaagccaagtacagatctaaatctgagccagcttcaccttggcaggctgaagtcaggaaatggcaatgggaaccttcgtagttatattcacctagggatgggatagttccattgtgtctatcccacatgatatctagatcttggttcatactgttgtaccctggaatgtttgctctctactcctgggaagatcagtggacaaggtcatgactggtcctggaacttaaggttactcttcacacaactcgaagtctagctacgcctatgttttcctatctctctacctttggttttgttcttccctcctcatagaatgctcttcctgggccttctcctccattctgcttattaaaatcctgtcttccaagattcaattaaaatgccatcttctccaagaagcctatcatttagttttataaacatagctgtctctttcatactgtagtgtagttagactgcttatcatattctaccttgcgttctcaaaataagaagtgagaaatgcatttgcaggaggcctacccaaattagagttctagtaagagtggaggtggagaggacatttaactacacawgccttatcgaggttctggcaytctgctttgggtgtgtgcatcatttctctatgcaatgagaaccactgtgtattatgagatatgattggagtatgttacaaatgtaaaaactatggattttgataaaaggttgagaaccactaattaagtcattacaaaaatatttacagagaccccctgtgtaccagtgcaaacaaatgcctatcatctttttttcttgagagcagaactcatgggctgttcagcatcagatttctggtgtctcctactcagggctaggtaagagctctgtcagtgttgattagaagaaagtttgctccactttgtggaagtctgatattaatggtgagtccacataaatgaaatagtattacccactattttgtagtatgtttttgtttgttagctaaatgaccttaaaaatctgataaatcacaaaagggcaaactaaatgtaagggttgttccccaaaagtttctcctcatgttttatgtctgcatttgctatgctttctgatacctcaaacctagtcacttgctctaattgtactttgcaatatgagtaatgcatgcaagagttcatgggagttttgtggcttctgaaaactctgggacaggaagtgtggaaatttgggaagtagaggtaataatggggaagggagtattgggttggatgttgcactgtcgaacagagatgatggggcagagtaagctaagtctttggatacaaggtatggaacagctctcagagacagttctctcattctggtgccgctctcatctagtagcagtttgatgtgtgaccagaatttgactgggttcatgtgtaatgctcacaccaaggacagactcaagactttgttatatacccccaataattagccccgctccaagtgctgaaaatacttccaaattattggaagctctgttgtcttaaccttacaccttgaagaacagaaatcccttcttttgttaccactcatctcctctctctccaaaacctataggcttccgttcctcttgattccaggtctctatctatctctcttctcattctgcttctaaaatactcccaatttttcagaacaatttagttctgatcaaaagattaatcaattcaacaaagcaaaagcctgatggtttccctaaaatgacgtctatagttcttcaaacaaaaatcacgtaccatacataatatgcaatactgcatattgtctgggttgatcatggtttgtctgttattttcaatttcattagaattcctataaaaacttaatttcctcattaccctcaggacatttttcaaaatsttaatcactgtacctatgacctacatttgtaattagaaaatatcacgagttactgagttagatggttgcttatatttttaacattttacggtttatttaaattatgtttttgctagaaaagctcatacattttctcagtaggaaacaaaaaaatgggaataggttttatatcactggttaaaaaatttaaaaacaaaactagaagtgtttttcactagaagtaagagaaacatttaaaattggtgggaaagtattaacattattaaaagatcaaatttgccttatgattaacatagtattttaatatattatcatagttcactaattaaactttatatattgtttatatttgaaacatcttaagatgcaatattttgtattatgtatggtaaataatctttgtaattatgttggtattaatgccaaatcaaatgtagattcatattctactaactacatctttatgttccaggaaatacactgagttttattacaatcactatcctgtttagtcagacaaataaccctacaatttagatattatcatatctaaatccaaggtgagaacttaggtctaaggcagcgaagtaagtctccagcatcacaggtgtatacatgtattacaaatgaatctaactttctcatttcttttcacggtttcatatagcacacagaaaattatatggtatagctatgcggtaggagtacagacagaaagaggaaagaatttcctgtgaaaccttaccccaaagactagcataattgcttcatcaaatctacttctgtttaatcttagcacaatttatccaatgagcttacaaatgtgctcataagattagttatatctcacagatatttttatttttaaatgttgaaagttatgaatttgggagtgaaattttttatcatttattcacccattgaccatctatacaaaaaaaattacagctaactctacaaggaaagaattttagtctgacaaaagtgaagctcactcagagaaactaaattatttgtctaacgtcacaaaactaatttttgaaaaggcggggcttttcatctattttgcccaaattcaaaaccagtaacctgtatcatgttctagaagttaattatgatgggttggtttagttaaattctctaaacttccctccagagcaaaaagtgtgctcaaaatctactgatggaaggattctgacagcagcataacttaaggatattttaagtaatattgtgtgtgtgaktgtgtgtgtgtgtgtgtgtgtatgaaagagaaagagagagagggagagtgtgtgtgtgtgtgtgcgtgtgtgtgtgtgtgtgtgtgtgtgtgtgtctcctgtccactgtatttgcatggacaacaaaagtaagaaggaaggtagagggagcatgcctgcattcccrtagagattattagctggcttggtgatgataaaatgttttcccaagaggggcaggactaggacaagaaaggatctgggttggtaggaagatgarttatcagatgatgtactctttactaaatttgaaagtaggggtggtctgtgaagctcatctgtcttggagtaactcttagatgtttactcatagttagatacagtcaggatattagaagttatttccagaagactccaccaatcctcttcatccaaggtatgcattttgtccctcccatttgtttaacaggaaccctagcagatggtccttattgagtattatagattttttttctttctgtgtgtcatatctcattgttgtgatcaataattttagccaatactgcctttactattattttagttgtatcactcagagcttatgacatttattgtgttgatatacaaaatccatgccacatttgtgtgcaaataaataaatatagctaattcttatggtataactttcagcatttatgtttcagtatgtttttttcaatgtacaatattctttccttaaaactgtatttccataactctactaaactggagatggaatcaatgtaaagtctggtaaatagtaaagagaagaaacctaatttcaatgagtttagaattgttctaaaacccatatgtagccaaaattgtccttctatagttcatcttaatgcttatgagtttaccaaatgcttatgagttaaagaaattatttatgatatttatattaaattataaaaaatagcattatattgcgcatgattataacttgtcagatatacacacacatacacttacacacacatgcacacaagacttaataatttccttgatgccatttcaggagattaaggaatgatagagcacaattccacctgaaaatcrtgttataacctatgtgacagcattagcccttccggtctgtaattcaatcagaaattttgttgttgttgttagcatatttcaacattttttaataagagaaagatattttctgtggataaaggaaaaggaaacatgattttattcttttttattttgaaaataaatcacagatagaatatcatttctttacataataaaattctacatccaaatatttgcattgcatactatttgttagcagacaatattaataggtttcaagataatctctcattagattctgagagtgtctgctctagttgataacaactagagttggactccataggaatccaggcaacaattcaagtagagtaaaaaataagttgagttataaagaaaaatgaatcatcttaagatcaccactgatgaatacaagaatcacaaaagttycaatagcaaaagcaaagtatattaaaaattaaggaaaatatgccaattatgtttctcttcataattttacgacagtaattttttacaatcatggctgattataaatgagaattactttttttcataacttctttacagcattttctctaaattattaaaataagtacgcttttttttttttcagaagcaagaaccagttcacagaagtgtgagtttattcatcagtaaacacctttaagtaaaacctygtgcatggtggcagctctaatttgaccaaaagacttggagattttgattatgcttgctggaaatctaccctgtcctgtgtgagacaggaaatctatttttgcagattgctcaataagcatcatgagccacataaataacagctgtaaactccttaattcaccgggctcaactgctaccgaacagattcatctagtggctacatcagcaccttgtgctttcagatatctgtttcaatggcattttgtggcatttgtctttaccgagtgccaataaattttctttgagcagctaattgctaattttgtcatttctacaataaagcttggtccacctgttttcaccttagattgtcccttttctaaacgtcaaaaakgtagtgcaaattaaaaaaaaaaattatcttttacattaattctaccatttgtcctaagggatagatatctttgaaaacatgtttrtattatagtgagagtgaatggcagggatgaaatgtatcatccaaaaacccaccaggttgtccaaatagtagaaaggtgagttttactggcaatatcagtttgcaaattgggaagagacagtctccagtgtgtaccaaagatgctctctcttcgaagagggaaagggtagttgggtttttatgcctcacagagtctattacacaatagaggcatacatatttagcaggtttggggaaaaagctatacatatttatgagcagagtcaagcacatgcctaatgggtaaacatatatgtaatgtacatcccatgttcattttgcggtggggatttagcattaaaatgaggaggaatttggctctttcttttaaagaaacataggatacaaagtttgtggacagtctctgtaagctggccaaaactggcttgagatctttagttacttctcagtaaagaatgtttgtaagattggccctcagtcttcttaaagttgtagtggtgtgggctataaatcagttaggaagggtctgcaatttttctgatatctcctattgttagggagtttaccaagaatgtggtttttcttatagccgtaggaatttaggaagtttccatgacagtcaagctctcaacactcaacctggaagtaacttttgtttcattaaccttagggttcatcttagttaataagtgggtatttattttggtctctcagaacatgaacggtttactgtactgtttttgttggatttgaaattgacttgttttctacataattcagtttaaggttagctaagttatttctttttggaaaaagtctggtttttaagagctgctttcctacatcatcttttactgttatcagtttacttaatagttaactctgctagactagtagaagcactccaataattaattagctaagaatggctgatgtccagtattgaataatgtattttcacaaataagtatatttatttcatctatctcaccttgccttcacacaggaggtggaaaacttggctataaaatatcatcagattagtcaaggttctccagagggacagaaacaataagaaatacatgtgaagtgaaatttattagggagaattgcctcatgcagtcataaaggcaaagtcccatgatgggccatctgcaagctggagagccagaaaagctggtggcttggctcagtccaaatgcaaaagccgagaaaccaggaaagttaacagtggagccccagcctgaggccaaaggccttagaccacccccttcccgggaggctgttggtacaagtctcagggtccaaaggttgagaacctggagctgaatgtccaagggaaggaggataaacagccccttctgtgatggaagtttcctactcagaaagggaaasagagaaagccagagcaagctgagtgtctccctttttctacctgctttgtcccagctgctcccccagctgattggatggtgcccgcccatattcagggtaggtctttttctctctcagcccactgactcatgggttaatcttctctggaaacagtcacctaggcacaccccaaaacaatgcttcaccagccatctaggcatccctcaatccagtcaagttggtacctaaaattacccatcacaagtctaccccttgccagcttggcacccattatgcacctctttaaaccacacctaatctccagatgaagactataaaaaggtcataattctgtccaacatggtgaaactatcctgtttacaagccaacrtgtactaatcccatcctcagaagaaaggataaagttcatgagtgtggtttactcttctgatctcctgcaactcaaatctgatataaaattaacagtattcaaatgctgatattaagtcaataaatcttatgttacatgataaaggaaaaagagaaaacaaagatacttgcttaagacatgttaatatacatacaaatgtattcttaacaaaataggaaatacttataaaaattacaatcctcatttctgtatctggccacatggctgtatatggtatttatacatgtcttctactacccattctgtattctgtattgccttcagtaagcacctcagctggtcatggttctttgcctggcaaggtgacccaaaccttcattcctgaagagtctgggcaattcatagtcagcctrtattgagtggttgtagtttcccattgaccttcatcacaggacagggtaatactaatagttgctctaaggaaccttctgtattccagaaatactattctttatctccattgtggaacagtaggccaatcaatcgcccttagtagcctagatgaatcaccctagccaacaccctaactccctttttagcctgttgactcaagaatcatgaggaacccaaagcagccgggtcacagttttaattcccagttcagttgaatcatttttgtgtctcctagtagaagcatgcctccctctgaaacaaagttcactgcagaactaggccagaagaacataatgttgcagaaacagtgagaaaaaattttgctagtgggtcactagaggtgatgrtaagtagttccacttccatttctacctattgattcctggacctatgactcctggctatgggagaaacagtaccatatattggatgctgattcagaacatatacaaccttctggagaaatctatctcagccctgtaaaatattgtcacctagctggtactgtagaagccagcttcttcaggagaatgggaaacatgctaagaccagtgaattctatgagcatgagctgattgctgcactttttccctgtgaagtgaattcctgggtcagaaacaatgctgtgtggaataggatggcagtgaataagtcattacataagtytacagatggtagttttggcaatagcattgtatgcagggaagacaaatccatatccatactaagtgtctatgccagtaaggacaaaatgctgccccttctgtgatggaagtagtctaatggaatcaatctgccctggggaatggtgccatattagggctcactattggtctgtgagtgctcagtctatggcgaggcagtagccagatcactcttggtgagtggaagcccatgttgctgagcccatgaatcacctctatccctaccaccatggtcactttgttcatgagttcactgggcaatgacaatggtagctgaggaggaggctgactggtatccacagaatgggtcatcttattcacttgattattaacaccctcctctgctgaggtcaccttttggtgagtattcatatggaacacaaatatttttatattttttgcccactcagagaggtctatacacataactcttccccaaatttctgtgttaccaatattccaattatgttccttccaagtccttgaccatccagccaaaccattggaccatgtattcttgtcctctgtcaactgattgtagggaactccccatgaaggcatagtacaaactgggagagaggaggcagtgtagaaggagtgaggactatgggcatttgggcttcttcatgtaacttacttgtgccttcaggacctgcttcagcctgatcgtgtgtataccactaccatgtgacgatagaatactgctgtgtctccccaactttatggcttaatgggccaaataacacccagttaatggtaggtagttcaggtcacatggtaatttgctggcccaaggccaagcattcagcttttactaaggcctagtagcaggtcaagagctacctcgcaaaaggagagtagttatctgcagatgatgccaggcctcattccagaatcctaaagacctctattgtgattcacctgtagggccctgccaaagactccaaacagcatacctatctgccactgatacagcaaggaccattggagctcttgggtcacatggcccaagtggcagagcagcttgcatagcagcctggacttgttgcagtcttttcctgttctgtgccccactcataactagcagttttttgtgtcacccagtaaatgggctaggktaacacacccaaatatgtcgcctttataatccaaataggtccactaggaattgtgcttctttctcagttataggaggggccagatgcaacaactctttactttagaagggttatctccacaggccctgcaccactggacccttagaaatttcactgaaatggaaggcccctgaagtttagttggatttatttcctgccccctgacaatgcacatgtcttgccaataaatccacagtggttgttacttcttgctcactaggtccaattaacataatatcatcaatgaagtgaacagggtgatagcttgwggaagggaaaagcaatcaggatccctgcaaaatagattatgacatagggctgaagggttggtatacccctgaggtaggagggcaaaggtatattgctggccttgccagtgaatcaaattgcttctggtgggccttatggacaggtatggagaaaaagcatttaccagaacaatagctgcataacaggcaccagatgtgttaatgtgttcaagaatgaaactacattgggtgtagcagttgcaattagagtcacgacttgggtaagcttacaataagccattgccattctccaggatccatctgtcttctgtacaagccaaataggagagttgaatggggacatggtgaaaatcaccacctctgcatctgtcaagtccttgatggttgcactagtctctgcaaacccttcaagaatgctaccttgttttctatttactattgtcttaggtacaggcagttctaatagcttccatttggcctttcctatcataataatcttcacccactagttagggaaccaatgtggggattctgtctgctgctaagtctgtctatttcaataatgcattttgaactggggaaataactaccttatgggttcggggaccactggacctgagctaaagctccatgaatcacctgactcccctaacctctactataactggagggccacagtgatgttttcagtctcttgggatcaatgtcagttcagagccagtggccagtcatccctgaaaagcctgattattttcctttccctgatacaaggccagaggtccctttggggaagtataagagaaagattaacagtataaattttatgyagtgcaccagagtctttcctcaacaggacctggtctccccttcacttaaagggctctgggtctgtaaactggctcaagtctagaaattgattgaggggcagtgattccctgttgtcaagatttgagttagacttttcttcacttgacccagaaattttgtgcttctacagttcaagtaagagcatagtaagcttcccatctattttacttctaggaacatcatgattaattagccagtgctggaggtctacacaagtcagattattctgattgttgctttgcctctgctgttaattccagtaactacgcccaccttgcctttgacatttgagtgccatcgcttggctcctgccacccagggatccaattattcccattgcatttgttttctaattgagtgattgtagttcccactataagttctggaatgcagagaagagcaatcacagagatctttaaggatgctggtgctcccctcacaaatttatttcttaaaatattagtgaaaggtgtatcttctggaccctcccagtgtgggggagtaggttttatgtgacaagtccactgtatcattccaatttccttaagccttttaattccctcctmtaaatgaaaccaaggtagatcaggcatccccagctcactcctggggtggtctattttttgatccatgtttcagccagtcagccaaataaacttatagtgcctkttttcactccttgagcttcaatattaaatgcagaatatatgcttagtgggctcatatcaataaatttgaccttattctttgtttcttccaccataatcccacatccttaatatccattcccacgcatgtttcttggatttctgctggtatcagttagaacactcaagtagttcttttggagtatagcgcacctccttgtgggtcacactctgaacctcccctctgggatttcagtctagttacaggtttagaagcaaagaggggtggtaggggtgggtctcaaggagaatcagcattgtcttgcccggcaactgctgcaggggagaccattactcttttttctgacaatgcagttaatcccagagaggggtggaaaagagataccattgtgggtgggggtgccactgcctctggaggtggagaggacagtcaccttggcaaaaaatactcttcagaatttacgagctcaatgccccccatcaggatcatcccacacatctccatccccatttagataattccattttttttttccccaaccaacrtcctcactttaacactagataccagtaaaggctgagagttcacctttctttgtaactcagccgatggatgctgaaggcttgtgtttgattttcagcagtttaagtcccatggctaaagaagaggagattctccttctccttcaggacacacttagaaayttttagggtatgtatatgcatctggagctgggagttggaatccctgagctcatctttttctttcctcactttgtccagtgatattaagagcacccaactaacttcattatcatttcttggtttcccaccagagttggaaggtatgcatatagtcactgaactccttacctcctgaaagtggtgaattagaagcatcaagtgcctttattttgtgtatctctataaacagttcacgccaaagactatttaggtttaatcagattataaagtcagttccagaaatcccaaaaccaattaaggaaattccttttaagaatactgttcctctagaaccattcctggcatcagtgtctgtattagggttctccagggggacagaaccaatagaatatacatgaaagggaatttattggggaaaattggctcacactgtcacaaaggcaaagtctcaccacgataggccrtctgcaagatgaagaagcagtttgtagcgtggctttgagagaagccggtagtgtgaccatctcagtctgaaagcctcaaaaccaaggaggccaagaatgcagccccagtctgaggctaacggccttagagtgccccaggaggtggctactgcatctcagagtttaagggtcaaagaacctggagtctggtgtccaagggcaaaggataaaaaggtgtctactcaggaagagagagacagagaggccaaaagaaaaagctgagcaagacgaatgtctcccttttcctgcmtgcattgctttacctacatccctaactgactggatggtgcctgcccacattgagggtggcccagttcactaactcatgggtcaatctcttctggacataccctcacagccatacccaaaatcagtacctcaccagccctcaatccagtcaaattgacacctaaaattaatcatcacactaagaaaagccaaaaacataaaaggcagtacattacacccagggagggagcataatatacagttaggatccaggactctagaactagactatctttttcaattctggttccttacttactagttatgtaatcttggacaattgatttaatcttttttgtgtttcagtttgctcatttataaagtgaggatcacaaaaatagtttctgtctcaagagctgttaggaggattaaatgagtcaatgtatataaagtgtttagaacttggcattttctacaataattcttttttttaatttgagacagggtttctctgtgtcacccagcctgaagtgcaatggcataatcatagctcactgcagcctcaaactcctgggctcaagaaatcctcctgcctcagtctcctgaatagctaggactacagacacacactaccatgcctggctaaattttcacttttgtagagatgtggtctcactatgttccacaggctggtcttgaactcctggactcaagtgatcctctctcctcagcctcccaaagtgcaagagccaatgcactcggcctacattaattcttattctcctcagctcacatatgttccttgagactgaatggatatttcatagaaagcttccttaaagaagtgtgctatggaaaagtattacttgcttaagatgattttgatatatataagattatgcttaactcatgacaaaacatgcaatggcgctgtccatcaatcagtcgagtgaactgctgtrtgatgaattatcttgataggtgatttctatcacctttccattcttaattaacctatcaagatagtctataaagtttatccccaaatatctcccaaatccatccagttttctgatgagtaaatcaagcaatggaattagcttgttctgaatggttactacaactgctcactctatatagttataaatggaccatctttatctaaatactttctgttaaggattctgccacttcatatacctgtcacagaaccctttagagggaaagaaggattctaaaaaagaaggttctgtaaacctaaattttctcaaaaagaggacactttagcttatccagtaaacttggtttatgacaattcaattctttcctgaagggatttttaccattttaatttttatctcttaaaatatgcctagatttagactgtatacagcccaaactcttcagcttccctaattttacttcttctaggactgctatttatactttggctaatataactttctcttgttaatgataggaatctaggaaattcccagtaattatgcaaaaaatgtataactaaagtatttgatctctgtcatatgtatttaatttctgtattttgttctttctccaaagaaaaaaattatgcaaagtgaaaaggaaaggaaaagtgatctaaaagatctcttaaggtaggattcagtatgtcttcatgggaagatggtgaaaacctacaagaatctgatgytcaaagtgtattacagtgtcatcttcaaaacataaccaaggcccattctttagcaagacaactgggtagtgagtggtcttggaagccatgcrctaattttgattcgtgtcaggaaatttttgtagagttagcaatagaagttcagtcaagttaatatcaactcaaagatattaactcatcactctggacatgggattcattcagaaggctcctgtgttcccacattacccttccatcttagatgagacttctataaaatatgaaggcatgtctgctgattcagagaaacccaaatacatcagtaataaacaaaaacttcatcaaataaaggcagtacaacaagagtaagagaatagttttgatgtaatttgatgtagagataacaaaacacccacaacttatattaaataagtttgcctccatcaggacagttaacctgttacatgagtctttagagattagagattctactgcttctcataatcctgactgaaagttgtagatcaataaagtactttgtgactaattgcttaaagtgcttttattttaaagcatgaatttacaagtttacttcaataggagcaacttgcatatacatccaagggaggcaatttcttccaccactacgttcacaaactctaagtagatgaagctagctctctccacatatcccatcaaataaccccccatcatagccagccaaagttaggtattgacatgtacatagcagagaaagaaataacgtggaaagacttttgtaagaagccaagagmctttctcaccccaggttaaagcatagctgaatatgtggaattgatttctatcttggctgattcttaggcccaatcaacatagctactaccaactctctaaagcctcttaaagatttggtggcttcaagctaaaagatgagatggaaaaacatttatttctgggggcatttggtagctccaattcaactcagtttacaaatttgttgaacagtgtttacaaaataccatcagggatatctatagactcctagaattttggattatgcataccaccagcatttgatgacttgttcttctgtaacagatacttacatggtgaatattatttaggttggtaaagattgtaagtgggtttagtctccacgaaaaaaacgaagagaaaaaaaatcaaaggaaacttactttcctaactcttctcgcatcctccctagatggaaactcatacaaagaagtgccctctgcattgaagagtttgttgattataaacactaaaattgggtcttagagtctatagaaacttgtgatatttgcagtctctaggttagaaacagttcatagctcttgctatgtttgaatatgcaaagtgtgcacaatttgggaagttttaagatctacaatggatgcttagccatggtgtttcaggatggagagtcacaattcatcaaaataggctggtcacagtggctcacacctgtaatcccagcacttcggaaggacaaggcaggtggwtcacctgaggtcaggagtttgagaccagcctggccaacatggtgaaatcctgtctctactaaaaatacaaaaattatccagacgtggtggcgtgtgcctgtaatcccagctactgggaaggctgagccaggagaatcgattgaacccaggagctggaggttgcagtgagccgagattgcaccattgcactccagcctgggtgacagagcaagactctgtctcaaaaaaaaaaaaawawaataaaataaaataaaataataataataataaaaaaataaaaaattcaacgaaacaaaaatgataacagggtttgtgctcctctacatcttttgattttttaagcatagatacttacttcagttatatatttatactggattttaaataaaataacttctcattattcttggagtcccaatgtctattatttctcctttatagtattagcagccctttactttgaaatccccacgggtataggacttgtgcaggccttgctgctggattctttttagattatcttctactgctggttttatcacagagaatagtagtaaaaagataatcttatttcttacaaatgctgctcacacttcttactaccacactactcagccacccctgaagaactgaatttcaaatactagtagcttgttagagaaggaagatgaaaaatgtcatgtttactccacatttcccaactggaaacttcactgttgtgcttttccagatgactaggaatgctcccgccctttccaatcaatagatactttcccctttgagtcagagccttagcaccatgttaccaaactcttcaacttagtaataaaattcatggctctggggttgaaagcccagctctgtcacttagatggtgtatgaccttgggtaaaaaaaaaaaagtgttgaaaggataagatgataaaatatgtgaagcactaagcacagtgcttggtacacagtaagcattttctgaatgtttactattgtttttactgttgctactaatattgttcttaataattataaacttaagttattcctccttactaagttatgctcttatgctatttcctgcacagataacttatgattagataatttgagctatagtaacacttcatgctaaaatacatatagacagattattgatatggctggtgaggcctcacaattatggcaaagtcatggcttacatggtggcaggcaagagagcttgtgcaggggagttcccatttataaaaccattggatctcatgagacttattcactaccatgagarcagcatgggagaaactgcaaccatgattcaattatcttcacctggccccgcccttgagctgtggggattattattattattgagacggagtttctctctttttgcccaggctggagtgcaatggtgcaatctcggctcactgcaacctctgcctccctggttcaagcaattctcctgcctcagcctccccagtagctgggattacaggcatgcrtcacaacacccagctaattttctgtatttttagtagagacggggtttctccttgttggtcaggctgatctcaaactcccggcctcaggtgatccaccaggctctgcctcccaaagttctgggattacaggcrtgagccactgcacctggctgacatgtggggcttattatagttcaaggtgagatataggtggggacacagccaaaccatatcaatttcctagagccattcattataaagatgaattatacatgtttatcctacatgtatatatctagtccatatttagtcagatagaagaatttaaaatataaatgtggttgtgtattacatcattttaaggttattgcataaagagccagaatttcccagctggacatggtggctcatgcccgtaatcccaacactactggaggccgagrtgagcagattgcttgagtccaggaattcaagaccagcctgggcaacatgacgaaaccccatctctacagaaaatataaaaaagtacctgggcatggtggtgtgcttgtgtagttccagctacttgggagtctgaagttgggaggatcaactgagcccaggaggtggaggctgcagtgagccatgatggcaccattgcactccagcctgggtaaccagagtgggaccctctcttaaaaaaaaaaaaaaaaaaagcagaattaaaattkgacatttttttatattcatgtttgggcccattaaaaaaaaaagagaacaatgaaaaattataggtgagagatttcagataagtggtaaaattacataatatgaatgccttgtttttttctgacattcttaaagttaagcaacttgaaaaataatttgttagtagtagtattatgttataaaattccacattgaaagtagatccttcaattaattttttaacttgtaaattgagaaatggtaacaaaccagaaaatttaagaattgttttttaaatgatttctgtagtagtctgttctcacactgctaataaagacgtacttgagactaggtaatttataaaagaaagaggtttaacggactcacggctccacatgtctgaggaggcatcacaatcatggcagaaggcaaaggagaagcaaaggtgtggcttacatggcggcaggcaagagaggcaagaagcaggagacctcccatttattaaaccatcagatctcgtgagacttattcactaccgtgagaacagtatggggaaactgcccccatgattcaattatcttcacctggccctgcccttcacacgtggggattattaagttcaaggtgagatatgggtggggacacagctaaaccatatcaacttcttagagccattcataataaggatgaatgatacatgtttatttgacacgtatatatctagtgtacatgtataggagagtgaaaattaatggtttatgtttagaacaatgcacctcaggattttttgtttttgtttttacatgattatcatcatcaaaacaaattcaatcatattcaacattctccattcaggcacagaaatggatttatgtattgacatttttactaaaggcaattgaagtttgttttgttgttgttgttgtttgtttgttttcttaatccagctttacaaagaaaactcaatcaaccagaatagtttattcagattatttaaaggaaagccaaaatgtttgcatcattttacagattattttttccaagttttagcttttgaaactcacttaggtagatagttaaaatcaatattctacagttaatttgtcctatttataaagataaagaatatgtgaatttttggcatttctctcacactcaagtgcagccatcacccgaatagtgtacattatacccattaagtaatttctcatcccttacctgcctccaaacctcctacccttcagtatctccaacatcagactcaattttcaccccatttttcatcctaattgagaaatcagagcagccccatgttgcctttcacatcaacttgcctctacgagccaaatctgatcatttccatggctgattcctgctactctttacaagagataaagtgtgatttgaatggtcttaacttcaccactccagagcttctctctccattgccacccccaacttctctaccttcaatcaatgcctgtgcattcttatcatctccctgctctcagagcctgctttcttttaagaagatctgcgattcagtcacaaagttcccttctaggaataataacattttaataggtgtcagagccttcctctaaaagaatgacactctgatggagaaataattgcttcaaccagtgggtaggagctcacagtagttttctcagctgggcttcatttctttcctggcatatcatttttcttttcaaccctctgcctttgctcaggctccaccgtacctcctcatcccttcactaacagcatactcctacctgtgtgccaacaaaacatatacaaccttcagacccaattttagaaaactctttcaaggagccagctgaactacctcccacattgttaaactatttcagtgtaacttaaacactaagatttctggctatctgacaaggtattagcttccccaagttgagtataatttcactgatttgcagatgaatatacatataaatttttcattttccgtagatcacctgtaaaactctctacatatctagatgcctagcacatatgcattgggtgtaagtctaaagcttgctaaagtaaattgttgtattttcctcaaaatcagatgtttctgtttttctttaatgaaccaatacataatttacctatttcttgatttgtgtcttatgtaacactttaaggtattacttgctctaattttacagggttggagctagcacattttggaattaagtggaattttgttttcacagccttctttttcttctgcctagtgtgcagtcctgtcttctcttactgttgccttcacgcatactgcaaagtaaacgaacacatacaactgcttcttctccaaatgcattaaaattaagaggaaaaaaataggctgggcacagtggctcacacctgtaatcccagcactttgggaggctgaggcgggtggatcacctgaggtcaggagttcaagaccagcctggccaacatggcgaaaccccgtctctactaaaaatacaaaaattagctgggcctggtggcaggtacctgtaatcccagctacttgggagggtgaggcaggagaatcacttgaacctgggaggcagaggttgcagtgagccaagatgatgccattgcactccagcctgggcaacaagagcgagactccatctcaaaaaaaaaaaaaaaaaaaaaaaaagaggaaaaaaatagggaaagtatttcccctggtattaaaatagatttctttatcccagcatgtaaggcaaactacattatatggatgccaaaacaccaattaaaatcagaatatctgatttatcctacattacatttttccaatgactgtaactttaatctttgatcaccaatttattctagttatctgcaacataaactatataaatggtctaaaagtaaagctgaagcaacctagagatatgcctaaggaaatactattatacatagcaaaggtaatattcttcttatgaaaaaataagaatgcagtgttactcagagctaatatttctgttgaaaagactgcacaaaccaattttgtggtatttttcaaacaccatttattattgctgttaaatttaaaaaattaactggggcattgctctgaggaatagcttgtgattctgtctcccaaattcacctaggctattttgcgttggaatagtcagctacccctctaatcatgtctttctcatctctaaaatgagaatcataatgatgattttcccacttacatgcagggattgttgggctagataagtcaaaaataacgagtgcaaaataagctattaaatcattttgttttttatatctacatgagaaatgatcttttaattatggatttgaggtattagaaaaatacaaaaagaacaacaaatttatttctgtggtaggaaaattactattgagaacaaaactaatttttaaaggagtatatttaaagtctatttaaagaaaaatattaggtaagcgagaggacaggtggcatatgaatacagcagaattggtgagggtaggttactcatgattgtagcttgggaaacagtcaaactagaggccaagattctggttgtcctttgtcagaggatccagccccttgctggctttaagactttgggcagatagttttcaagctatgtctcagcttccacaattgttcaaccttactttataagattgctgtgaggggggcagggcgtggtggctcacacctgtaatcccagcactttgggaggccaaggcaggtggatcacctgaaggtcaggagttcaagaccagcttggccaaaatggtgaaacctgtgtctatgaaaaatgcaaaaaaacaaaaaacaaaaaaattagctgggtgtggtggcagatgcctatagtcccagctacttgagaggctgaagcaggagaatcgcttgaacccaggaagcggaggttgcaatgggctgagattgcaccattgcactccagcctggacaacaagagcaaaactttgtctcaaaaaawaataataataagtttgctgtgaggattcagggaagtgaggtgagtgaagcacttagaatagtgtctgccacctagttggtgttcacaaagtattgattattattggtatattttcaattgtataataatttatcctaacaggttatttctcagatagttagtgagaccctgactggaggacaaaagtctctaatatccacttgatagtgtgtttggtgtaattccctgcaagtcttattcacagcaccatgagtctaacacattatgattctaatatggtaaaagtgagcttaaattgcaatctaaaagcctagattagctaaatttagaggatttctgttggttttggtaagtctgtctctcctataacaactatcccctccctgctccttgaagaattgagactctatttacaaaccaaacccataaaatttctatcattttacaaattattttgttagatttgaacttttgaaactggttgagatgaacacctaaaactctttgaactgaacagaattattgatgttcctttattttcactgtttttcctggctgacaaacaagtttatatgcaatttctttgaacagaccacttgcattcattcctaatgagcagctttctatatatatgacattgcaaatcctttcagtaagatgaaattcaaaagtgacgttactggtcttcttgaagtaccagtgaattaaaagccaaccgtcttgacttcaggttatctatttatgatctgcattgtagaaagtcaaccgattattctggacctatttcttgcctgaaaaatgaagttagactagatcaagttttaatccagagttatatagagagggtcagaatacttagagagggatttctttttactagtctttaactgaaatttatcattctcctcatttgtaggaaagaatacgcatcaacatttatggtatttttgtcatcaatagaactatatatctatttattatatacctattatacacttatatttagtgtagcgaccttgaagtatcattttatatcactatttcaaaactacataggtagaccttcaattagaccttttaatttaatgcattaatggagcatatataacactatagcacatcactaggtttacttaaatatgttgataactgtattttaagtagaattcttagtaatcatatatgttttattttatttataaattgtactttgaaaagctggccataggcttcaccagactacaagagggatctatgattcaaaaccatttggaaccttggtatatgggtgtttctcaaagcctttatatggtacactcttgggccataaaggtcatctaagatgatctttaatggattgaaaatgcaaattgtttcctctttatgggagaatgatatgtcagaatgacttctttttttatgaagtactaagggtcactaacaagcagtactgcccaagttaattgtaaaggcgtctacaactaaagatttatcaactaaaataatgtaatttggatttgctgaggactctgctatctggctgtcatgaaattccttggcaattgcgtgtctactcctgaaaagagctggaattttagttttcaaggaagaccctttttcagtgctacgaaactcttatcttgagtttatcatagtttttaattgttgctaatcacatgtacagaattattattgggyataatatgtgtatcatttggggatttgttattttttataattgctgccttgttgccatttgattactttctttttcttttactcttttattactgctgatttctttattcagtagaaataagataaataatttggtggtggatgaccttagtaatggcctttacccattataaaaagttctctaaaaaattttgagaaccagtgaattagttaattacttctatttctttcttgtaattcagtctgttctttttactatgttctgttctattctagactgttctgttctgttctaatctagtcttaagtaacagaatattaaatcagaatttaaaccaagactctaacatgataaatgtcagaaaaaaactgatttttgagacaagaatttcaaagaaggttcaaaactcagtaataagatgcataaaaccctttcccaattcaaacaaatgaaaagctcaggtcactgagcttgaaaaaaaaaagatttatgaagatgatttctttaaagacttctctgctattgggaaatgtgcagaaatgcttccttcttcacctcaaattaagggaggagaacttcaccaagacccttggagagattgaagttaagaggatattgagaatggaatctagttcctacctgagagatctaaagagttaaatggtggcaggtgagccaaaggagagacggctgtgtagatttcagcttttcttccagtcattcatggaaacaaatgcctcaagagtgtgtcatgtgaaccaaatgtacccacccacatttggaaagctgatgggacctcagcagacagaagctggaaatgtaccagcaaatttccaggggctgtggacattgtaaagaagccagagattcatgggtcttaccaacctggtaaaaagccatggtccttggcaagaattctgttaagagcccatgactgtgctcacagaaaataaaggcagctgtaaacgcctgccaggtctagtgagtgcaaagccatcctacaacactgctgctcctcttagctttcttctctcccatgcttaggagtccaaagtagccagtggagggagagcaagcaagaaatgagagaaacatcaaccatacacaccccacccccctccacacacacaggcaacatttctgggttctgtaacaaacaaggtgggaaaggagtcttatctttgtttgacgatgtktattacatgagaccagaccttctattgtctgatttgagattttggcaacttaatgtgatcacaggatgtttttagttctctaagaatgatcaggaaagtaatgagactacctgaaattttgatcttggctgagaagataagtcccaaccctccatatcgtaaagacaaaattgttttgtaatagcaccttataaattctgtatgtccactaattacataacctcaacaaaaatatgctgcaactgaattgatacaatgctacaatatatgttaaaggaattataacaaagttaattgggcaaagtttaattgttagaatatctttactcaaacttcagacagaaagaaactttcattgtatatgactatttcctgaactmtcaagatatttcaagtaattgactcaaaaattaatttctgtttattttgtttactttgttgcttatgtaataagactctttcatctaaacattctgctttatacttctattttcatagattctctacaacctctccagaaatgttgaaagatttttccatgctaatattttatttttcttgaaagtttatatggaaactgagtgattccaagactagtttgtcttgacaggtggtatcttaaacactactatcctttcatactcatttttaaatattcatagcaactaagcaatgtatggttaaaaaacattgatcattagaaggtttagttaaaggaatttgttccaattaaaaaatattcagaaaaaacatgattttttacatgggatttaatagatgtttaaacatgtttcatctattttatttctgtattttcatattaaatcacagcttgagaaagttatgtaaccaacagaagatagcttgttatactatgtagatccacaggctgaaaggaagatgtttggtgtctttgaaaaaatgtgccacaaaatccattgtaaaattcagtcttcaacattttataaagttcttcagtctcctaaccttattagttttttccaaagccttattttgttttgttttgcttttgtttccttatatttttaggtgaatctgatcttcataagaactcagaagacttagtaaatgctgaagaaaaacatgatgagacacattcataggcccgaaacaccttaaagacttctgtcattttaaacatgagaggtaattttattttatagaccagaaacttaacttctaaagtaaatggtttgcagaataccattatggatgaaattttcttatttaaatgccctcctagagtttttttaatctctatcatcaatcctttgagacaaaatcttaacaggtaaactttaaatatttaccttttcaaatagttcttaatttgttaatcaacaaaaattatatttactggaactgaaattttcaatctttaaaaataattttaaaaatggccgggcacagtggctcatgcctgtagttccagcactttgcgaggccaaggcgggcaaatcacaaggtcaggagtttgagaccagcccggccaacatagtgaaatcctgtctctactaaaaatataaaaaattagctgggtgtggtggcaggcacctgtaatcccagctacttgggaggctgaggcaggagagttgcttgaacctgggaagcaaaggttgcagtgagcgagatcaggccactatactacagccagggtgacagtgcaagactccatctcaaaataataataataataacaataataaatacgttcatggggatgtttaatcctcatttctttttccacatcatgtaagaaatataaatgttttagactgatttcttgttttatttcatgtaaaaatatgtttatacccagtaattaaaacaaagcaagtacatattataaagcaaatatcatgttccttaaaatctgtgaacatgtgcatctatggttctctttttaaaaattcagcttctagggcttgttttcagtctaccaaattattaactctgggagtgatgccttgaaaatttgaatttttgataagccagtctgttgatatttctgtccactaaaattgagaaccactgtcttgaaccgatggcggagatatgggcagttagaaaggagggatgtgtatttacaatggagatgtcttaatatctactaaaaataagaagaagtaaagaacaaaatccaagtgttataacgcatcctgttatgggggtggtgggttggggcaagagaaaatgctgagggtaccattccaaaccttagagatgttattattagttccacagctgttactttagatatgaaagtgttaaaatgtgattcgcttttaaaataatttcttcctcaatattcttgagttacaaagacagttagttgttagactgtcttttattcataagaatagttttgtgaatagcaacaataaagtgtcaggcactgtggtgaacatcttgtatatgaagtacctttttgcatttttctttttttatttttggagaccgagtctcgctctgttgcccaggctggagtgcagtggcacaatctcagctcactgcaacctctgcctcccaggttcaagcaatcctcctgcctcagccccgcaagtagctgggactacaggcacccacccccaagcctggctaatttttttgtattttagtagagacagggtttcagcgtgttgcccaggctggtctcgaactcctgagctcaggcaatccgtctgcctcggcctcccaaagtgttaggattacaggcgtgagccactgcacccggcccctttttgcatttgtgtgcggcccgctcaaagtaaatataatatttaagcccgagcagacgatttggcaatttttttttttctgtcaaggccagttaaattatttagcttccttctcagtttgagaaagccctgcctttggtgcacagtcttctgggaaatgtgatcttcagtagcaccttataaattttatatgttcactaattatgtaacctcaatagaattctgctgcaactgagttgatacagtcctacagtatatgttaaaggaattatgtcaaagttaattggtgcaaagtttaattgttggaatatctttactcaaacttcagacagaaattcacatagcttcccaaaacaagtaggtcttttaaatgagggaaatgagtgaggtctaaaaacaacaggaggggtgacgattggcaactgtgactcaggcatggtgtctgggagacaacaggcagtgatcagtcctggaaacagagaggacacagcacacccaatctgaaggctacagtcagccactctttggctctggcagatttttactctggcagagtaagggcccagtgttgccagctgtttctagtggttaagaaaggttcttaaagtaaactcttccaatttttcctattggcccaaagttttttgaaatgttttgtggacaagagaaaaatatatctgagggtcagatttggcatgcagggtttctgttgcaaatttagcacaccttctttgtgactgatagctaattctttgctggctgccatcacagaaagtgtagatgttatcgcagcctggccatgtctctgaaagccattacctgctttgttctcaatgtgtaggtcccactgtgaggcaatttcccagaaaatattgagctctaattaaatctgtgccgtgttgagacttcataaatcaatgtgcaacactacacttaggacaagaaagaarcccttcaaatctacttttcacattgttgtataatttcgccatcatttctargagattttagaccacgaaagtgttttgttttgcttacatttttcttttgtgtttttgtttattaaaggaaataaaatggaatggttggatatataatcccaggctgctttattatttaaaaagctaatggcatatcatttatcacattatctttcttgaaagatatgtcaggaatttctggcatttccaaagcaagccactatcagacctgttacccactgggaggaaagtgttccctatcacgaccggtgtctactctttaacgttgagtgtgctatccaacaagagatcaaaattgatcatttgttgctgtatttagtcagtagacttgcctggactttcacactgatttaaaatatcttttggaatatctttaggcagggcttatgttctttagttgactacagtccctgtgagtctagttgttttacactcacactggcccacttaactcatttacactacctgacaggcccgtatgcctatctgatctagagaaccagagtttttactggaattgaacacacacacatacaaacacacgcacacacacccagagcagaaataggaagagaaattccaactgatgtaaaaccactatctattagaaagatagtaaagaaagccaggacgggtgcggtggctcatgcctgtaatcccagcactttggtaggccgaggtgggtggatcatgagatcaggagatcgagaccatcctggctaacacggtgaaaccccgtgtctactaaaaatacaaacagttagccgggcgtagtggcgggcgcctgtagtcccagctactcgggaggctgaggcaggagaattgcgtgaacccgggaggcggagcttgcagtgagccgagatggcgccactgcactccagcctgggcgacagagtgagactcgtctcaccaaaaaacaaataaaataaaataaattaattaattaaaattttttaaaaaaagaaagcccttatttttgacaaggtatgtaaagtgcaatgtgaattgccacacagtaattgatacctgtgtatgactaagtgatgaccttcagtttctatgttttcttttctttttatttatttatttttaaattcacaaataaaaatggtgtgcaacatgtttttttttgaaattgtggaatggctaaatcaagctgattaacatattcattacttcacatgctcatctctttttgtggggagaacatttaaaatctctcttagcagcagttttcaagaatatgatccattggtttttaactacagtaaccatgttttacagtagacccttgaactgattcctcctatctaactggaattttgtactctttgactagcatgcgcccaaccacttcccactctttcttctctgatccatattttcatttggattttatttcaggacaatgaaatcagcatgaaaacatcctaaattctcaactttccacaaagctatggctcttctttcaacatagaattggattgggccattttaattgactcctatacaaggaattaagaagaacataaattttgagctagtaactctggccaaataaatacactcaagtttttatcagagtttttggccagtgcttctgccatttttttccctccacaatttggccttcttcaatcaagccagataaatttttgagacaaaagycagmcagtttttaatttttcttgctttgaaccctgtcataatgactgtgcaatacatgtgcagaagatgaggtattttaaaatttacttccttgcactgtcttacamagagtgctataactataaatttttcaaggtcttaaataaaaggaagcaaaaacaaaattattgaaaaattttttttgttgtgctggggaatatactatttagattgtccttcttattttaaatgcatgggaacagaatgacaggkgggatgctgaggagctggttgaagcatcagagcaatgctacagtccaacaatggagcattagatccccagctaggtgacctgatgaacacctttgtaaactctcatactgggaaatggcagtgaaacctttttctgaacccgtggaccagcctgcgtccgtccccatggtttcaaagcacgaatgcattacctccatggttgtggttacaagcaagtcacatgctatctacagttcatgataacaagaccgtcaaccattgctggagacagacactagaatggaaaatgaaatttgccagcgggatgtttatcccatcagaatgtaacaaaatatattaccagccaagagataagagacaagaatgtgtgtgtgtgtgtgtgtgtgtgtgtgtgtgtgttcaaaaatgtctatgaaaatgaaaacccacacttttctgtacagataacattatttgatgtgacttttatattttactacacagaaacaaactgcagccctcagaggccctgcttccttgtcatgttttgcctgagcatgtgcaaagtctttcctttgcttaaagctgaaaaactacctttatgcattgttagctgacaagaaagatcaagcacaattagatgttgtaacttttcactgtacaagcattgcaatgattgtgagcttcagtgaatttatctttgtgaaaggtaaaaattggctggaaagaatcaggagtagccataaattaaatcatgcaaaggaggatccatgcatcctaacaagttttctgctgcatctgcttccttcctgggctccacaatgttaagcaatattttagaaaagggtacaattggaagcttttaagcctgagtggtgagattttataactcacaacttagatctcttttaatgtgtaagccatattctatatgcatatttattatgcatcattgtaatttaagatatatttggatgtaggctgtataaatgcttttaattgttctgtgaatagatccttagctttagtttcacctgaatcttgtgcaaaacacagctaaataattgaattgtattatagacattatgaggtaattgatcttttaaatgtaaggagtaagattgatctataataatgtgctggggaaaacatttatagatatgtacatcatggttactttttgtcctttcaaatggactttttatttctatttatggagagactgtaactactgcttttaatgtctttttaaagcaagctatttaccagcttgaaaatatcatgcatttaaaatagaatctatctggggagtctaattactattgttcctatttgagccagttgtctttcagtaaagctatagaatctctcaaagaagtaaatagaaatactacttcttaaatgtcataggaagcatatccactttgtttctattagtactttaagatctataagaccttattactaaaaagtagaggaatataaagaattcatcaatttctgtatatgggctttaacctaattttccaggttatgcgacttataaagcactgtgaccaaacttccagagacagtaaaaaaaaaaaaaagaaaaaaaagttttactccttcagaagtattgtcatgctactgctgtacttattttcctaatctctctctttctatctgctatactccctccttttctttctttttcttttaagcttttatatttattccttcctttgttttcctctctgtaagacagctactactgagcactaattagtagaaagtcagagtggaggttatctgtgcatgtctttctgcaaacattactgttgaggccatctgaagagagggattgataggttaggctgttgcaccgtgaatgtcctgctttgcatttttaacctcagctccccaacatatatatcttgcagtttatatgccttttcatttaaccgaaacctcttttatttaatttttaacataacaacctacaattcttgtgtttttattatgctgtatttttctgtgtttcttattacatgtgattgctaaataaatcatatttgagggaaaacattgtgaaacatttggtgttttatgcaattcaatttagtgaggcattgaaaagttggagaaattgggggaaacccaaaggagaccaacttaaaaattgatatgagtttggtaagaaagtgctttttgttccattaaataaatactgattgaattacttattattatacctattattcataagctcctggctggaagcatggtgcatatatgcatatggcaatatttcctctagaaatttcaagtcttataaaggagataatctacacagactgtaatttatacctaataactagaatgccacataaaaaagtaaccagttgcaaataaaatgcacctatgtatatttgaggaggtaaaaaactgcttctgtcttcagagctttcaggactaagtggtgcatcagttggcatttagtaaataaaaacaagtttataaacattgcctattttccatgtgtggcctccatgtcaatgcttaacaatattatctcaaatcctcacagtaatccagtaaagtggtgttgatatgaacaaaggaaaccaagtctcagagaaaaagctttgtccaaggccatgcaggtctccattggccatgcaggtctccattggcagactccacactggatttggttctgtgtttctccggcaccttgttttctttctacaacatccacgtggggctgggcagaagcacagcagaaggaaagggtctgtgaagaagagcaacgtgaataaggcaacaccagagaagaataaagtagcaaagagtgttgaatcaaggtgaagacccagtgagtctcaattaattgaattaagagtaactggcatggtatgtgtgaaaccttaggctgtgtctctatgaagccaatgagttccagaagaagatgtaaacacttaactggtcatcaaatatgtgacacttagctgaattttttactttaagtatgattacatgataaatttccacctaatatcaaaaagctttcaaaggctatattttaaatatgaaagtccatatttatgtttagaaatataatttagatataaaacacatatttcctttggaagcaataatatattaagccttctgtcctctgtttaaatgtttttctaaatacggcaaaccttctctaccatttaatacaagtcctggacaataaagacaatgtatattttagagtctaaaaagcaaacacctaataatgtcctgcattattacattaatcttatcatttctttggaggtaattgtaaatatttaagatacattttctatatatgggccaacattatgtttaaagctctagttggggctttttattccttaataacattaattaatttctaggtaatttgcttaatatgtgtgaaggttggagagtttcctttgcatctcagttgatatatttttatctctgacaattaaagagtataatcatgtagttttagtttattgtagtcatactagtgcattatattattttcttacattatctcttttacttcctacaactactctgtaaggcattattattcgttattataggtaaggaagtgtggcagaggaaggtaaaataatttgtgtaaggtcaagcaactagtaagtagaggaaccagatctgaagtctaagggagtctgactcaaaaccactaggctagattgcctctggccactggagtaggatctgtcatgtttttttctgcttatgatattcattaccttccttttttactctttgttccattttgcaggctcttgtccctaaaaactatcactatgagagggaagaattttcagtgaccaacagcaggacggtgtgtgctttggtgaccaatttaaccacgtattactgtagaaaaggtgtcttttatttttgtggatgggagaaaccattttccatacttaatatatgactgtaaagtgtccttttcaaaagtaaccactggtcctcactctacactttgctactcaaaatgtggtccacacctgtgaacttcttaaaaataatctcaggtttctattaaactggaattggcattttacaaagataactaggtgatttctatacaaatcactgttctagacagtaattacatactattctaagcacctactagccacttaaatacaaggttgtttttcttcacagtagaggttcttaacaagtgacttttgactactgtacccttccttagatctatcagcaaacgtcatggaacaaaggctaaaggttcaggctcttgcgtcatttaatgaagtgtatgtatctgtattgatgaaatgtggttccttacacaaataattagaggaggacttggaggaaagacattaagacttgaaaaaagacattaaatgtgtgagcatgaccatatggcttttagagcaaaaaaaatctttgaaagcaaaattcttcataagaggcattaacatagttgattgatcctgttttcattggcctatcaaatattgcaattgaattatatagcgtacaaaggcaactttaccttgcacaagtgataaatacataactgttaacctaaaaacatagtttgatgtgtttcactcttatctgtcagctttttttaaaaccttaaaatacagaaaaagttatggagaatacgcttgaaatgtatggggtagggtgatggagaggacattaaacattagagctaattgccaagcctagagtggaaggaaaagggtttgtgttaactttggaagcagcaagccatctgaattcagaaacataatataccaaggaaaacaaaaagaaaacagggagctgatattggtttacagaaggaaagggagctgggtgtattttcacagtgacataagcccagagagtgtgcaggatgggtatctgggagacctcattccatctgaaactgtggggtgagccacacagtgagaaaagattcgttttaggcagtaggaatgagggagaactgaaaaggaaaaagatgggcagtgtgtgagacgacatttgttctttggtttactgaagaagcattggctttgggcaactgaatttggttgggcaaatttttctgcatatggtacaactttctgtctttttgggtcctgtatttacatcccatcataagccaaccaacagtgtaattgtttcttgtttgggtgtcttattttctgttttggatttgcaccttgaagaggctgaagcatgcacaggattctcaggaacctcccctgactgaaggacttctaaattaaataaatacaaaactcacaacattcagcttttctctaggcaaagccaggctcagaaagccctactaatgtggcaatgtcatgctttcaggtgtttcttgctttcagagcacagaggtagacgtgcaccaacctattcagaagtcagatgctccaaaggtaatgggaactaaacctgtgaggaggtacaaaatcgaggggctgtagtattaatctatgtgctgtaattttaaattttaagataacagagtgacccaaggcatgtttaataaacttctggaaggtaaatagtaatagccactaactgatattatatcttgaaatacacagctgaagtgtatacacacacacacacagaaacacacacatatatataaaatcttcctgatctcatacgtatggaagaaaaaattaatattatgatctgtagtgagcgagagtttatacgaagagcaggaatctattttttttccaagtcaaactttttttctatagatatgatcctataaattatcttttagagatcacatactccttaaaaaaatttttttttcaaaatccttgactttggatgttgatgaaatgtttacttttaccctcaacttcattggcattccatcttagcatttctaaattattacttaaatatagatataaaatatgtcctttttaatgtactcattctaaaaggtattaaagtgtactagagttcattattaaaaattgattttctgatgaataatatcatacatgcatatgaacaagtgaaaataaaaatgtctatttagaattaagaatatacctgtgcatcaagcatgaatcaattttaccttagtatgtgtgtgtgtttgtgtgtatgagtgtgtgtgtgggcatataaaaacttggtggtttcagatgaaatattaaattagagatttcagacgggcacaatgcctcacacctgtaatcccagcactttgagaggctgcggtgggcagatcatgatgtcaggagtttgagaccagcctagccaagatgatgaaactctgtctctactaaaaatacaaaaattagccaggcttggtggtg

SEQ ID NO: 94529 - DNA, 57022 bp, Homo sapiens
  misc_feature (1)...(57022): n = A,T,C or G
ttctatcacaattttattttattattttttatttttttgatatattttttccagacagggtctcgctttgtcacccgggctggagtacagtggtgtgatcatagctcactgcagccttgaccttctgggcttaagtggtcctcccatctcagcctcctgagtagctgggaccacagtaacgcaccaccatgcctggctgattttctaatttcttgtaaagacgtggtgtcactatgttgccctggctgctatcaaaattttcaaaagcaggagaataataaatgcaaaatgcaggatactggttatcttggagtggggaggtggtgttggggagacagcagagcacctgggtgtatttcagtagggcattggtacggggcccattcctgggctggccagtggacttacagacattcattagcttattttgtatttattttattttatttattttctgagatggattcttgctctgtcccccaggctgcagtgcagtggcgcgatctcagctcactgcaacttctgcctcccgggttcaagcaattctcctgcctcagcctcctgagtagctgggattacaggcgcctgccactgcgcccggctaatttttttgaatttttaatggagacggggtttcaccatgttggccaggctggtcttgaactcctgaccttgtgatctgcccgcctcggcctcccaaagtgctgggattacagacttgagccacctcgcccagccttattgatttacttttttgagatggagtctctgccacacaggctggagtgcagtggcacaatctcggctcactgcaacctccacctcccaggttcaagtgattgtcctgcctcagccttctgagtagctgggatcacaggcatgcaccaccacatctggctattttttttttgtatttttgttagagactggctttcaccatgttgaccaggctggtctcgaacttctgaccttaggtgatccgcccacctcggcctcccaaagtgttggccaccgcgcacggccttagcttattttctaaacagaaaataaaacgaaagagggccttgggtggacaagtgttgatggataatgataatctggctctgtcaacttgaagcaacaacaacgaaagacagaaggaaaataccacgttcatatgagaacatgagaagccctccggggccctgcccatctgaaaaaatggcgtagtaggccacgtgcaggtggctcacacctgtaatcccagcactttgagaggttgaggtaggtggatcacctgaggtcaggagttcaagaccagtctggccaacatggtgaaacgccgtctctactaaaaatacaaaaattagctgggtgtggtggcaggtgcctgtaatcccagcagctagggaggctgaggcaggagaatctcttgaacccgggaggcggaggttgcaatgagccaagattgtgccactgcactccagcctgggtgacacagcgagactctgtctcaaaagaaagaaagaaagaaaaaaaaagtgtagcagaaatagaccaaagagcaaaggcaattcaatggagaaacggtagccttcccagcaaatggtgctggaacaactggacatccacatggaaaaatgaacctaggcacagactgctgtggcttgaaggtatgtggccttccaaaattcatatgctgaaacctaattatcaagatgatggtatcgcagggtggggcctttgagaggtgattcggtcatgagggctctactctcatgaacaggattagtgccctgataaaagaggcttcatgcagtggtcttgctttactccccttttccaacacgtaaggacatcatgagaagatatcattgatggaacagaccttcaccaggcatggaaccagttggcactgtgatcttgggcttcccagcctccagaactgtgagaaaaatgatctgagacagaccttccatccttcacaaacattatctcaaaacagatcatggactcaaatgtaaaacacaaaactatcgaatcctagaggataacatgggaacatcaggtgacactgggtttggtgatgacttctttagatacaaggccaacagcacgacccatggagagagagaaaacaaagcagcaaactcagctcatggccaagtaaggaaagggcaacccggttactccaggccaaggctcccaggagaagggagctggacagagtttctgggtcgtggtctggcttcagcctccctgacagtcccttctggaaaagccagtgggcaaggtcgttagagactcctgggaaacatgggtccccactcacacatctgacacggctgggctggggactggggattgcacgcatccagtggaaaaaatacagttggccttcatatccgtgggtttcacatctgaggattcaactggccatggatggaaaacacttgaaaaataaaaaatagcaatacaacaataaagataatacaaattaaaaaacaaatcaggccgggcacaggggctcatgcctgtaatcccagcactttgggaggccgagttgggcggatcacgaggtcaggagatcgagaccatcctggctaacacggtgaaaccctgtctctactaaaaatacaaaaaattagccgggcatggtgacaggcacctgtagtcccagctactagggaggctgaggtgggagaatggtgtgaacccgggaggcggagcttgcagtgagccgagatcgcgccactgcactccagcctgggcgacagagtgagactccatctcaaaaaaaaaaaaaaaaaaaaaaaaaaatcattacactataactgtttatgtaacactgacattgcatccggtaatacaagtaatctagagaagatttaaagcattagagaggatgagcaaaggtcctatgcaaatagtatgtcattttagatcagggatttgggtgtccatggattttggtatccccagtagggggaagcctggaacccatgccccgtggacaccgaaggacaactgtagtcagaagggtgggatcttctgtgtgtcctgcttctaagagcaccatggcctttttgcagctctctatggtgggtcagagtggagcccttctgtggggtgtcatggcatcctcagtgggtccaagctctgggacgtggagggagagcagggacctacctcatcagcacagagtaagataggacccatccagataggaatctgggccagactcacctgggtacccatcttcaggttaaagaatgctggagtgccccggggagcatggtggtgccgccctcaccctgtctctatcttgagcgcaatcgcccgctccagcctgactgctgtgctgggatgtcactgcactgtcctcaagctgcactgtcaagcgcagtaactgccccatgatcagctgtctctcatgtccttcctcccggacgctctcccagggctgtatatttgttagggttttctgattacagggagaagctgactctaactttagcaagaaaatggatttatctggcatgatgctgggtagatcaccaaactggtggaatgtctaatggagcggggtttcggacacacaggcgagaccggttctttttttgttttgttgttttagagactgagtctcactctgtggccccggctggagtgcagtggtgcaaccacagctccttgtaacattgaattcctggggccagccatcctcccgcctcagcctcctgagtagctgggactacaggtgcgtgccaccacgcccggctaactgagacctgttttgagtgggatccagagcaagaaaggaccctgcaggaggactgggctgcggggcaagctgctctgccaccagcagcgagagcccgccaacctaacggtgctggagggatctgtccatggtaggccaggatgctgtgcggaaccctcaggaagcctcaatggaaggatcccagcagggaccatagaggctgtggcagggccacaccttcggtggcagagctactcactcaccactgaaaaaagcatagctgtggccatgctactgggacctaggagagacttacagcctgatcatggggcatccagggcctgtgtgacccaagccacccattgtgaactgaatattgaggtggagatggcacattgaggcccaggcagtccagacccccggtcacccggctctttcacactggtatgccccttcagctcacacctatggcctcatgggaggtggtgatgggatgtccccatgactgactcagacccaggtcctcgactggtcatctcatgtcaccactaggaaaaacacctgctgtcacactgaggccctttgcagggtggccctgagagacagcagtgaggggacatcctctaggggagcaagacactaggttgtctactttgtagagggagaaatggcctgagatgaaggtgtccatgacccccgggcagtggaaaatggctgggctgactggtcagggacccgggtggaggaagattggaagaagagacaggtttggcgaagaggtacctacgggagtgctcagggagagtgtggggccccgtgctcgtcttcgcgcccatgccgctggggagcatgcagtgtggagggggcgcgccagaagctagcgaacagaggggaccatctggtggaggtcagccagcttctccccaggatgcgatggacccacgatgccagtggccatggtgggagggctggaggctctgtataagcccaacggcaagggcttcctcttaccacggctcatctagacactgccgctagtgaatgttcttccatccaccagctgcagagaccgatgctgagccctcaatatgacgccattcctcaagactagccagccattgggtggcaggttgcaacctgcacaccagcccttgtctcaagttctgctttctgggagaagccctggataagaaactcgcctctcttctccacattctgggcaggcccgccattcttgatttctcttctaacgaggagccagggaggaaaggaagggctccgattcaacagccccgtgtggctgggggttccctcacttgcccaaacctggaaatgaagcatgtagcaatttctccaagtgatctcctgcagccggggcagcctctgggaacgcagacttccacccgctgctgctttccaggcaaaggccttctccctccaggcttgtccaagaagacggggaggtggtgggagagaagaggaagagatggaagggctgtgaaagcggggaccgggtgagggctggggctgaggaacaggtaggcggcgggcccaggctggccagtgctgtgtgcaggcccgggtcccaaggcctccgaggccactctccccacgacccaccccctccccacgcttcgctcatccttttttctttctctctttcttttctttcctccctttctctctttctttcttgttttaaacaaaggtgtccgtttcaaagacagcagggaatggctgagttgaaggagggatgcagtcatttaaggcgaagcccgaggaaggagcagaggcgtgagggctgctgcgtccaagaccggggagaggggctgaaatcgcggactctctctgggggacccaggagactgctcctcctggcaggacccctctctcccagagcggcatcgcgcagacaacgcgcctggtgcccgcccctcaggaccggacgccgggtgtcgtggggtgcctaggacccccgcccgcttccgtcgagcgcccgcccccggcttcccgcgccggctccagcgcccccgccgctccctcccgcagccggccccgctcccctccccgcccctcccggcgcgcgtgcgccccgtgcccgcgcccctcccccgccgccgtgggcgcgctcgcgtgcccgtcgtcccgggcgggagctggagacggccagcggctgctggacgaagagcgggcgccgggagctccgagagcgcggccgggcgaggcgggagcgcgggcgctggcctggccgcgggcgggggccgccgccgcgccgctgcccccctgtcgcgggccgggccgcggcgccgagcgcgagggccgggctcccggggctggcggccatgggcaggagccggaggcggcagcggcagcggcgggccccgcgggcggggaggcgcgcggcccacggcccctgacggcccctggcggcccggcgcgcccccgcgctccctggggggccgtagcctggcaacgcccggcgcgcccgcccatcccccgctgccctttttctcctggccgggtgcgagggagcatgcccgcgcctggcctcggccagcgaagagttaacctgaggggcgagccgctgcccccacctcgggggcgtgcccccctcccccgctaggcggcccgccccccgcgccagggtatggcccctggccccggcccgggacccgaggtcccgcgcccgggtcagtgaaaggcgtcttcccgttcccgccctccgcctcctctcgccggccagcaacatgggatgtaatatgtgcgtggtccagaaaccggaggagcagtacaaagtgatgctgcaggtagggccgccggcgctgcggcgggggcgcggccctccgcggggaggagcgggccagtggggaggcccggagcggcgggcgtgggagagcgggagggctcgaggaggacaaggtagggagccgtccgcaccctcccatcctggggctgttgggtgttggcgctccgtgggaaccagccacgggtggggtgggaagttggggttggcccgggtggggcgcgcttccgtcccgggaggcgcggtgcggcgggcgcgggatggaggttgcatagcaacgagcgcagttccccgcacacgctctccccgcaggacccagggcgggggagggagccaggctcccgccgtgcggggggcgccgaatctagatcccggcgggcctggagcgtgggagtgcgtgggcgtccccgggcgcggtccaagtccgtccgggggctgggtgcccaccccgacacccactcccgcctggccctgcccgaacgatgggctcccgggccttaggcgtctcgggtgagtgggcgccgccgggatcagcgggttgggctctctgcgggtggcagtgcctggccgggctttgcggggcgtggaccagcagggccccgcggggagggaaggagacgcggggcccggagctcggacctggagcccagccccgcggcccggaacggggcttcttgcctgtgcgtggcgtgactacgtgagtgcgttcctgtgccccgtctctgtgtgcgcggaggctcccccggccccgcatttgtgtactttctgtgtgcaccctgcagactgtctagagaaatgtcccggatgctgtgggctgagacctcctagggctaagtggagggaggtcaaggtcaaggcacccaggagcagacagggctcagacaggtatgcgtttagtggcctggattcaactcccgggtttattggtctggactgggaaggaatcaagtgctttgcaggaggggtgttggcttgggagaacgtgggggaacccgtgcagggatcggcgagaactccggggcgggggcgggggcgggggaaggaggggctgggcacgggggagaattcccaggaatccggggactgacttcacgctgtgagccgagctcctctggccacctggtgcgggagccgaggggcagggcggggacgcaaatcttgccccaccctggcggagctcctggtcctctctccccggcccttctccgggggtgcgcggggccctcggcttctcccgttcgctgtcctccgccttcttccctctcagttcccggctgccactcctcgtctcttgttcccgctgtttggaaaccttgtgtggccattgccagccccctagcgggataggaatgcgaccgagagggcgtcctgtggaatccgtgttggattccagggctgggatggttggttgacggggactctggatcccatcctcctgcttccttttcgggagtcattccatcaaacggcaagcgatttctccaagcgattcctccggggccgttttgactttcctggagaaggattggtgtcgcacttcatttaaggccaacctcgtggggacgtgtggataggggagagcgacccgagctgcaccccaggcctgaaatgagccatgggacgacaccggtagcccttggggctccccacagccctccgggaaggcctcggcaggtcgggctgggcctgccttcagggaggtgaacttgggtgggccctccctgctctgcgccctaagctctccttcatggaagggacttgcccaccccaaggagacccgccaggaggagggccactgccgcatgcgccctctgtgcgctttcctgctgggctccctttgaaaccgtgggagtttggctgcaaactttcactttctacattcctccttggcccaatcaaagccgggattttaggaggagaaccatccttcacaactaagggaaaacaagaggactgaaaaaagtagatacggaaagcagtgcaagccatgagctgtcccaggggactgcgcttctgggggtggacgcatcaccaggtcccagcctcttcagaggagaaggagcttttgttccaaaagacaggtcagcttctgggaccccgtgcctgcctcccggcctccttaaacacgggtgctcccccatctttagggggcacttctccctgtcccccctgagtaacctcgtccgcaccttgtcagggtgaggcacttcatgggcctgattttcagaaagaagcacatgtgcatctgcagcgccttccatctacaatccacagaggcctgggatccccaggccaggaacccccaagtctctagcctagccttgtgttccaagccattttctgccaatgactcacaacacttccaaaattacagctgtattgagctatcattctcctactgcacaacttaccctttcaaagtgtacaagtcagtggtttttagtatactcacaaggttgtgcagcccacaccagtaattccagaacgttttcatcaccccaaaagaaaccctgcactccttagcaatcacatccccatttctccctcaaacttcctagcccctggcacccaccaatctacttcctgtctctatggatttgtttattctaaacatttcatagaaactgaccttttgtgtctggctttcattaatcataatgttttcaaggttcatccatgtatcaatagtcaatttctttttattgccaaataatatttcattttgtgatatacaacatatttatccattcgtcagttgatgrgcatttggggtgcttccacccttgggctgttgtgaatagcgctgctgtgaacactggtctacttgtatctgtttgagtccttgcttttaattctttggagtgtgtgcctgtagccattgaactgttttccacagtggctggaaccagtttacattcccaccagcaacatataagggttccaatttctctatatctttgccaacagttgttattttctgggtttttgttatggccgtcctgctgggtgtgaagtggtatctcattgtgattttgatttgcacttcctgttagctaaatgatgagcaccttttcttgtgcttgttggccatttgtggatcttctttagaaaaatgtctgttcttaagccagcgccacactgctttcattactgcagctttgtagtaagttttgaagtaaggaaatgagagtcctccaactttgtacgtctttttcaagactgttttgtctattctaagtccctcaagtttccatattaatttcaggatcaggttgttaatttctggaaagaagccagttggcattttgatagagattgcatcaaatttgtggatcaatttgggtagtattgttcatgagcatggggtgcgttttccatttatttaggtctttaatttctttacatgatgttttgcacttttgtttaagtttattcatgagtattttctttatgatgctatcataaatggaatcgttttcttaattttactttcagccttctcattgctactgtatagaaatacaattgattggctgagcgtgttggctcacacctgtaatcccagcactttgggaggccaaggcgggtggctcacctgtgcttaggagttcaagaccagcctggccaacatagtggaaccccgtctctactaaaaatacaaaaaaaattaacggggcatggtgatgtgtgcctgtaatcccagctactcaggagactgaggcaagagaatcgcgtgaaccccagaggcagaggttgcagtgagctgagattgcaccgctgcactccagcctgggtgacagggcaggactctgtctcaaaaaaaaaattgatttttatacattgatcctatatcttgcgaccttactaaaattgtttattaagtataatttgtttagtagattcctcaggattatctacatattaggatcatgtcattggcaaatagaaatcgtttttcttcttcctttccaatctggatggctttgatttcttttcttttctttctttctttttttttttttttttgagacacagtctcactctgtcacccagactggagtgcagtggtgcaatctcggctcactgcagcctccgcctcccgggttcaagtgattctcctgcctcagcttcccatgtagctaggattacaggcacacactaccacacccagctaatttttgtatttttagcagagacgagcttttgccatgttggccaggctagtcttgaactcctggcctcaagcaatcctgcccgcctcggcctcccaaagtgctgggattaccggtgtaaaccaccgttcctggcccttcgatttctttttcttgttaatttgctctggctggagtctctagtacaatgttgaatagaagtgcctgtgaatgtctttcccttgttcctcatcttaaaggtaaagaagcttccagtctttcactagggggtataaagttagctgtggctttttcatagctgtcctttatcagggtaaggaagttcccattctattcctagtgtgtttttatcatgagaggcattggattgtgcagtgctgcttctgtggctagtgagatgaccacatggttcctttattccacggatgtgggttgtcacaggcactttcgtgtgtcatgtcggaacctcagccccattcctatattccaatcatgtcctcctagtttggaaaatctgggacctcccctgaaaatggaggattactgcgtgttgagttaggaaaaggaagcaggctggttgcccagaatggaaggcaggaaacagcatgtccccagctccggagccttttctgcagcccatgtccctccactgccaccaggcccccttgtcatatatctcatcgtggtccacactctgctgaacttgtctyggccttggcaccccctctctgacaccatgatgtgcttgctagcatccgagcacgccggagatggtcaggggataaacccctggtacttaggactggtctcccgcccatcctactcaggctttacagggggagtgggtcaggaccgcctgtcrtctcccctctgtccacatcgagggaggccaaaggacagctggccagcccttctggtgatctcccaggcattcttgcctaaagcacctgcatgtgagcccccatggtgctggcagccatcctgggtgcgtggcattcagcagggagacactgcagacagggccttgcccctcccccagactccccttttgttgttgttgttgttgttgtttgagacagagtttcgctcttgttgcccaggctggagtgcaatggtacgatctgggctcaccaaaacctccrcctccagggttcaagcgattctcctgcctcagcctcccgagtagctgggattacaggcatgcgccaccatgcctggctaattttgtatttttagtagagatggggtttctccatgttggtcaggctggtcttgaactcccgacctcaggtgatccacccacaccggcctcccaaagtgctgggattacaggagtgagccaccacgcctggccccaggctcccctttttgtaagggggagaccatcgccaacatgtaggcaactgcgggggagagaaagtactgcttgagtgcgggagcgtggctggcagccagtgtcccctctycagcgacgtcttcctccaaactgctctcccacccaccaagccaggtggcttctctggctccctcctgcttgcatgggggcttcctgtgagcagggatttgggtctggcatgggcactctgcctccccgcctcaccagcaccagatgctgccagcacatccacgctggcctccacccttccaggggaaagctggactctcagtcaactcagtggttctgccgcagaagctgactggggaagaagcaggctctgagaaagtccttgtggagtggaagaacagagggctggacactgaattctgactgccatcttctggaccaggtcatcctgttttgtgtcattgtcccaagattgtagaatgccctttcccctctcatctcggggttcctgaggactgtccagtctgctgaaatgaaattcgatagtgccagagagcagattcgtggttgcagggatgggcagaggggcatgaggacacttttggggaagatagaaatggccactgtcctgacggtggtgatggttccccaggttcatgtatgacatatgaacacctgccctttgcacactgaagatgtgcaggttaccacccagcaacagacctcaccaaagctttagaacaggaactccatggccacatgcacgcatcctggggagaaaggtgtcctttccttccttctacttcaggggccctgccagagaaggcagtgcagtgtggagataggaatggaggcagccaccaactgacagctgtgtggccaggggcaagtcgctgcatggcccactggctcagtgactcagtttcctcaactgtgaaatggcagtgaagagtgcttgcgtccgagggccattgtgacaaggaaaacagatggtgtgtcccccgggatctcactgggtggaggagggagttgctgccctcgggccattcagttggtcattaagaagtggaaattggctgggtgcggtggctcacgcctgtaatcccagcactttgggaggccgaggcgggtggatcatgaggtcaggagttcgagaccagcctggccagcatggtgaaaccccatctatactaaaaatacaaaaaattgaccaggcgtggtggctcacgcctgtaatcccagcactttgggaggctgaggtgggcggatcacctcaggtcaggagttcgagaccagcctgaccaacatagagaaaccccatctctactaaaaatacaaaattagccgggcatggtgacacatgcctgtaatcccaggtacgcgggaggctgaggcaggagaattgcttgaacccgggaggtggaggttgtggtgagctgagatcacgccattgcactccagcttgggctcgaaactccatctcaaaaawawatatatatatatatattagctgggcatcacgcacctgtagtcccagctactcgggaggctgaggcaggagaactgcttgaactcagcaggtggaggttgcatgagccaagatcaagccactgcactccagcctaggtgacagaacgagaccctgtctcaaataaataaattaattaaataaaaaataatgaaaaaggaaattatatggagaaggccttacatctgggtatgtcacagttaatgcccagtgacagaagaatgtccaatattattctgagaatttctctcaggaaagggacctccaagttttgaagaagtgtgatgtagtacaatattagttaggacagcctgggcaacatattgagaccttgtctctacaaaaataaaaaattgctcaggcgtagtggcatgcgcctctagtcccagcttctggggaggctgagtgggaggattgcttgaacccaggagttrgaggcttctgtgagccgtgattgtaccactgcactctagcctgggcaatggagccagactgtgtctggaaaaaaaagaaagaaagacagagagaaagagagagagagagagagggagggagggagagagagagagagagagaaagaaaaaacagatggacagggaacaaagcggaggcatatgtggtcattttgcacaggagttgggccggaggaggcgaggctgagcagcctggggctggacaagatgtcctccctttcagtgcattctgcctgtcctcatggctgcttggagcattgagaatgaaaaacgctgcagagggaatattgctttgattgtaaaacgctgcagagggaatattgctttgattgttgctagatgtgaactgtgcccttagccagtcaggttagcctgaggtgggtgggaggatgggtttagttgctgggccacgtgcctggaaagctgtgaatatgtacccgaaggttgatcttgagaatggcttcaggaagtggttggcttttcctgtgcaaggtgtgggacacccctcttttcctgtgtgtttttttttttttttttttgagacagagtcttgctctgtcacccaggctagagtgcagtgttgtgatctcggctcattgcagcctccgcctcctgggttcaagcaattctgcctcagcctcccgagtagctgggattacaggcacctgccaccacgcctggctaatttttgtatttttagtaaagacagggtttcatcatgttggccagtctggtctcaaactcctgacctctagtgatccgcctgcctcggcctcccaaaatgctgggattacaggcgtgagccaccgcgcccggcctcctttctgcttctgagccaggactatggaggtgtctgagaggccgccgctctcccggaaaggtgggggccaggtggattgatgagacttcagcagaccctgggcttcggggagggaaggagaagtgaggggaaagaaagatgccctcatgcagaaggccttcgttgaggtctgccctggttcctccagggcgcgctctgagtcagtacagcgccaccctccacccgaagtccttgttaaggtgcactttctgactgagccactagcatggggcctgggattctgcacttctcacaagctcccaggtgatgtggatcccactggctgtgagtagccagggccttgggtagggaccgggagtagatctatggtagccccaaaccacattaacatgggtggtgaagtgaggtgttgttttttttgtttgtttgttttgttttttttttttacaaatagagggtaaaaattgtttacaaatagagggtaaaaaaacacacatagagggtaaatcagaacatccaggagtcgttgcctacgtgagggctttacaggacataacttgttcttccctgccatgtgcagctaactgacccccttccctgtcaccggcacccctaccggtatacatgtctctcatggacgcccagacacccctcccccgactaastgctcaaaggcctttgagatgaagccctcccatgtttctgtctctcctgcccccaggcagaaagggtgggcacagagttatggaagcgggtggtgtggcttgcccaggaggccacagttgggggcgtgggcagccatgctacttgccgggcctgtcacctctttgtccctgctagaattctaacatgttggtggagacattttgcagccaccaatgcagtaattaattcaggcaaaaatcatcactggatgccaaaaccattagatgtaaggtcgttggggacagaatattcacaaagtctccmaatattaccccaaattacckgtgaatcaggaagggaaactgcgtctttacagaggagagatctggcagctgccacctggaccatgtgatcaaacagcctccccaacagtggggcagcctgaccctgccagccgccagatgcagggctggggaggagacatacagcatctcctgcaaggtgctcttgtcaaaacgctcagcctgaatctcaccgcgggaatgaatcaggcaaattcagactctggcgcattctataaggactggtctcttccaagaagtcattcccattaaagtaaaaaawatatatatttttttctagattagagaggagacataataactagagacctaacaaccgaatgtaatatgtgtgcttcttgattgaatcctagattttttgtttgtttgttttgtttttgagatggagtctctctgtgtcacccaggctggagtgtgatggtgtgatctcagctcacttcaacctctgcttcctgggttcaatcaattctcctgcctcagcctcccaagtagctgggaccataggctgcaccaccacgcctcgcttttttttttttttttttttttttttgagatggagtcttgctctgtcgcccaggctggagtgcagtggcacgatctcggctcactgcaacctcctccgccacccgggttcaagtgattctcctgcctcagcctccctagtagctggaactacaggtgcaagccaccacgcccggctratttttgtatttttagtagagacggggtttcaccatattggccatgctggtctcgaactcctgaccttgtgatctgcccgcctcagcctcccaaagtgctgggattacaggcatgagccattgtgcccagcctcaaatcctagatttttaaaaaaagctataagggtgttagcgggacagctggggagatgtgaggctggcccattgtatgagtgcggaattccgtgctaagggtgttgtggttccacggagaatgggactgatggcatcttgctttcaaatgcttctgcacatgtgtgtgtagaaaccccgagagcaggtgtggggaatctgcagatgttcccacatgcttgtgggcggacaattttcaaaatcccgagctggggaaacatgaatggggactttgctgggtcactgagtgggtgaatgtagtgagcctgcggcttctcctttctcctctgatgctctactcgttgggagatcccccgatgcctgacttggcctggaagctacagtcacaactgcttccaaggtgtcctggatactccagacggcagagctgagagccagcaggcaggtcagagctcggccccgggcagaggataacttcctgtctctgtccttccccagcttgtttcctacwctacagcagtggggtaaggggagtccgaaggtggcagcccccccacctccgtggcagccacgggggcccctggaagtgatgtggcttcacctcccatcccgcgcgttgccagtgagagtgaaaggggtcgcaggcgccgtgtgacaagcacttgggattgcgagtctcccaggccacaactgttttcttagcctctccggcctctcttctcggcttcccagagattcctgatcagcaagagggcgtcgcgccccacccggctgtgcgcctgccaccgctgggtgcaggagggtgcctggggcagagcctggaaacagagctcagcctccgacggggttggcggggcgggcgggcaggagtcctgccaatacagccaccagcgtggcggcgccgggacgagtgtggtccgccctgctcccgcagccgcagccaccccgccgccgtggcggcgcgctctttgtctgcggctccgggctcagggggcggggcgagcgcgcctggggctccgccctctccgcctagggcgccccgcttcccgcgtcccctaaggcccgccagtcccttgcccagcgggagatcgccgccccacagcgactgcccgtggggccgacttcgcgtcatgcctgcctcgcctgcccggtgttgccccctcccctgtccctgtgtcccccctcccttgcccgcatgtccccctcatgcggggaaagcggtgccagcactttccctggccttgcgaattgctcttccatcggtattcagccgcccctctgatgttcctgaaaacccaacctgctccttctctgcaaaaagctccggaaggctgtgtcgatgcaggtcgagcttccccacccggccccctcccaccttttagcaaatccagaggccccaccttcgccctcccctcccgggctccgacccagtgcattgagcagctcctcggcttccctcccgggactttctagtctctctccccaaccggctcagtgtcagggtgccccaggactctccttgggcctctcctgttcttgactacattcactccctaggtgagctcctccatctcatgcttttgctttttaaatttttatttatttatttttaaatttttattatttttgagacagggtctcagtccgttgctcaggctggagtggagtggcacaatcacggctcactgcagccttgacctcccaatgctcaggtgatcctcttgcctcagccctaccgcctgccccctacctcctccaccacttggggctacaggagcgagacaccacgcccagcttcatctcatgattctttttttgtttgagacggagtcttgctctgttgcccaggctggagtacagtggtgtgatctgggctcactgcaacctccacctcctgggttccagtggttctcctgcctcagcctcccaagtagttgggattacaggtgcctgccaccacgccctgctaatttttgtatttttcgtagagatagggtttcgccatgttggccaagctggtctcgaactcctgacctcaagtgatccgtctgtctcggcctcccaaagtgctgggactacaggcttgagccaccgtgcctggccgtcatcttatgattttaaataaagaaaaattcctagtttaattgaacagcaatggtcacatgccacccagttagctgacttgggcttgggccagacatttggagtggggcactggagatgtccacatgcctcgggaagttcaagctagagataaaaaccttccatttcctgccctgggcctaatccctgagtccttccttcctcggtcttcctcactgctgtgaggatacccctggtccttgtggtcctgtgtggcaattttatgttttcttgtggtaagatacgcataacataacatttaccactagtgacttttagtctattctcaatgttgtgcagccgtggccactgtctagttccagaacaggttcatcgccccaaaagggacctcatatccctcagcagtgactccccaggccccccttcctccaggtcctggcaaccattcgtctgctttctgtctgcctctttgccttggctagactgtgctcatgcagtcgtgtgtgccggtcgttcattctttttatgtcgggatgggtgtaccatgttgtgctcgctcatccattcatccactggtggacacgggttgcctccgagtcttggttactatggatactctgctgtgagcatttgagtataagttttctttgcatgcctgttctcaactatggatactctgctgtgagcatttgagtgtaagttttctttgcacgcctgttctcagttctttggggattgctgggtcatgtacataagctacacctaaccttgtgaggagccaccagactgcttccctggctgcactattttacatgcccagcagcaaggcgtgaggctccagggtccccgcgtcctctccaatactcgtgcttcctttcactgattccagcctcctcgtggtgtgcggcggtatctcactgtggtttgggtgtgtgtttcctctgtgcgtactggccggtgctgacgcgtcttttcctgcgcttattcgatgtcttcttcaagccctcactgtcccttgcccccagcccaacagcaggtcctggcagcctacctctaaaacccaagctgactctgaccacatcccaccacctctactgccacccctggggtcatgccaccatcatctgtggtctggaccactgccgttgcctgctggtctggcccttacagtctgttctcctgggagctcccttcgctacaaggaaggaagcatggctggtttcttgtcatcatttaggtctcagctcaagtgtcaccgacccagagaggctgtcctgaccactctacccacccaggcagctttgtctctgtcccctcccaccttccaaccaagccccttggggagcggaacgggatggggggtgtgttctggatccaccgtctctcccttcagctccttggcactcctttcctatggggcaccctgtccagggcaggtggggcaggattcccccctcttccctcatctcccgtgcttcccgggcccaccccccagcatctccagcctgcccgggagtcacatgtcctcggcccacagaatccccagcacacgccccacccacaggcctagccccagccctggggtccctggcaccccacctgccagggcccctcccctgccttgctcaccccccaacacacctgattgttggaaaggtcttcccatgcccaccacgaccccctcccactcatctgtgggcgggagagcttggtccctgccgcacgttgcccccctagcatccaggcccaccaccgagcccccgacaggcctgggagccccactggtgggtggggacccaccagctgggggtcttgctcacaccgaggggctgggggtggcggtggctttctcagggcaccctgccttgggctgcaggccgctgggtgggcaccggctccctcggaaggcagcgcaacccgggatcctgccggccctggcccccaccctgccgaccgggcctggggcgatcagtgccccagctcctgtcctcttctgctcagatgctgggttgggagatcaggggccacagctcggccactcagagccctttccgcaagtcttagagggaccagctgtggggtgtgtgcagaggggctgcgctgtggggagggcgcatggctcagtcctcctggcctgaggcccgcctagcctaagtggcctccaggacccatggccaggcccttctgcagccttccagaaagaaccagcttcccagggttccctggggaaggcctggggccacctcctctggaggggtggggcctgtgcttcattcctccttccccaggtccccttccaggccgccaggtcccctccccgacctggagcccacagccttgtaattaaattgtaaacgtccttgtaattaaattcatgtaatatccattattattattactgttttagactaaattacttagagcacattgactggatcaaaggctaccatgaacgttttcaagggtttttatagttattgacaaattcttctccagaaatttgaccactttacactctggggtaagattcagactaagtgtgtctagaaagggtgatggggtcggctgggaggaggaactgggcttgcaggggacctggggcagtgagtgctctcagtgtgcaaaggggaactgggctgtcccaagcaggatgtgagggccacttgggccacattcaggcagaggggccctgctaaggcttgagtcccctgttcagagcagggaccatggtggaaattaaggacgttcatgtcaactgtggttgagattggagctgcagtcctagagtcagccctcttgggcccatcttggcagcaaatcaggaaggaagtagatctgtgtgctgaagagtcgccatggggcacgtcaagcccctggctgagccgtggtgtgctcacaggctgctgcactccccggggcagcggagtgccagggacttgtattttcatctttgtgctcctccgcctcctcagtgtggcgctctgagcacttcgattatttgaaaggaaatgcgaaaatttgtacaaaatctattgtgctagcacgtgatggaggaggggtctttgtgaacaggctttgagggtttgcttggctcacagctcactacccagtcaacagggttgactgccacggggtgacctcgctaaggtgaagcatgatgcccagcacgtggtcaggatggcacgggagcactggagaagatgagagtcgctgggaacctgggcgaggggggacaaggggcatttgagtgggcttcaggtacgtgaagtgttgcaagataaagtgggtttcttctggattgttccaaaggagggaggttgctctcaatgaaggaaacattcaatagtgagagttttccgataatgagctcagtcaacaatccccactctccccatactagagaagcaaagtggatttcttctggattgttccaaaggagagaagtttgcacttgatgaaggagacttttttttggggggggggtggggggtggatggagtctgactctgttgcccaggctggagtgcagtggtgcaatctcagctcactgcagcctccacctcccaggttcaagtgattctcctgcctcagcctctcaagtagctgagattacaggcgtgcaccaccatgcccggctaagttttgtatttttagttgagacggggtttcactgtgttggccaggctggtctcgaactcctgacctcaggtgatctgcctgccttggcctcccaaagtgctgggattacaggcgtgagcctccgtgctgggcaatttttgtatttttagtagagtccgggtacatcagactcaggggctgggtcatgcctgtaatctcaacacttttggggggactaagcagatggcttgagcccaggagttcgagactagcctgggcaacatggtgaaaccccatctcttattattattattttttaaaaggtagatcagataaattacaggtccttaatatatattcaacaaattacagaaatatataaaattttaattcagccaagaaacatattaaagttttatcttcagcaaactgttaggagttgggatggaagtagaactcagggtgaagccctcttggggtttgttgtctaatgaaagggaggtaattagacaatcacacataaaaggctgagctccrgcctgggtatcttgaggcctcctggacttgctgtagcatctggagaagtatggggcatcatctcgcatcacttagcaccagcactgccacccagccttgatgtgggtcctgttggcctgagcgtttttccttgaagaaggtattaaaagcagattgaagccgcctgtgcccacccatcccctacgcacttcatctgctcgcctctctgccgtgttttccaccaagtacatactacgaatgagcctccattatgtgcgcctccattaactgcacatgcggaataccaggaattgtttgttcgactgctggcagacctttgggctgtccctggtgtttggccactgtggccttcatgcccacatcctcctggtcctcctggtggtggttctgaagggcatctcctctcatctcatggctccaagtgcttgctagtgggtcccctttgccctgagcacctgttgatatcctttgcccatgttcttcttgagttgtttgtgtctgtgttttcttgttgttttgtaggaattctttgcatattctggaaaacccattatgaggtccatgcattgtaaggctctcctctgagcccgcctttttactgtgtttagggtgtcttttgtcgtctagaagttttacatctcttccattattgcttccccatttgaaatattgagaatttcgtctctatcccacaccataaagatattgttctcttgttttgctttgtccctgtaggtctttgatccaattggaattgcttggccagggcttggactaggtcttctgtcttggtggggcgagctcccagggtgtggaaacgtttgcaggtggggcaggagggagagtctggtgggaagcaagcctggggttggccatgttgagtgtttgtgccttttagagactggagtggtcgagtaggcaatccgagggttggggcattacaggggtggctttaccagtgtgctacctcaggatggttgggggtggggcggggaggcaaggctctgagcaggactggaagagctgctgtcatcagaagggccacagtgtggctccttaccatgtgcctggccctatacctctttgctcatggccccatattttcccaccttgttggtagcccttagcccttccccagaggggagctcatttcttccttgggggtccagcatgaccgatgaggaggagagagagagagagcgagaaggcttcaggagcccgtggcttccacccaaatacctgcctggctgtcacaggcgatcactctggttgctgctgatccgaggtgctgaggctgtgcccacgcccatccccctcttgacatcccagcctccgccagcccgcccagcaagcgctcctcagtttccatagcaacactgctgctcggtaatgattccgggtagaaaggcattcgtgcgttctctgtcatctctgtcacctgagcatcccactgcctgcttgctgtcctgccccgggagttcaggaagaaaccctgaggacagctccgagcccttctgcttgtgtgttggcttctcctcaagggcagtggtaaggtggtaaatgttcccagacaaaaagccctgatttggagcatttgccgatttccctggtgtaaatgctgccactatagccgatttcaagccaccactgcgatgtcactgaacttggagttgggggaatgcacacatagtatttccatctcccataccagatgtgaataaccccaaaagcacagatgacagaaaagtgtagtaagataattagacagtgatgtgttccgaggatttattgcctttgttgttaatatcattcagttacctgtacatttctacggttaaaataccaataatcgctgtgtttgacaactggcttccaaatttcccagcttcagttggctctagccactgctgctgagagtgtcgaggccattccatcatgtccctttgtctacagccttcctgaacccacactctgctgccgcccaccctcttccatcctgcctttctaactgtagcctctccaccaagcacagcatgccctgtcctgactgacattcttatggtcttccaacaaataccttcttggctgaaagctgtttcctttatagtatttgatccagaaattccacctcaagaaattttctccaccttgacaaccactggttacacaaagatttaagtatgaaaaatgtataaaatggaccccagaatgtgtctttgccacattctttataataaaaaatcaaagccacccttactgatgtgatgatgaacatgatggtccactggtgtgttggtgtggatggaccttaaggggcctgcagctgcaaaatggcacacatagaaaacagactggaaggaaacaggccgcatggccaggtgcggtggctcatgcctataatcccagcactttgggaggctgaggcaggaggattacttgaggtcaggagtttgagaccatcctggccaacatagtgaaaccccatctctactaaaaatacaaaaattatccaggcgtggtggtgggtgcctgtaatcctagctattggggaggctgaggcaggagaatcacttgaacccaggaggcagaggttgcagtgagccaagattatgccactgcacttcagcctggatgacagagcaagactctgtctaaaaaaaaaaaaacaacagctgggtgtggtggcacacacctgtagtcccagctacttgggaggctgaggcaggagaattgcttgagcccaggaggtggaggttgcagtgagccaagatcgtgccactgcaccccagcctgggcaacagagcaagactccatctcaacaaaaaaaagcccccaaaaaacaaaaaaatgaactgtgtttcttttataatcggacaaaactgattttgacaaaaagctcttttcagaatatgaaaattttggggagaagggagacatagaaaacttcaatgattatctacaaggacatagtcaaatagaaaaaaagtaatgcaggagccgctgctgaggccacaggggttccgaggacaagctgggctctcctcagatagctgtcttcccgaaaagactcgtacagcggtggttctactgtatcgcgggcactaagacaagattttgccgtcagaattgacatctctgtgagaaacccggggtgggaggtgccgccgtgagaatgcaggacagagagttcttctaaacttgctaatattcgcacaactcggaaaagcagagggctccgtgcaggcgcagccacctgcgcccatgcccagggcccttctgccctctcatctggcacaagctcccagcctgctccatccctaggcggactctgggtctcctcgccctgccctctctgtgctgactgggggctttgcttccaactgcaaaccagcctccctgggtcttttcttggccctgttccctttgccygatggaggccaggtgtcccctgctccagaagccttccccgcctcccaccgaggcgtgcatggccagccgtgtgctcccttagctgtgggtaaggtctgtccccacgctcacctgcggggcatagccatttgggcataatgctagtgtgtagcctccccaggcccagaacagcccttccayaagccgctgagcccatgaggagaccctgcacgcctgcctcgagctgcctcctcctagaagtgcttcctgctgacccttgctggccccatggcacgtgccctgaattctggtggagtctgttcagtccttcttggtccttagtcattcgtcccttctctacttgcctcccttccccaaggaggacttgaaggtcgcagcatactgtcccagggtgctgcggaagcagccttcgaccttgtgggcactscttgccccaccacctgcgctgtgcgtaatgggcttccttctgctacccttcattgtccttccttcacccctacagcatcccgcagagctgcttaggtcctacttccgccttgggccctggcccgcgatggcctcctcctccctgacccctccttctggccaccgggcagcctgtcctggctcatgaccttgactcagtgccacaaccttgctgagcttgctgacatggtttcctcatctgcaataatggcatctccctcaaggttgttgggggttaggattttgtggagacccacatcaggggtctttcccagaatgtagcacatggcacgtgcccaaaaaacagtagtggcatttttttttctttgagacggagtctcgctctgtcgcccaagctggagtacagtggtgcgatctcggctcactgcaagctccgcctcctgggttcatgccattttcctgcctcagcctcccgaggagctgggactacaggcgcccaccaccacgcccggctaattttttgtatttttagtagagatggggtttcactgtgtttagccaggatggtctcgatctcctgacctcgtgatctgcccgcctaggcctcccaaagtgctgggattacaggcgtgagccaccgcacccggcctagtggtggctttataaggaccactttcttggcacctcttttaggctactttgcagttccagggggcttcttgtacatcaaggccttttctcttgggcaagtcagttgtcactgtgaggacacaacactgtatctttaggcatcttcctacttgtcccccaacctgaccctggccctccctagtgagtagacatttgttgagagactcggctcatctgaagagtcaaggtcatcctcttgcttgatgctgaatgagcacaacacagatgctcactgagtgttggctgttatggtccagtcattgccaaggaactcaatgggatcttcatgctagctctggcctcagtgccgccctagaaagaagtgggtccggatggggagaggccaggagagctcaagcagtgtctggaggacgttgtagggcggtatcacagcctccagacccagtgcacagaggctgggtcccccagtccttggtgtgacttggtgatccccagctggccttcagtgggatgaaggctgagcagtggggcttgcctgggaacaggggcaccaaaggtagccagggctgcagacagcagattccttgcttgagtggcttggggtgctggttgtcagcccaggtcctgccagctagggcctctgccttgacctcagaggggaggagcaagcctttgagggttcttacggaggcgtgtctctgccgcaggtgaacgggaaggagctctccaagctgtctcaggagcaaactctgcaggccctgcgctcctccaaggagcccctggtgatccaggtgctgagacgcagcccccgcctccggggggacagctcctgtcacgacctgcagctggtggacagtggcactcagaccgacatcaccttcgagcatatcatggcgctgggcaagctgcgtccgcccaccccgcccatggtcatcctggagccgtacgtcctctctgagctgtgagtcgccctcaggagggccccgggccctgcctccagagaggrcaggccacctggagcggccatccgcacgccaccctctcgggcaggaagcaggcccctcggcctccagaactgaccgtggtacccaagggctccaaaacctccaggcctctagccttgggccgggctccagcaggcgccccgttgtatctacccccagggccgagggaggaccctcctgtccgggacgtcgctgccggaagtgccagggttgagggcctcagctcctcctcctccatcctctctcctctgccgcctcacaagcatcactccttgaatcttcttgcatcccttgtctgtctcattcctctacctgctctgaatttcctccatctcttcagcttctttctttggcccgaccggaagaagggcctttcatccaggcctggtggctcatgaccgcgtgagcgctgcctcattctgctaatcttagccygggctgcggggaggtaggccacagggccatgagcagccaaccttagttttggggccaggagggcagcccctggaggtagggtgggcccccctctgctctgcagaagtcctccagggcctggataactcctgggggcgttgcatgagtggggccagtgctgggcgggcggrtgggcacccggagattggagaagttggtccctgccagctggcgtggttggaggagttctggtctgggggacgggaacgctagaggcatgcgcaggtcctctgcgtggacgctgcacactcaggtgcgagaagtgcccccggtctttgcatggctgcatgttgcccaggaaggggctctgcaggaggcaactgggccacccacccttgagagcacaagcagagcaggcctccgtgccaggcacgctgggatcggcctgcctgggagctggggctgaggtgtgagaggatggccagctggtctgacccccaccttctcctgggcagccccccaatcagccatgagtattatgacccggcggagtttatggagggcggcccgcaggaggcagaccgcttggatgagctggagtatgaggtgagccgggtggccaggccagggcccgcagccagctgcgggagccgccccgacgcctgtgtgccttcctgcccaggcccaaccccgtggccctcctggcacgcatctggctgagtcagggagggtgcgggtgaggttacgtgttccgtccatgtcggtgagtccacgtcccatgcacgtctgtcttctgtgtcctgtgcctgtgtgtgcctcgtgcatttcctgggagggagaccactgagtacgtgcgccacgtgggatggtaagagagaccctcaaagcggggcctggaaactgagctcagggggctccagaggaagctgaggggctgcgggctgaggggttgcgggctgaggggctgggctgtgctgcctgctccctcactcacgcatttctggggctttctacctctgcttcctcccggacccctcgtggcaggaggtggagctgtataaaagcagccaccgggacaagctgggcctgatggtttgctaccgcacggacgacgaggaggacctgggcatttatgtcggagaggtatgcagacgggtatgccccagccccgaggcccatccacatggcctgcctgtggctcagaggctgcccttaaggtcccagctaccagaracagggcatcacagctagggtgctgcgtggtgaggcgatgatggtcgacggcttcagccactgtccagtgaggtagtcatctgcagaaagaggcctgtgcctgggtgggacagcagatgggcctgagaactagcaacagggttgctgtctagccttctcccgaacccatcttgggcagatgtcttgtgtatccccaggagggggatggcccctcgctcccctccctactagtagcatcccactaaagccacccttccagatggacaatgtcctacttcccaccaatgcccggggctgaccaaaagcacaggcttccgtgcagaagagcctaggagtgcagggcaggggcggggagaggtgactactccacagcctctgcctctgcttcctggggctcagagctggaaggggagccagagagccttcagcttgctttgggggcccctgaggtgagcctgcccccttctaccgaaagggcatgttaggcaccaagtccccaagatgcgtgtgtcctgcaggtaaatcccaacagcattgcagccaaagacggccggatccgtgagggagaccgcatcatccaggtgagcacttgcaggctgcaggcctggcccaaggccccgctgtgcccgtcggcccagccacctctctttagccagtccctagctctctcccactaagagctaaccctgaggcccagcagcctgccgtgtcctaaacccgggctgagtctcatctctctcctgcccactcaccccrgtggctcccgtgtgcctatgggatctgctggcatccagggcccctgctgctctgaaacctcctggcccctctccctctgccccactccatgctctcctgagcacacatttgctcttgcaagagtcaggccgccctctccctggtaccttccacttagttacatcctcccagagctcaagccccagcctagcccagccgagcccagagtgcttgggctccctgcaccygcccagggtccgccccagggccagccctagcatgcttgttgattgtatcctgcctgcctcagattaacggtgtagacgtccagaaccgggaagaggcggtggccatcctgagccaggaagagaayaccaacatctccctgctggtggcccgacctgagagtcaggtgtgtatgcctggcagggcgacccggggccacgacatcaggctttctgtcttggaagctgctggccgtgactagggcacagatgtgccaacgacctggagttgatggagggcgggtgggcaggggtctctcagggcccgtttcccctcctggcctctgaaggctgagggggctgggacgctgcccccaggttgctgagcttcaccgaaacaagccaagtgcggggtccagagcagacaagaagggtatatggggaggtccttgaagctgtggggacaccagggcctgtctccacagctggcgaaaaggtggaaggacagcgaccgggatgacttcctggatgactttggctctgagaatgagggggagctgcgtgctcgtaaactgaaatcaccccctgcccagcaggtgaggaaggaaaagggcgctggtggggagggcgaggaggagagaactgggtggaaggcgctgaggctgtgcagggtctcccaatgcttggcagggaaatgaaccaggcctgaagccccttccgatcctcctgtgacatcccgtgacatccctgtccgtggkacctaactgagcggtacttacctttctgctctagcccggaaacgaagaggagaagggggctcccgatgccggcccaggcctgagcaacagccaggagctggacagcggggtgggccggactgacgagagcacccggaacgaagagagctctgagcacgacctgctgggggacgaacccccgagctccaccaacaccccgggaagcctgcgcaagtttggcctgcaaggggacgccctgcagagccgggacttccatttcagcatggactctctgctggccgagggggcggggctgggagggggcgacgtcccgggcctcacggatgaggagtatgagcgctaccgtgagctcctggagatcaagtgccacctggagaacggcaaccagctgggcctcctctttccccgggcctccggaggcaacagcgccctggacgtcaaccgcaacgagagcctgggccacgagatggccatgctggaggaggagctaaggcacctggaattcaagtgccgcaacatactgcgggcgcagaagatgcagcagctgcgtgagcgctgcatgaaggcctggctgctggaggaggagagcctctacgacctggcggccagcgagcccaagaagcacgagctgtccgacatctccgagctgcccgagaagtcggacaaggacagcaccagcgcctacaacactggggagagctgccgcagcaccccgctgcttgtggagcccctgcccgagagccccctgcggcgggccatggccggcaactccaacttgaaccggacccctcccggccccgctgttgccacccccgccaaggcagctcctccaccggggagccccgccaagttccggtccctctcccgggatcctgaggccggccggaggcagcacgcggaggagcgcggccgccgcaaccccaagacggggttgaccctggagcgtgtgggccctgaaagcagcccttacctctcgcggcgccaccgcggccagggccaggagggcgagcactaccacagctgcgtgcagctggccccgacgcgaggcctggaggagctgggccacggccccctgagcttggccggtggccctcgggtgggcggggtggcggccgcggccactgaagcaccgcgcatggagtggaaagtgaaggtgcgcagcgacggaacccgctacgtggccaagcggcccgtgcgagatcggctgctgaaagcccgtgccctgaagatccgggaggagcgcagcggtatgacgaccgacgacgacgcggtgagcgagatgaagatgggccgctactggagcaaggaggagcggaagcagcacctgatccgggcccgtgagcagcggaagcggcgcgagttcatgatgcagagccggctggagtgcctgcgggagcagcagaatggcgacagcaagcccgagctcaacatcattgccctgagccaccgcaaaaccatgaagaagcggaacaagaagatcctggacaactggatcaccatccaggagatgctggcccacggcgcgcgctccgccgatggcaagcgggtctacaaccctcttctctcagtcaccaccgtgtgagctgcccgggcgggtacacggcccaggcccagggaaccccctggggccccggccctcactctcctatagagattgtgtgtgtgtgtgtgtgcgcgcgcgcgtgctckctgtgcgcacgcacacatctcgtctgggtgtgcgcacagggctttgttagcagagagaagcccctgaggagaagggacgcttttcttccttctgcccaagtaaagtgaccatgccagtggccagcactgggggcacacctgtgatgggcaccccttcagctgtgcgtgtgcattccccatcccccatgctcttgcgtgtgcttgcacgtgcacgcacacacacacccagtgctctctccacccgacccgtgtacttgcagacagggaagctgagctgaaaggagcacaagagagtgtccggcttcgctgctgagcgcggcctctccccgccgctgcgcactgcagttatttgtagacaaaggcacccctgatttttgtggtttttctccctttctgtgcttgccaatagttgttttgttttgtggacctgccctgggggctggcagctccttcaggcagcctggcagaagtggaactcccctctccactgatggctgggaagggagttggggaggaagagtgggagggagggctggggatggatgggagggaaggggagggaaaggtgggaggaatgggaagcagctgttctggtggcttccactctgaggtgtgggaacggggagcctctggggggcacctgtttccccagtgactcagagagagcaagactgcaggaacggaggggtcctgcagggtgtccaccaagaagtcacagagcccgttctgcgccccacaccatctggagcaggggcttctcttctgagtgaactgaggaaggtgcttagatggtgagggctctagaaaccaagccccatgagcagcagtggaagacctcgggccatgcggcctggggaggacttggtggcgatccgcaacctggaccccagtgagaggcggtgggctgactgggaaggagaggcccccaacctcctcaggatttgcacgtgtgaactasgctgcctgtggggtgccccttaggcttggagagccccagattggaggcagacagactgcaccaccccttccccccctgcatctcaagaataaagcaagctgcctttgtacttggttgaatcgtggcctccctgtgttcattcttattgggctggggaaagagttgtcagtttggggtgggagaaggaagaggggggcagggttagggtcaactgaaagccacgctgcagccctcggtttgtcttggatgtcaggagcagtgactgtgacctcccatggacaattgtgtggcactccaggagatataccagagtcgcctgagtcatttcagaggtgtcacagtcacagggtggtgaccagatgcagaaggctggcagaagcctgacttcagactagcctccaggcaagggccacggtcatctccatgggccaaaccgtaggtggggcccgctgctggcacatgccacagagaagtgggttccagccccatccctcccagcagggcctgatgccgtccactctggaaggcggaagctgccctccccatttggtgatcccacagtgcctakcaaggtgctcagtttgcagaaggcacctagtggatgtcttggccagatagatgaataaccgcgtcgttgccagggcccttccatcctgggagctctcagcaaaccttcgggctctatcaagtcctaggagccatgctcaatgctgggcagggtcagggcctcaaagacaactccgcagaaaacatgggcacagcctctcatgggagtggcactccctggagtgggcagtgctgccatgaaggagcggaagtggtcaaggaggcattcaaattctccagaaagaagacaatataggccaggtgcggtggctcacgcctgtaatcccagcactttgggaggccgaggtgggtgcatcacatgaggtcaggagttcgagagcagcctggccaacatggagaaaccccgtctctactaaaaatacaaaaattagccgggcgtggtggcaggtgcctgtgatcccagctactcaggaggctgaggcaggagaatcacttgaacccgggaggtggaggttgcagtgagtcaagatcatgccactgccctccagcctcggcgacagagtgagaccccygtctcaaaaaaaattttttttcgtttaaacttctcttaagtgccgagatckgggcagcaagtcagtgacggattagacgctaagaaggctgtggggggaaaaagtcccagtgcctgttcccagaagcctggagtcccgctgcagggaaggctggatcacaagggtgccagctgcctctctgccgcacagcagctctgggagggaaagcctggcatatcacaccccaccagcagggaagaggggaagaggcttgctggctggatggcaggaaggggagcagagggcagaggctggagataatggcttcccccacccctcagggcctcacccccatgagggcttggcacatccaacccttgaccagctccctaaccctgtcccttgggggaacaaggctccaagggcccagccacagggaattggccggagttgactggagatggaggtcaaactgtccccttggcctccctctagctgctggggggctcacttggatggtcctaaaggcacccccyttcttccaatggtggggtgccctccagtgttcacgggatgtgggctcatatgggcctggagcctggagtcccttggctggctcagggagaggtggcgccaggaaggctggcagcacttggctactgatgccctggaatagcaacttcacgtctgggtcccacggccatcaggcttcgtggtggagccagaactaaaaagagcaaccgggcgcccgacagtcgccccggtgcctgctgcacccggcctgccccagccacccgccctgcacaggctgctgagtctcctctggaatctagaaactgcatctgctggcaaagctggtgtggcccctcagccccaacgctcctgctgcactgtcctggggtgagcgcccagctcttcctagaagcccacctattcttggcagccggcccctcccaacccccctcccaaggcctgggggtgggaagagggctccctgcttatatagatgaccccctccccgagactctgacagacccaggtcacaggcagtcctcacctgctcctgacacccccggcccctcagtgctgctctctctagccaccgagctgaagtactgaggagcccctacctcccaggcaagttttgggccttccctccttttcagccttggctgagcgcggtggctcatgcctataatcccagaacttygggaggccgagatggatggatcacctgaggtcaggagttcgagaccagcctggccaacatagtgaaaccccgtctctaccaacaatacraaacattagccgggtgtggtggcaggtgcctgtaatcccagctactcgggaggctgaggcaggagaattgtttgaacctgggaggtggaggttgcagtgagctgagattgcgccattgcactccagcctgggcaacaagagcgaaactctgtctcaaaaacaaacaaacaagaaaaaggcagcctctctggagaattccatttctctccagtaacagccaatgggtgacccagatgtcaggactttggtggctggtcccagtggactccctgacaccttggagtaggcactgtcactgcctcgcagctgagcaaaccgacttgggtcccatggctgggaagggctcacctgggatttccacccagtccctttggactccaagaccctcactgcctcatgggccctcagtgccactaaggaataccattagctggtcaggagccagcatgtgccaagctgaaaatcaggctgatgggagaggtgcaggatgaactccaggcgtggtgccaggccgggatgcctgcctggtgtcctgagggcgcgggtgctcttgggagaggtgtctctaggaggaagtgatgtacccctcacaggtggggttttgtttttttcttgagacaaggtctcacactctgtcacccgggctggagcacactgctgtgatcacgactcactgtatccttgacctctccaggtcaagtagctgaactacaggcgcatgccaccacacccagctaatttttctattttttctgtagagacagggtctcaccatgttgcccaggttggtctcagactcctgacttcaggtgatcctctaacctcggcctcccaaagygtggggattacaggtgtgtgccaccacacctggccatgggtgtgtattttctcaatatcccatgaaggcacagcacacgggaagccaggtggcatggtcagggtgtggagtatggaggggccaagcccagacagctgcacgccgcatgggcagggtgggggcacttgctgtgcccgaaagcagtgcagggaaacccctctgcgtgcggaatgggcccggggcttccaacacaggagctgtgatgaagaccaggctggctgtttccccatggagcctgtggggccacctggggaggaggtggccaagcccactgccctcaccagaaccaggagagagtcactgggaaggtggatacagggttttgtggggaccagacggggggcttcattgggaggagggacgggagttctagaccaaagcccacccctttcctgcctggtgcctctgctggccaggcagacaagaggacgctgggcccccagctctcccagtcgggggaaggcacaataacgcaagccagcagccccaggtcctgtgcagtcccaggtcctgtgatgtttattgaaggaagcaagggcagggctggggtgccsccctcaggcctggatgtggctcttcgcactgaaggccaagtagtaratcacaaggccgatcgccgcagccagcacctcagtggacacccagggcccgttccaagtgccctgaaaaaaaggagatcacaagccagctcaggggagtacaggtgagcagaccagccagccctggtcaccttccgccaggggaaccaagacatgctggccaatcacggcccagcagcagagctggggctgtggagaggataaccttcactcagcccaacaaccccaaaaaggaggagggaccaggccactcacccgatggtccacgctgactgtaaacagaggcgggatgatggaaatgtcctcgttattcctctgagcctgcaagggaggtgcaagggaggtgctggggtcaggggtgcctggcgtgtgggggtggggaggggaggggaaagacaggtaggaacaccggcccaagccccagaaaaggaaaggagagaaatgggcaagagacactgaggaagggacaggatcacagaaaggccacccagctcaggacttgctgccagcacctcccaacccagcccatcctgctccccagggacaggggagcacagtgggctacaggagtcctcaccttcctgaggaggctgtaggactcctcgtcgaagaatctaacctcataggtgcctgcgtgggcgctcttgtggtccaggctccaggacacctgggttgggtgttgagcagagtgtgggcagagtggacacggaggggccaccctgaccaccagtgccgacactgcagcactccggcagccagagcccacggcccctggccctggttgaccggccacccctggggcttcaggtcacacccgggagcagggagccccctagcaagggaaccattggcccctcacctgataacgccccacatcctggcctcgagtgacagggaattgttttccaccgacgtcagcatagagagccatgttctgggtgagggaacaaaggcagrgtcaccttctgccccctctgggtgtgggcagaggagccctgtgcgctgctcacacggcctgcaggtgggcaggctaggcccagttgggrgctgcagtgtccctggcaggaggtaccaggtaacactcaccaatcccgtgactggccctctgcattggtcttccctacgggggcacaaggccagatccccatggccgggcctaactggacgcataggaacccygttgactgtgagcaggggcgggatgatcaaaagggctgagtgatttcctgagtctacaagggaggtgctggggtcaggggtgcccagtgggctgcccaaggggtgctttaccctaagagggccatacccaaaaaaggccccatttccttctttggacttatgggaacttagctgggcatggtggcgagcacctgtcatcccagctacttaggagactgagaggagaatcgcttgaacccgggaggtggaggctgcagtgagccaagatcgtgccaatgcactccagctgaggcaacagagtgagaccctatctcaaaaaaacaaacaaaaaacaaaaacaaaaacaaaacacccacacagacaaactggccaatggcaaccggggtgggctgactcctggccctttctcccggtccagatactcattcaggaaacagcgggtggtgagcccagggttacctcgtgtaggcacagcacacaaagcaggtgaggaaggtgacctgtcaacactggctaggatctggcatcaccgtgccctgatctctccggcaccccaagagttggaatcttgattctccctctatcgacacaggtcccccatcaactagcagtgaggagcaccccccacccgccctcctgtctgaaaccccactgtctcacctggaccctgttcttgcatgtcagggagatctccacaatgaagacggtctcagtggaaatgacagcgtcagaagtggtgtagtaggaaggggtgatctggggctccaggcaggcctcggctgcggggaagagggagagatgcctgggtaaggccagctcgagtatcccggtctgagggcaggatggcccggccctgcctcatagcacggatcagctggggacccatgcgctcytcctgccccttccaggtgggatatgcgagacagatccaagtgctcggtcacaaatgcaatggcaacgtaggcgggatggctgtgaaggaaggctggggaggggcaaggccggctttctggaggtgtgcaggaagagcgaactggggacaggtgggggctggattcactggacaatacatgccaacacttggacctatgacacggaggcccgggggccasgccagcctcaattcagagccacaaacggcctggacgagttactgaaggcatcctcagcagagacatcgggggtgggggctgcaggcaggcaatgcactggggctttcaagatgagagaaagggtctctgcccccsgccagttgacagaaggtgaagactggccccagcgtttcctgaagaagtaaacgggagagactctggttccagaagcacaacttgttagctgtgagagaaaggaccttgccttagccttctccataaccagaggcccaaaggaaaggaaggctgccgcctacatcagagggtgtgaaacaaaggctccccaaagtgggaatgttctcagccacccgctgtccaaatgtggtgccctggcagaacgatggcttcagcagaggacgtcagagaaggctctgggtctggaccacaggaggcagatccctaggaacagcgtggaggcagttctcaggggctagatcccgccagcccttctgtgtcctgcctaagttgggcctgcttcctgtggcgcaggggagcccccgaagggttttatggccaggcttgtcctctggatacgtccctgactatagttcagggaattcctgaggggcagatgaggagtgtgcggaaagggaggccagttaggctgccaaaacgttgcaggcagcaaggctactggcctgaaggacggcagaaaagggaatgtggagaaagccgcccctgtccagtcctggcccccgggcccggggctggctgctgcagccacctcctaaacacactctggagttcagacctcagcccctcacgaatgcaaatcgacgggacccctggtcggctctgccgaaaactctggtaagggtaaggcagggccctccggaaaagccagtcttcggcctggcactcaaggccctgcgcacctttggctccccatctaactcgccccgctcttgctccctctcctcactgaggtcccttcctagcttatgtggctcctccagccccgtttttggccgcgatcgctcagcgctacagagcttcgctccggtccgaccccgcagggagcgggagccgggacatgtgtcacgttccgtgctgcagcttgggggccgggcgcaccatggaggctcggggactcctcttcgtatgggcagacaaggaaaagcctggctgccggtaaacgtgcgcgaggtgctttggtccccccgtcccaaggccgcctgcctctcgggggaaggcccggcccgcagcgacggaccctgaaaggccggacccccgcatccctcctgcccccaacaccacctgccgtgggtcagaggctcgcaagaaagaagccccggctgggccgctacctgagcagcgggagaggctggacagcaggagcagcgccagggcgccgagagatgccatcgccgccatcgcctcttctctgcctagaggaaaagaaaacgagctcccatgaacacgagrggcaaacgaggaagagcgacgcgtaagtggcagcggcagccaatcgcgcaccgaacggctgggccggcattgtgacgtctctggcagcactgacgtggcccctccctgagccaggggcccagctggtcgcggtccccccctcaacatggcggcagcggtgctctaggcgccggaagggggcgtgaatcggtgcgaccgcgcgcgtgcgcagtaccgggtccgcgcctgtccccgaaacttcgcaccccgtcgaactctcgcgagagcggtatctgcgtgtcgggacgtgcggaggctctcactttccgtcatggcgctgaaggtagcgaccgtcgccggcagcgccgcgaaggcggtgctcgggccagcccttctctgccgtccctgggaggtgagcagggaaagagccacgggaccgcggcagcggtcgcaggggagcggtggggtagccgcacccgaagcagtctggagtccgattggctaggggccccaccaggggcggggaaagggcttcgcgccggggttgattggccgcytccgctgtcactgaggggattggccgaagttggccctggaccggctcccccagggggtctgcatcgggtggcggggggccctccggacgggccgggagagtgggccacggcggctgtcacctccttagtgtccttgaaggagcccttctgaggcagtcactcacgtatcccggcccgcctttctcaaaccgcttcgggaatccggttccgggactcaaatttctccacggtttcctctctcgtggaccgctttgccacctatcccggtggcaaagaaccggactttgccagtcatcccccatagtcccscagtcttagagccccagatgccttcccctcgaggcgcctggaatgggaaggagctagggtttctgaggctgcgggggttttgcttctgctcttctccgtgtgcggtcttgcgtattcaggtccgagtcttctttccttacacttatttaagaagaggttaatttaggtcctaggtgggctggaaaccatctgaagcagctgccagccagcacctggccctgatgggtaagaggtttgacctctaggccatgctcccacactgagccactgcgtggccttaggccatttcctcctctctctgggttctagtttcccctttggaacccagaggggaggagacttcatgttctcaaaggatcctgtcaactctgaccttccagaactccgtgactttgcggccactccccagggacatctctacttgccatgttttctccttctgacctctgggggagactgcttgtgcctaatgaaattctcttgacgatgctgacttctcccaccttgctgctgaaaggacggcagtatatagtggctttccagaggctctgatggctccagcaactgggctcctgtaggctcttggtgaagacatgtgtgcctcctccctgacctcccctgtgtgtgtgcctgtgtgtgcgttggggtgggagtaggggacagtgaacggtgggtagctgggcagtgccttgccctgagactgaccgtcctgggtgtgagaacccttacagaggaaccccasgtcttgaatcccactgatttggacgccataggaaaacatrcakccaccattgacacatggtccaacagaaatatgccaaagacagaagcctcagcaggcataagatgtggggtgtggatgttctttctttcyatggaaccatgaaagggtgatgggagagcgggaggcgtgtacatattgcatcctgcctcacacttggctcctttgattggtggcttcacagggaagtcagggcacaaggcagagcctttgcgayctcctgaaggaaggtgcctgcatctgtacagtaaggtcagggaagtccatctggagcgctctctgggtcttttgccaaagcccaaaggaacacctggcacagggaccgggtggcagagaggttcagctcagccctggtggtgatgttgccatctgtgagggaggtccatgctctcaggagattggcttgctgccacagctgaagcccaggaggaactactgctgggagctgcaggggtccacccgtgacctcccagggacaccagccttgaactctgacctgaggggccagtggggtgaaggggcaggcgtgctgtgtggcactagctactgtgagcagctcacacacctcctgtcccctaatctttccaacagtcacggaaagtaggtacctccgttctgtgaatttcagatgaggccatgaagccatctcaagaagagtggatggtggatttggaccgaggcctccctagtctccagatcttttttcattttctgatgtgcttgttcactcaggaaatgttccttatgtgccagctctgggccaggtactgtgctgggtcctagggtgacagtattggaccacactgacttggcccctcctctcgggctcaggggttgaggagggagcaatgcagtgataacctagggaagggggtaagtagggccttagggtcccagctcagtagccttagggcatcagggaaagctccctggaggaaggtccatcgaagccgctttctgcgtgcttacaagagcccccaaataagatgatttcagatgttgataagcgctagagagaagacagaaaagtcccgacccgttgataagcgctagagagaagacagaaaagtcccgaccgtgcctgtgcttgcagatccaggtgccacacagatcagctgagctatcctcggggctctggtccttgtgggcaccctctcctagcccctggcttggactgatgagtgccggccagggacacacagacagggagaggtcagactccgcccgagcctttctggacttctagctggaaggcatggctctttggccaatggctatgatgcttctgccattggctggaacactttgctgctgcctggtggtcaagtggcagggcatccccaagtgacagggaagaccttggctctgccaccgtctcaggtgtgttctaggtggggcttcttccaggacagcaggtcacttggcacctggcacatttggctcaggcagctttggctctgaagctgtccggcatttccagtcagggcgttggggacattcggcatccagcagtcctttccgaaggccttcctagagttgggtttctgttatcaaccttccagaaatggctggatgtccctacacatttgttttcgatttctaatgccgaagggccattccccagggggccagcagtgcttgtctcagggaggccggaggctgggtgctaccttcttatctccctattctgctttttctgtagcgaccacatgctgcttttgtaataagaaaaagtgatcggcgaagtgataacgtgactgttgtcatggatctgtggtttgttgtaatgatttccctgctgtaccagggttagtttgccagtttttgcatgttacaaacatcgctgagcgggaataactggccaaaaaaataatcagaagcaaaaaagaggagggagggcagggacacgccttttaagaaattttctgaagagyggaaggaggcaggaggctggagcgccttctactttccaggtgctccagcgggccggccctggggactgaggctttggagctaattatctattgtgcccctggcagtgggccatgctgcacagacaggggacctgcctgggcacagtggggacrgtccgtttttccttccaacttggctttctgggttagacatcaaaccaaccgctggcatttggyctctgccaggttctaggcgcccacgaggtcccctcgaggaacatcttttcagtaagtacctgcccgtgcccacgcatgtgtctttctccatgtggccgcaattgtgcgcgtgtgtgcacggcctgtgtcctgtcctctgagacrtggtctccaggggctacccacccctcttctgggagttgtactagccagcatccccctgggaaaaggtcccactttcctggtcacggccttgctcttggaaccttggctgattgtgtcttcttcctttctcatcctttctaggaacaaacaattgtgagtattcttctctgcctgttaggtttggggggctcttagttgctttggggttaactaaattccaggtgggggtgggctgctgctgacccaggagccctggatgagcagccctgtctgggacggggctgccccaagttggcaccttgtgacggggcagcctgtggggtcagcgccagtgggaagaagggaattggcttgagcccatgggggccgagctgggggcatgtgggatccccgaaggcccaccttcaccctctgcctcccacagcctccgtccgctaagtatggcgggcggcacacggtgaccatgatcccaggggatggcatcgggccagagctcatgctgcatgtcaagtccgtcttcaggtatggagctcctgggtccccgccttgtcctcagccaggggrccctgaggactttgtgccaagaggggcattgcgcccagaagcactcggtgaggccatggcaagacgacctgtaagcccaggccttgcgtcccatggcctgtgatcccrccagactggcctgggctcggggaaggtggcaccagtcctgccacagtgtgcattgtggagttcaagcgtgtccccatcagtcagtgaaggtgggcccagtcccttctcagtcagagccaggtcagggcaggtagcaacaggagagaggtagcctgggcaggcttcctggaggaggtgcgggggggtctgggccagcctccctgaccctgccgtgcctcaggcacgcatgtgtaccagtggactttgaagaggtgcacgtgagttccaatgctgatgaagaggacattcgcaatgccatcatggccatccgccggaaccgcgtggccctgaagggtgagctccagggccaggggccaggatggggccctaggtgtgatttctttcttgctttcttccttcgtttcttgcttacttgctcgcttgcttgctttcttgcttgctttcctgctttcttgcttgcttgcttttttgctttcttgctttctttcttgcgttctttctgagatggggtctcgctctgtcgcccaggctagagtgcagcggtgtgatctcggctcagtgcaacctctgccttccagtttcaagcgattctcctgcctcagcctcccgagtagctgagattacaggcgcccgccaccacgcccagctgatttttgtattttcagtagagagtgggtttcaccatgttggccaggctggtcttgaactcctgacctcgtgatctgcccgcctcagcctctcaaagtgttgggattacaggcgtgagccgtcgtgcccagcccctgtgatttcttttacctccctctgagctgactcttgtggggccccacggctctgatttcagggcttgtctggctagagaggaccctcgtgcttggagactgggtggacgcctcctcgggcctgtttgcgctgcgatgctgggattcgagtgagagcagctgtgtgtgagcctgtccagtgacgggctccctgatgggttccctcccacccctccttccctcctgagacagtcctctctgctggggtcagctttgaccctcagcatctttcttcacaaaccaggtatcacagagatgcagttccgaccctctgcctggctcctcggctgcagccagcctggaggtggatggcacagcccaggcagggattcttggggcttcacttgaggtccttaaactacttccattgctcattttgcacactcagcccattacttgcactgtgtgaggagcgtgtgagcaaagatgaacccagggggagccccaggccctggcagtcaagtagaggggcctttgtgccagccacaggggacccccgcsctgtgagtggagcagtctgggtggggtaccgctcaccagcaggcggcctctgcttggcgccctctgactgctgtctccagcggccactggcctctgcttcccttcctccaggtgtcctgggtcgtagggtagggtccggccaatccgtggccttctccaggcagcccccgcctgcctctgagtgtggtgccttgatgcgggggcttggcagtaacaccgccaaggccaccttgctagctccagcctggccggccaacctgttagtaaagagtggtcactttctgttgctccagagcctggatggagaatggcatggctgcctggctggttgccagcctttattcatttattgacttgttcattccgtcgttcaggggttattcatggagcacctgctgcaccaggtgcccttcgagatccctgagcgtgtagcctcgtggggcttaggctggaagttgcattctagcattctagtgttcaggaaacatttttgctccccaagtcttctgaccccggcagccttcagctgccctgctgaggtggggcggggatgggcagtgccactaagcctgtgttgtgttttgtaggcaacatcgaaaccaaccataacctgccaccgtcgcacaaatctcgaaacaacatccttcggtgagatccgggtgtgcgggctgggggcttggtggggctaaggtggggtgagccagtggagtctggctccagtcagccacctgtcaggcctagcagcctctttctccrtcccctcccagcaccagcctggacctctatgccaacgtcatccactgtaagagccttccaggcgtggtgacccggcacaaggacatagacatcctcattgtccgggagaacacagagggcgagtacagcagcctggagcatgaggtgtgcatggggggcccgagatgagcccccccagcgtcaagattaaggggagagcttaaggaaccagggacaggtgtacccttagagggcaggggctgtgcccgagggagaagccagaaataggcagacagggttgcttcccacggtggcccggtcgcgccagcttgtttggccagtgctgctcttcagtagcacatgggtctcttctccccatgccctcctcagagtgtggcgggagtggtggagagcctgaagatcatcaccaaggccaagtccctgcgcattgccgagtatgccttcaagctggcgcaggagagcgggcgcaagaaagtgacggccgtgcacaaggccaacatcatgtatgtcccctgacctctctgcgagcagtccagaagcagctgcagtggcctgcttgggcctgctctgagggatttgtggtccaaaagcccagctacccaccgaggtgccaccctaggcgagtgccctgttgccctcgaggccttgccagaacccacacttaggggaggtggggtgggattctgtccattttgctggtgagggacaggttagaattcagaccccagcctcctggggccctctgcacgccccgtccctcnggctgactgttncgatggccaagctggtgtcctattcctaaccccccaccaggaaactgggcgatgggcttttcctccagtgctgcagggaggtggcagcccgctaccctcagatcaccttcgagaacatgattgtggataacaccaccatgcaggtattagcctgcccagtgctgtccccctgccctgagtgccctgggcktctctcacccatgcttccgaatctgctcctcagccagccccctccttgtcccgcagctggtgtcccggccccagcagtttgatgtcatggtgatgcccaatctctatggcaacatcgtcaacaatgtctgcgcgggactggtcgggggcccaggccttgtggctggggccaactatggccatgtgtacgcggtgtttgaaacagtgagtgccggtggcagtgccgcggcttgccgcctttctcctgttcacagacttagtgaggcacactcatcccatccggttagcccgttcaaaatgcatgatttagtagttttttggatatccagggttgtactgccgtcaccaccaggtcattccagaacattttcaccaccccacgaggaaagcctgtccccataagctatctgtccccacaccttcccccaacccctggcacccgctggtgggcttttgtccctgtggagtggcttcttctggacgtgtcacaggagcagagtcactgcccggcatccttctgccctccacccactctccttcgtcttgcctcccnaggctacgaggaacaccggcaagagtatcgccaataagaacatcgccaaccccacggccaccctgctggccagctgcatgatgctggaccacctcaagtgagtggctcccagtgccccgcaagcccctggccagccctccgggccccagggactgaaggctggctgtcccatcctctaggctgcactcctatgccacctccatccgtaaggctgtcctggcatccatggacaatgagaatgtgaggttcccctcgcaccctaccctgctgccccgcccagtctccccctgcagcctcctgtagcccgcctcatgcactgaccacagcccccaggggaggatggtactggatctggccccatcttctggcccttagctggtgccacttccctcctgtggcaatcccagtcctgcacgtcacaggagacagcggggggtggcagggcctggtgtgtgccgagcctgcctgtgtcctacagatgcacactccggacatcgggggccagggcacaacatctgaagccatccaggacgtcatccgccacatccgcgtcatcaacggccgggccgtggaggcctaggctggccctaggaccttcttggtttgctccttggattccccttcccactccagcaccccagccagcctggtacgcagatcccagaataaagcaccttctccctagacttggcgtgggcctccctcactccaggcaccgatgttcagtccacactttattaagaaaggaatacacacactttctccgagagccctcacgggggtctcaggcagaacacgctctgagagccgggcctggctccagcgtctctctgccctgtggttgtggagaactggcgcccagcagggtggtgggagctgtcccgcttttcccttaaggcacggagagctggaggtggagccacagccgggcctaggggttgagccaggggtgctggaggcagtcagcggcactggcccgcttttcggggatgtactccatcatgggcagcagaaaggcgctgaactgtgtggcctgctctaggggccactcgtacttttccatgagtacctcgtacaggccccagtgcttgagattgtggatgtgccgcagctctcctgcgggcaggccagcgggcgtcaggctctgtccctgtctctggacctgccttctgcttaggccctggctcctgggacccagtgttccctctgttgcagaatccaaggtccccgtcccaccctccctgcagccacatggcctgaggctgcccgggccctcacctctccggttgaagaactcccgggaatagcggcctgagagggcgaaggctggggggatgtcccccagaagctccactatgtgagcgatgtggtctgtgggcagaaagaggaggttgggggcaggcaggccgggaggccgggaggctgagcccagagccctcaccccttaccctcatcacgactgtagtcttctccagaatgcggctcgaacaggtagtcaccagtggccagctcgaaggcctggaagggggaggaggtgaggctgctggctggtgggctgctggccctgggcacagggcagcccgggcgggcgtaccatgcaggctgtgctccagatgtctgccggggggccgtattcggcgccgatcagcacctcgacggcccggtactgccgagtctggatgtcttccgtgaagtgcttgtgctggaagcaaggggagccctggggacgggctggggccaaggctgtcctgcccccacggactcctgccccaccccgatccgcctacccgaggagctcagtggggtttgctgtgagcctcggggtccccaggtcctccaagagggacaggcccagtgatgtgaggctgaggctgatcccttcctagtggcccctgcccttggccatggccccagtgctgttgactgggcaggaccagtgcccacccagccgacggttcacgtgcactgcagactggggtagggctccccaagagcggccctgtgcctccacccttggagcagggccccccactctgctctcccacacttgctcataccacccagcaggcgttgcccaggtctgcgatcttgatcttgatcttatctgcattttggggctccagggggttcaccaggaggttcgaggcaccgaatggtgctggggaagrcagagcagggagactgaagtggtccgactactgccagccctgcctgcccaccacttgccacccaacttactgctaggcgacaggaggcccccggtctctcgctgattggacgagccggagaggatggagcaggaggcaggagagaagagggagccggagaagcctgaggtctgtgagcccgcgctgaggctacggccgcccccyggggcgggggaggaagaggctggggagggacctgctctggcgcccccrgggtgacagcctgaagaggatgtggagccgctgcccccgtctagtctcaagccagagtctggggagacggggtggaggcagctgctgagcagatgtcttgcagcctttgctgcgctccacggcccatcaccctctgtggccyctcaccctcagcctgggtggcagcctccatggcctccagcctctgcaggtcccgcagccgctcctccagcagccgcttctgctgtttccgtttgcgcctcatcttcttcctcttgtttttggacagcttaccggtctgctgtcagagccagggtcaccccagggttcctgtcgcccgccccagtcagcatgaagtggaggtttccctgcacagccgccagggaagaggcctctccgggccccagggctcccatggacaccagaatgtggcgccagcgccccttggcaccagctactcactactctccctgcctccccgcctgtggccccactccccacagctccattaggagtgggaagacctggccggcccgcctcagggtgctctctgtcccctctcagcccaagctaaggcaggcggaagtggccattcggggaagacagcatcctttcaccaagagcagtttggggcacttgaccccccccgggaattaccgtcagcccagccacccagcctttcgggattaccaccgtgggagtgcgtgaaggtggggggtggagccactgtggctccagagatggcctccagttggctcagatgggagaggaggcatgggagagaggggccccccaacttaccaagacctcctggggggcagtgctgactgggagtgcaggtggggagcggkggggggggacagggaggaacagagactcaggcaggggttcaggcccagaggccccgacccagccccatgtgggcccttggtacctatggagcgggaggggggcggcgcccctgcctgttgccactccgtggcctcggcagccaggcgcctgatgtaagcgtcccccacacacagcaagatgttctcgggcttgatgtccgtgtggatgatcttgcacttggtgtggaggtagtccaggccgtgcagcacctgcrgagagtcgcacctgacctcctccaactcccgcccaggccaggctgggcagcccagtgggtggcactcacctgcctcacgatgctcttcacgcagggcacgggcaggccctggtagttggacttgatgatccatttgaggagctggtggcccagcacctccagcaccatgcacacatctgggctgggagtgaagggcggccagtggacaccagctgcggcacaggccccacccaccctcagctaggggagcagcaaggcttgggccgtgtggaggtggggaggcagggcctcccctgggcagtcctggtcaccattatgctggtgtcatcatcgatagtgtccctgtcagtctcaacaggtatgccagttgggatggtgcattttgtggtcatcctagaggtggcgctggaggagcaggcacagaggcctctcgggccagcccactcccatgctagttatgccatagggcctcttggcagtcccccaaagggaaggcagtgccacagagacagcacctgccgtttggggataatagcaacgtccatggacaatcaacgctagcttgttactgcctccacgtaaacacagttaccygggggcggggtcgtgccagaggctcccgttactgggagggatgcaagcccattgtgcgggtctgcagacaggctctagcagcgagggcccccccatttgccggcccttggctgccacactgctttgctcttcctgcaaaggatacggactccattgactcctgagatcctgaagtcatcaatgagctggacaatggtctctcttttggggtcactggggtcrctgtcccggacctggagcaaaagccaaggggccacagatggttccaccctgccctgaagcccacagctcccttcagtgtacccttctcctgctccagctgggccctgctggaagaaaggccgccaacccctcctgtccctcgcctgttcctccagatcctcccccttgggcacagccagctggaggctgcccctcagggagccccgccctgccccacagagccccggcaggccttgcacccgcattgccaggccccaggcagctccaggggagctgggagtggggtagggaggtgcctcacacatttcaggagcttgatctcatccacagctgtctccgtgtaatgccccgcactcttcaccactttgagggccacaaagcgcttgcgcctgcaataccgagacccttgtaggctgtggccctggcaggacccacggcggggatcagggtggccccaagcaagcccagggacaggatcccagccagtgctgggccccggaggcgaaggaggcactcactggatgtcccagcagagccagacggtggagaagtggccccagcccagtttgcgcaccacgtggtaccgcccattgaacacgtcgccgatcttcacagggtggtagccgcctgcccaggggagatgtagattggggtggagggggttctcactcccctgggcccccgaacacctcggccccattgaccatctggcccatgtgggcccaggactgccctgggtccctgcagtggccgtgaggccgcatgtccccaaggccaagtctcacccttgcagtagtctttggggtcttcctgttcctcgtcgtcggagcccagaaggccctgcagcatctgaggcaccggtgtggccagggctagttcggagcccgaggactcgggcccrcaggaggcctgtgagctgcgggtggggtgagtggcagtgggcatgagagacgccaggggctccgggtgccccagccgagccctacctgctgctactgccgccgctgccgccgctgtccccaccaccgcccgtgctggcgctcatcccggccacgcagcccgcagctccggtgccccgggcggctgctcctgtggggcccggccgcggcctgcgaatttatagccttggccggccgctgatctcacccgcctttataaatagcctcccagctgctcggctgtgggcaaggtatgcggtgcggggagggggcggcgcgacggcggccccagagagcccggcccccgggcagaggcccccctcctgctccaggcccaccctggaggcagagggggctgctgcttggggaccggggcaactgggcccccaggctgagcctccgcaccccagctgagggggaggtccacgcgggggtgaagcagcccgtaccccaggtcgggctcccgttctccggtgcggactgtggggatgtgctccacttggcaacctggtccttaggccaagcccccaccacctgtgcccctgtgggcatcctcctggaggtgcccttctcattcccatgggaaccctgtccctggctgctcccagccacttcctgcttcttctatgtttcatcagcccctaggacaactgggagtccagtgccctctgaatgtggcgtcactggggacccctcatttcccctaccagaggcaacaggcctgctgaggggaggcctgggagcttgccagcccagaacctgctcctgcgacgctgcctggcgctctggctcccagcgcctgctcttcctctccaccatttgcaaggtgcctgtcgtgggctgctccatagccagacatgagggaggcagcaggaagctgctcactgctggggacaagcaagcccatagccacttccccatgagtgcggtggtgactgaggggcctgtgacccaggggctgcatcatgagagaccaggagaaattgggtccccagaagcatccagggcagcacagggcacagtggggcaaggcctgcggccaagacgcgttccagcccttcacgtgctggccacggctgccgcatggttcgagggcgaggactagaggcctggtgtctgtaggcttaatgtggagcttgggtgatatggggttggggggtggtcactgagcttctgctcagcaaaagatcactctggccacttcaaggacaagggaatggagaggcgagggtggagccgggaggccagctggggcctgacagaggagtcccaatgaaagggagggggctcggcagagagggtgtttgtcccaagatattggtgcagtgtccctgtaccagggtccgtgaactggtaggggtgggccaggcattgctggaggggccagcgaggtcagagagtgggagggaaagtgaagcccgggtacctg

SEQ ID NO: 94530 - DNA, 23283 bp, Homo sapiens
cactgcaacctctgcctcaagtgattctcctgcttcagcctccccagtagctgggactacaggcgtgtgccatcacgcccggctaatttttgtattttttttagtagagacggggttctgccatgttggccaggctggtctggaactcctgacctcaggtgatccacccatctcggcctctcaaagtgctgggattacaggcatgagccactgcgcccagcccatgcttactaatcatcttccataccccaggctctatgctggggtttgggaacacgcctactattaacatatggtcccttccctcagggagcctgcatcctgttgagctaagtcacacaaacgcaaactgtggtgcccaaggagaagaaaaggtgctgaactgtgcctcagaacaggggcatggtgaccctgcctgtaggagaggagtctgccaggatgaggacgggaggggtcttactctcctgcaaggtgagatgaggcagggtgtgcagggacctggtgcccctggaatgcagagatggtgtgggggttgaggcctggaagttctctcccagcctcagcctcagcctcagcctcaaggaaaccacccctccccttggcctgcctcttccttcttccagagaccacccctggggatgaaggacaccagccctccggtggcatcagtgccaccagaggccagcagaggggtcagagcacagggcttccactgttgcctctgccatcgcctgcctccaggtaagttcttgcagttttctgagcctccgtttgctgacctgtaaaatgaggctactgagctgctcttaggatttcgggatgaaggcgccatcacagaactgcattccctctccctccagctccaaaaactgaattccgccaaggcgtagagcagctcttaagcccaagttcactgggatcactactgaaagtgacaggaggcagccaagtgtctaggcagatagggacaggtcccagtgaaaccccaccttcaagccaaaaatagcccaaaagctgaaagaccagactgctggtcctggaggaaacccaccacccagagtgagaacttctgttcctgtttgcccaccctttcctggttgattctttctgaacaatgccttttaaccagtcgaatgttgccctttctgatactatctatggcctgcccctcccctattctgagcctataaaatcctacatgtctactgacagcaaactcatttccaggaccatgttagatgggaagacgcgtggctgtcagctgcttcggttgtcaccttgtcctttcagatttaattaaaactggctgctcagcactcagcccacacggggagaagccaggttgccgctggcccgtatggcaccggatggatggggccaaaggtgggctgaacatgctctgggctggtaccatggagaccctgagcccagcatccccccagtcagggttggggaccctcagggctcacgttgctcctggttaccttggctttattattaagagacagggtctcactgtgtcacccaggctggagtgcggtggtggagtcatggctcactgcagactcaatgtcccagtgatcctcctgcctcagccggggctacaggcacatgccaccgcacccagctaatcacctccatttctgctgcacccaccattccttgggatggcgagttagcactcactccaggccagggccgggcaaagtgcgctcaaggctggagcgggaccacgggcagctgtggtgacagctgaaaggaagggcagccactcggtgtcccccacgccccagccccagctggcctccgcctatggactccccctgctctctcttctagctctgcccagcccacatcgtgatgggctagctttccctggactccgttcctagcccgtcctgcttccagctatcgagtgaccccagctgtcaaatggcactgtgccacatgccagccttgccttgctctgtggtcttggctgtgggtgtggtcaggtgtttccccagccccttcccgccttcccaaagtcacccctagacctgcctcagccacctctgctttctggagctccacttccatggccccccaactcccctgaccccaggcatgttcttgcacacaggtgccagtggatgggtgaggacgaactcatgggataaagcctgtgaccccagggaagaactaagccacattcgtggagctgcaggacccggccgcctggatggaggggagggkccagaaagcagctgctcactggcctcgtccagtccttcccctctaacagtgacggtaacaggtgtgaggctgcagaggcctcctggagcggacggacgccctctggcccagccatggcatcacagcaccgagtgcaaacccctcctgtcctcacaggctggggctggggctggggctgggtgcctgggtgcgaggcgactagaaattctgcatcccctgcgagggtttgtggtgaacagcctgggctccggacaggctgggcagacagaactgtctgtctgtgcaagtttcttcgtctgtaaaatgggcctgcagtctgctccttcctgggccttcgggaaggacttggtggacagtgtcaggggacagtgagtgcgtgggtgctccggcgagcaccggcttcctcctgcagcactgagggtcagtgatgctcccctgccctgctcatccctccctcaccctagacctgcccccaccactgctaaggcccagtaaggacaggggcatatcagatgtgggggacctgtcccgggaccacgctcctggggggaatggggtgggcaggccctgtggactccccttctaccagactaggccgctgctcccagccacacccctcctacgccctgctcaggccagtggcttctcctctctgagtgggacagtgggggagatgccccggcctctagtctctgctcctctcctctgtaacagctgtcccctcctaagctcagttccctataccaagcaacataaacccctgaactcatgggaacggggaccctgtcccagctcggtgagcatcacctgtctgctccctgctcccagggcagcatcctacggaggcctctggccccacccaagctccccaccacccccatgtgtctggagccaccagactggtttctgggcacaggcctcttgccatcacccaaccccgtggatcgccctctgtggctgggtgctgggagcctcccagggctcatgcctgatgcgggggaaccatgcaggctgccaggtagcctggccagtgtgcggcaggggtgtcagggaaggcgtcccaggggagaggcaatgtccgggagaccctctgaatggcaacaaacacctggatttccttcaatgaccaggattcccctgctagggttgtcgggagagggtggaatgagggtggagtccggccaaggaagggccgggacaggactgcggacaggagctgaggagggcaggaaccagtggccctgggggctcctgccctgtgtcccgcagggaagcagaccccacttctatccactctggctcttccactgtcctaccctggtctcagccctccaaaaccaagaccctccacaacccaggcttggccaaagcactttcctggccccagagcacagcctctggagcaccgggagcagccgctctgacctctgactccccgcaccagagcagacggcaaaggggagtgctatggcctgtggtcaaggtcaagccctgacaagccatcaggagccagaagcccaggcctcggtgctctgggcaccaccaggccaaccctgtgctccctggggccagcacacgggtcagggaacacttctgaagtcctttattgggccggcaaggccgggagctgccctcggagtggggtcccagtccggagtcttcaggtcagtggcagccctgcccgttctggccggggcaggcggcccctgctgactcgctacttggtgcgcgccttcacatactcccagccctccttggagtactcgcgggccttggagggggccaccgacagagctgacatcaccgtcatgatgcctgtgggaaagggacggccactggtgatactcccctcccagcctcacccagcctccaacccctgggaaactctagagtttgttttgggcggtggggggtgggtggggggcggggatggagtctcactctgtctcccaggctggagtgcagtagtgcaatctcggctcactgcaaccttcgcctcctgggttcaagcgattctcttgcctcagcctcccaagtagctgggactacaagtgcgccaccataccaggctaatttttgtattttatttttttgagatggagtctcgccctgtcgcccaggctggagtgcagtggtgcaacctcggctcactgcaacctctgcctcctgggttcaagcaattctcctgcttcagcctctcaagcagcagctgggattacaggtgtgcaccaccacgcacggttaatttttgtatttttagtagagatggggtttcaccatgttgcccaggctggtctcgaactcctgacttcagatgatccgcccacctcagcctcccaaagtgctgggattacaggcgtgagccactgtgctcggcctcctttcccttttagatccctaagagacacgtgtcgggcaggaaggaggatggacagaaaggaatggccaggaagtggggagaggggctagactggggtgtctccctccaagcaaagaaactgggtgccttacctgcattccaggagtcacggatgggaaagtaaatctttggaggggctgggagctgggaaaaagagatgggcagaaagaactggtgaaaaggctcagcagcccatccccagaggcggagggaggaggacaggccggagaatcaggtcagcatcaatatggaggacaacatcgtgcagggctggagggacctcccagagctgaccacccgccaaaccctggcctcgttcccggcccgtagtacctggggtatctgcaggcctgtctgctgacacacgtactggctgaactggtacatggcgggggggaccacctccccagccttctgtagggctgcctggctcttgtcgctgggccccagcagctcctggtcgtacaccaggtagacggcgcccccagccacacttcccttgatgaggaacctgcgggcagggacgggaggagcagaagctcagcggacactgacagccaccctcaggggccaaggcccacggggagagtgagaccctcctgagggctcaccgtccacagggtgacactctgtagtgcagcaccgtcgacccagacccctattatatacagcactcgttttacaacgtgcaaggcagggcggctggacgccacttgaactgatgaactgaaacccagagggggagagtgggtcactcaaagtcccacagtgagcaggggcagtgaagacgtaagatcttgaccttctagaagccttccagccctggagaaaccaagtgtccctgggcgcctcctgcccgctgtcactcgcagctccgagcacgcattcacttctcatccacgccagcggcaggattcaccggcattcccacctcacagagaagacaactgaggctcggaggcggaggctgacaccgcgaactgaacgccaagggctcgctgggaagcaggagggaggggattggcgacctcgggaagccccgcccctctgaagcctcagtttccctatctggcccataggcggggaacgaaggggaagtgactctaagggaagcgaagagcagatcgggaccagactggagacagggatgcccacaaaaatggactttttcggggactcgggtcccctccggcgcccccacgcacctcatcagcgaccacacccgggccaccatggtcgctcggatccacgcgcaaggacactcggctcgcccgccgcttcctgtcgcggcgccgcagaggcctctggaaggtgtagtctttcttgcccgacgcaaggtcctctgggagtcgtggtgtcttgcggctctgagactccagagaagggctgcggtctcgcagcggagggccgctgggaaatggacgctttaaggcccgggccgccgcaaggctgtctgggaaatgtagtcagcacggcgctgtttgcacctggccgcggagcctcctgggaaatgtagttcggcccggccctggcaccgtgaggggaaagaggcgtcaggtgcctggctgaagcctgaaggtgacccgaaaacaagtcagagcccgagagatccacccgcgcccgcgcgggggaccaagggcccggatttaagaagagtgtgcctacaaggcggttgtcacggcaacgagagggcgggattgttcgagcgctgcggccccctcacgtgatcgattcggaggcggggcgtccgcccagtgggcggggccgggcccctgctgggaggcgaagaccaggcgggcactgttgcccggcgacgctccggcgctgggtccccgaggcccggcccctccccgggaggaggtgggcttcgagtcacgtgacccgtgccctacgggagggggtgcggtcggggacccggcaggaggcggccgagaagagaggaccgtgggggcgttcgcgtggctcccagcccgggaccccacccccgctggacagtgggggaaactgaggcctgagcgggtgagtgcacggtttaggggtgcgcagagggtcacacgcccgctttgttcagaggggaagctaaggcccgccgaggtcaagaaggggccgatgcgttctgcagggcttccccccatttctcccgcatttcggccgggctgcttcaaccgttcatctgcccatccatccatctgtcccccacccgtctatccatctggccatccacccatctatccttccatctatccatccacacttccgttcatccatctgtccgcccatccattcatccatctgctccccccatccttccactcatccatctgtccacccatccatctatttatctggccacccactcatctatccgtccatccatccatccatccatccatccatccatgcatccgtccgtccatccatccatccatccatccatccatttatgtgttcccatttatccattcatacatccatccactcatccatctatccacccatacatctctccgtccatcatccatccatccacccatccatctattcatctggccatccacccatccatccttctatctatgcatccatacatgcatctgtccatctatccattcatccatccacccatccgtccacccgtcagtccatctggtcccacttccccctgccgggctgctgcagtcagtgtagagctgggggtggaaagagggatgagcagaggagcttcatgggctgtccctggaaggggaaaaggtggaagctcgtttcttgctgtgggcatgcctggtgtgtctgggaaaggtgaggagttcattattttgagaactgaacgattcatagatggggccgtgggagagaaggatagacaggtagtcaggggctatacctgcagggcctcatggggtgcagtgaggagcctggtttccatcagttgcagtggggacccctgagagggtttggagcaggaagggccatggccatgttgcttttgacacagacgcctttggctgcattgacagaagaggcagggagagaatgagtatggacatggggaagccagtgtggaggtgggggagaccaaatcggagatggaagggaggccaaaggaaagatgggggtggtcaggcccggggtagggtctaggagggaggtgacaatctgggagtcctggagagagagaggaagggacagctggggagagactggagagggagaactgataagatctgaaaaccatgagctcgtgggggtgaaaggatagaaggaggtgaggacaatacctgggtctcccatttagggacaggggatagtggggctatttctgtgatggtgagctgggaagagaagcaggtatggggtgacatgctgagcctggattgggtcctgctggttctaaggggcctggaggttgtcaggaggagacacccagaagacagcagaggcaaagaacctagggctggacctacagatgggagatttagggactcctcaatgatccgctccatctggtctgtctcagcttcctggttctggaagtccccttccccttgtcccattgacttttttttttttttttttttttttttagacagagtctcactctgttgcccaggctggaatgcagtggggcgatctcagctcactgcaatctccgccccgctgggttcaagcaattctcctgcctcagcaggagaccccatctctacaaaaaatacgatgattagttgggcgtgctggtgcacccacttgtagtcctagctgctccattggctgggatcacaggcatgtgccagcatgcccagctaatttagtatttttagtagagactgggtttctccatgttggtcaggctggtctcgaactcccagcctcaagtgatccgcccacctcggcctcccaaaatgctgggattacaaagtgtaatcccagcctgtgcaacaagagtgaaactcagtctcaaaaaaaaaaaaaaaaaaaaagaacctggactgtttctctctttcaccttctccctggaattagtgaatcagctcccatagctgaaatcataaatcatatcttcatctggatgacgcaggcacctctgtctccaacccagccccatgtgtcaaatgccttctgggtgtctccagagagcgagctgtctcttggcttcctcacctctcgcctcccacgtgcctcatatcactccatgatcaatctggtacctattgagcacctactgtgtacctggcacagttttgggccctgaagacccaatagggaacaaagtagaagatttccatttccttcctgcccttatggagctgatggtctacagggagagaaggatggtggaacgagtaacaaatggtccttgggctgggcacggtggttcacacctgtaatcccagcactttgggaggctgaggcgggaggatcacttgagcccaggagttcaaaatcagcctgggcagcatagtgagaccccatccctacaaaaaatacgatgattagttgggtgtgctggtgcgcccacctgtagtcccagctgctccattggctgaggcaagaggattgcttgagcccaagaggtccaggctgcagtgagctatggtcgcaccactgcactccagcctgagcaacagagtgagactctgcctcaaaaataaaaaaaaataaaaataaaaaaataaataataaaaaaaggaggccctcacttgaaggaggtcactgttctttttttgtttgtttgtttgtttttgatacggagtttcgctcttgttgcctaggctggagtgcaatggcaaatctcggcacactacaacttctgcctcccaggttcaagcgattctcctgcctcagcctcccaaatatctggattacaggcatgtgcgtgcctcagccccctgagtagctgggattacaggcgcctgccaccgcgcccggctaatttttgtatttttaatagagatggggtttcaccatgttggccaggctggtctcgaactcctgatctcaagtgatttgcccgcctcagcctcccaaagtgctgggattccaggcatgagccaccacatccagctgaaggaggtcacttttgcactgagacttgaaagaagtgagagagcaagccattgggttatatccgggaacagcattctaggcagtaggaacagcccacgagaaggccctgaggcaggatagtgactggctggtttcaaggaacagcgaagggtctgttttagtggagcggagtgagcaaggaggacaggtccacacagggcgtttgtagccaccaaggagtctggtttttattctaactggaacaggaaggattttcagtccaggagaggcaaggtgtgcagatggagagggctgagaagggtggagggggagggtgcaggtgcggtggttcatggagccgcggtggttcatggagccaccgtggtggcctggacaggtggtggctgtggaggtggataggaaggcgtggatccaaggcggtggcatcaccaaacacccaccaaacacrggtggctgtgggccaggcctgtgccggccacctctgtcccctgtccctctgcaggcccacacaggaccatgaaggtgcttctcctcacagggctgggggccctgttcttcgcctattattgggatgacaacttcgacccaggtgagcacctggggttgagggagggagaaaccgggccagctgtcctgtcctccgcccagagtgaccaccccggctatggccagccagcctccagggagcgcgagtgctgctgacaggggccaacgctggtgttggtgaggagctggcctatcactacgcgcgtctgggctcccacctggtgctcactgcccacactgaggctctcctgcagaaggtgagccaccccatgtctagatgaatggtgggggtgctcatggggggtgggaagagagcctgggtttaatccctgcaatgatccaggcttcccgtgtgaccttgggcaagtcgcctaacctctctgagcctctcagtttcctcatttgcaaaacggggacaataaaaccactttctggccaggcacggtggctcacgcttgtagtcagcactttgggaggccgaggaaagtggatcacctgaggtcaggagttcaagaccagcctggccaacatggcgaaacctggtctctactaagaagacaaaaattaggccaggcatggtggctcatgcctgtaatcctagcactttgggaggccaaggcggatggatcacttgaggtcaggagttcaaaaccagcctggccaacatggtgaaaccctgtctctactaaaaatacaaaaaataaaaataaaataaataaataaaaaattagccggcgtggtgtcaggcacctgtaatcccagctactggggaggctgaggcgggagaattgctggaacccgggaggtggaggttgcagtgagctgagatcgcgccactgcactccagcctgggtgacagagcgatactccatctcaaaaaaaagaaaaaaaaaaattagggcatggtggcgcgagcatgtagtcccagctacatgggaggctgagtcaggagaatcacttgaaccccggaggcagaggttgcagtgagccgagatcgcactactgcactccagcctgggcaacaaagtgagactctgtctcaaacaaacaaacaaaaaaacccaccttctcatgggttaggatgttgtgccaatgcagtgagacggtgactagaagatgcagtgtttcttaacaaatgagagtattgagtgtccaggcctgtgctgatagccagggttcttaaactcgaagggaaggatgggcacttcttagcaacaagcagtccattgctacttcaaggaagggtatggctcttgggcacaaacctttcaatatttcaagagaagctagcaatcaggaaattgtagatgaaatgtcctgttttagatgttggtgattgactaaccaccaaattggccagcattctggcccgcgggcctccactttgcgcccctcaagcagtggtaaatttttgggaatgatgttgaatgggtcccgaggctcagagtagggggkkgttttcaggygggggcctccctatggccagcaggtgcggtggagggggaagcgctgctgtagaggagaggcccacgggcagctctggccccccccaggtggtagggaactgccggaagctgggcgcccccaaggtcttctacatcgcggcggacatggcctcccctgaggcgcccgagagcgtggtgcagtttgcgctggacaagctgggtgaggggctgggcctgaagcctggagtccgggaccgtggcctaggccttagggacaggaccagaattgggctgtgggtgtggccacagtaacaggtgtctcagggcggagacaaatggggactgggggcgtgggcggggtggagtctcattgcgtctgggggaagagctctgaacggggcctcgttgaatgggaaccaaaccttgctagatccagggtgtaaggccaaggctgggtgtctttgatcgtagtgggagttacctggggcggagctcgctggaccagcgctctgggtggagctaagctcgggggcggggtttgatcgtttccttggggaggggcctccggggctgaccggcgtttctgggccaggcgggctggactacctcgtgctgaaccacatcggcggcgccccggccggcacgcgagcccgcagcccccaggcaactcgctggctcatgcaggtgctccgctcctccgcggccccggcccgcccctctatctcagggaccggtggtccgttcccttcgcggtccgggttctgccttctccagggagggctctccacccgtcccgccccagccacgcccctcctagcccaagcccctgctccggccttgaccccgccctcggacccgccttccgggtttctggccccgtctctgacccggccctggccccgccctctgggtttctggccccgccctgcccctgggctccgcctctgccggtgactcgcgagtgccgcctgcaggtaaactttgtgagctacgtgcaactgacgtcgcgggcgctgcccagcctgacggacagcaagggctccctggtggtggtgtcctcgctgctcggtgcgtgcacccggccccggctctgcgggacggggagtggggagctcgatgcgggtgagcctggagggtctgggcaggcttcccggacgagggggagccactcagccgctgccgtccgcgcccccaggccgcgtgcccacgtcgttctccactccctactcggcggccaagtttgcgctggacggcttcttcggctccctgcggcgggagctggacgtgcaggacgtgaacgtggccatcaccatgtgcgtcctgggcctccgagatcgcgcctccgccgccgaggcagtcaggtgaggcccggacaagctgggggctgggctgggggccatggcccagccccagccgcagtccccaccgtgccctcctgtccccaggggagtcacgagggtcaaggcggccccggggcccaaggcagccctggccgtgatccgcggcggcgccacgcgcgcggccggcgtcttctacccgtggcgtttccgcctgctgtgcttgctccggcgctggctaccgcgcccgcgggcctggtttatccgccaggagctcaacgtcacggccgcggcagcctgagcaccggggggtgcccctccagtcccagacggcaatgttcctccctccaactgtccctggagccagaacactcacagagacacccctgagagggtggccacagcccaagatgaagtcatcaagacagaaaagcaaaaccgagaaaaacgacgggcacctggaaccagtcacggcttgggaggtgcaggtgccccgtgttaggcgcctttgtcggggacttgcaaggcctcayctgtttggccatgattgatgacgtgactgcttccattttgcagatgaggaaactaaggctcagagaggccacgccacccttgagccacccatggacccctctccatctcctgcctgcgcctttaagtccctgatttattctttccattcattccatctgggaggaacccccccaactcctgccagcttcccctagctggggtctctggtactcttcacacctgcaggggcgtctacactgttcgtctacctggtggcagggtctgagcgggaggaggagggaaagagtgtgttctgagctggacccagcctcttgttcgagaataaaaactcttcttctcttgcatatctgttgttcaaattccttggtaattccaatttgctagcagccagcgggcagcgggagggggtgtgtgtatcaggggccttgactctcaatcccatttcacaggtggggaaatggaggctgagagggccaggagcagtggctcacgcctataatcccagcactttgagaggtcaaggtgggcagatcacttgaggtcaggagtttgagaccagcctggccaacatggtgaaaccctgtctttatttatttatttattagacggagtctcactctatcgcccaggctggagtgcagtggtgcgatctaggctcactgcaacctctgcctccggggttcaagcgattcttgtgcctcagcctcccaaatagttcagattacaggtgtgggtcacaacgcctgactttttgtatttttagtagagacggggttttaccatgtcggccaggctggtctcgaactcctagccttaggtgatccccctgtctcggcctctcaaagtgctgggattacaggtgtcagccactgcacccggccacaaacaaatattttaattaaaaaattagccaggcgtggtggcatgtgcctgtggtcccagctaaggaggctaaggcaggaggatcacttgagccctggaagtcaaggctacaataagctatgattacagcagtgcactctagcctgggcgacagagcaagaccctgtctggaaaaaacatgaaagcgctaaccctaattagagcagccctaaattgagactctcttcttgtatattagtagcattaaaggagaaaaactggaaacttgtgtgtttctgccacccgattcagttatttagcgtcccgtccctacaccacctaaattacatcagatgtccgcaaggggcactattacacgttgctgtattcagacctagtctagagcttgaccaattgataacaaaaccaatacctttttttttaaatggagtttcgctctgtcgcccaggctggagtgcagtggtgcgatctcggctcactgcaacctctgcctcttgggctcaagcaattctcctgcctcagcctcctgcgtagctgggattacaggagcatgccaccacgcctggctatttatttatttatttatttatttatttatttatttattgagacggagtcttgctctgtcgcccaggctggagtgcagtggcacgatctcggctcactgcaagctctgcctcctgggttcacgccattctcctgcctcggcctcccgagtagctgggactacaggtgcccaccaccacgcctggctaattttttgtatttttagtagagacggggtttcaccgtattaggctggtctcgagctcctgacctcgtgatccacatgcctcgacctcccaaagtgctgagattacaggcgtgagccaccgcgcccggcctaatgggcgttttaacagttcatacagtttggtattattattcccgctctacaagtgaagaaattctgagaggtgatgtcgtcgatgcagggtcggcccgaaataggcggagttgggattcgaactcatttcacaggcagagggaggagagcagccatagccacctccactggttccgactccagctcccgggctcgcaggagtaaacgcgcatgctcagggagctcggtcgcgcatgctcagcgcaacggcggggaagactccagccgccagggggagcgcgtgccgttcttgcctctctggcctgcgcctcctgagccgagtagatatcccggagttccgcgcggcgccarcccttccgcsacggccgtctctggagagcagcaggtaagtggtttcccgcactgccggtatccgccgccatccggactcccgggtcctctgtgcaggttggaggatggttgrttgtggcgagcgaggctgaaggagccgggacgcggggctctgggcctcgggaactgagccggtactcacctccgcccyttctccccgtcgctgtccgcagccakggccctacgctaccctatggccgtgggcctcaacaagggccacaaagtgaccaagaacgtgagcaagcccaggcacagccgacgccgcggggtgagtgcgggtgccgcgcggaggttgtcgggggtttcttggagggcggagggcatggcttgggcaaaggctctcgacctgaaagaacgcgcgttcgggcgcagaactaaggggggcttgaatggaagagatggggtgggggagtgggacttcctgcctgktgctcgaaggcgggcacccatctgggtttttcccaaccgtgcaatccacgctggggcagagggagcaccttgagagcggcgcggggcagcgggtttggggttctgacgcaggagtaggagttcgctcatggagctggcccgaggttgcggtgtgtgaggttgagggatttcaggtgtgtcagtgtattgggcgcctttattaagcgggcagcgggtttggggttctgacgcaggagtaaggagttcgctcatggagctggcccgaggttgcggtgtgtgaggttgagggatttcaggtgtgtcagtgtattgggcgcctttattcagcaggcagcccagactccaggtgcgtcctgccagtgttgcggagactgggacttagggaggatgggagctgctccgggcgcggcgaaaagcgctaggcgttaataccttggttctcacagctacccacagaggggaggaagtagccagggaaatcgcggcagcgcgagagaagctgcttaactagaatgcagggatccccctaccctgacggccgcccctttcccccctagcgtctgaccaaacacaccaagttcgtgcgggacatgattcgggaggtgtgtggctttgccccgtacgagcggcgcgccatggagttactgaaggtctccaaggacaaacgggccctcaaatttatcaagaaaagggtaggtgggcgctgccggccgaggggcggggtgggatgggagtcagggccgggctgacggcggcctygtccytggcaggtggggacgcacatccgcgccaagaggaagcgggaggagctgagcaacgtactggccgccatgaggaaagctgctgccaagaaagactgagcccctcccctgccctctccctgaaataaagaacagcttgacagaagccctggctctcctgctgtccgtgggtgggtgtgggtgtgtcgggggcccgcagtcccctgtctggtgcccgctctgagccacaccctctccgggtgctgcctggtcgtgaatcaaaagccgtggcccgcccacccttcccggggcagcaggtgaggaagccgccgtactgcaaatgactttaatcattaaatagcttctatgccacactctgattaagccgactgaggtccctgggatctgggtcactggaccgagctgctcgctcggtggctccactgccaggtccgggcgcgctccccacagcgctcagttctggcccagacagggcctgacatccgccgcctgcagtcccggggtggccgtcaccgttccacggccagcgcctctgcctgctcgtccggkaaggcgatgtcgaagatctcccggtagtgttccacgaagtgcacctccaggccctcggtgatgaaggctgccaggtcgtagaagtccttcttgttctcggctggcaggaygaygcacgtcacccctgcgcgcttggcctgggggcagagtcagggtcagccctgcctgggcctgtgggagggcagcaggtgtgctaacctccaggaacgaaagggcttcctggggaccggcgatacacagtgatgccgggttctaagcagtaagtcccaaaacccaccagggtccccgtctcccacggggaaacaggctcaaggcaaaaccactggccttggctccaacagcctgagagcaggagccagggcctccccacccccttatctaggaagtctggccgtgcggtgggagcagtctcagggctctggatgagccacacacccacggcctcacatccagaggtcaggcagtgtctggggcctgaacagggttcctgtgagcatctgcatctctgcccccaggccctgcgtcacccccctcacctccggaggctacacatatctggagtagatgccaggcacagccccaccacagccccttgaaaggacagcagttcccactgtcaccgcacactgactccatggacagtgagcctcccaatttgcctccaccattttatcatctaggaagtctgtgcctggtgtccaattcaaggtggtcacagccacttgaccatgcctccctcgtggtggcatctcctgactgactgcaccaggcttcctagacacatggcaagtgtggtccagtctggggacaggcagggatgggagggaagagtggggacagtggcgctccaacctgctcagcacccttggaagaggccagcccctggccaggggctccaaacacccccgccaccagtaatcctaaacgtcgtccccatctctagcctctcccttggcgctgggctgcctgggaagagaagcaggagccacccccccaatcctactggggaagccagtggaggctcagaatgttctccacaagacttgctgtggagaaggcagctagggcggtgagcttaaggccagctccaggccagagagacctgcttccaaagcccagggcttccctctccttggcccaggcagaggttgcatggcggggactgggcctgtcccgtggtggtgtgggccctgccagtgctgtggggtgggtacagggacactcaccgcaatggtcttctccttgatgccaccaacaggcaggatcttgcccgtgagggagacttcgccagtcatggccagattctgccggacaggcctgcccatggccagggacagcagggccgtgacgatggtgcagcctgcgcttgggccgtccttgggggtggcgccctgtggaggcatgtggggatagtgggtgagcaggtggccagcagcccagggactgggcgggagcaggtgggagcggatggcgcggtcacctcgggcacatgcaggtggatgtgtgaggtcaccaggtagtcattggcgggggygtgctgcatgaggaaggctctggcgaaggtgtaggctatgcgggcgctctccttcatcacctcccccagctggcctgtcacctccaggctgccatccttgtcacccttggcatccttgtcctgtggccgtctcagggatgtctccacaaacagcgtggagcctcctgaaacaggtgtggagctgtgaacacgggaggcctcggagcccaggccggtgctcactccacccctcggggccactctgaccgctcctgccccagtttagcatcttggtgcccctgggcaggggttggtgtcccatcgtgagccaacgctggcctctacgtttgctgcgttgcgggttcctggctctgtacgccccacagggcagcccccagcagctgccagccacagaggacacgcccagggctacaaggcccagctgccgctgccctgcagacagacacaagcccttctccagcccctcccgcaccatcccctttgccctctcgcctcctttgtgcgtggtggccccaaggcccatctggatgagcttgtccttacctgtaagcctatcaaagtggcacccaaatccataaggcccatggtgtgctgccacccccatgtgtcacagccttcccctccctcagcccagaccccctgggctcccagcacaccaccccccgccagaggccgttcagagccacctgaggcccactgcacaggtgtacaaggtgggacctgcttgttctcgggtagaaatgggaatggctttggggtcttctcccgccaccacgctcacccattgcggtccaggccagccccatgaccacgccgggcggtgtcacgtcatacatgcgctccacggtgaacacgggcttccccacgaagtcctgcaggttctcgggcgtcacctccacggactcggcctcgccgctgacaatcttgtaggccgatttccgtaacacctgggcggtcagggcaacacaatgggcacgggaaggtggggtgacaggtgcggggtggtggggtgaygggcacagaaaggtgtgacgggcgcggggtggtggggtgatgggcgcaggaaagtgggrtgatgggcatggaaaggtgggrtgatcagcgtgggatggtgaggtgggcggcaggtgccaggagggcgggctggccgctcaccttctccacttgcttctgcaggttgcggacaccgctctcgcggcagtactgcttgatgagcagcgtcagcacgtccgatgacagcttggccttgctctcatccaagccacacagggcgcgagcctggggcaccaggtagcgctgcaagggcaaccgtcagggttgggtctggagggaccttgcccaccagctcagtctagaacctgggagccaatgcctctcccatggcccccagaccctggcctgggaacgaggtccctgatggtgaaaccagggcctggacaccccgccctgccacccaccatgcccagaggccccaggcctttgcttgtgctgcgtcctctgcttggatccacttcctatcccccaatggtatcttagatgccgcttcctccaggaaggcctcctggttgccccatgggctggccccatacacagacccagggcctgtagggtggctgactggttacgtggctgctgccctcagcacatgaggaaggggactgggtcaggggctccagggtcacccacagccccacacaattcttgccacagttctgagctctaatggcatgggggagggcatctgtgagacggacagagccatgcaagccactctacatctgccactgatactggggggcactcctgatgccctgaggggtccccatgccccccagtcctgtccccaggaactacaggcccgtcccttggagaagtcaggctgggaactgggcccagcagtgggcattgaagcccccaggggacacgaggatgctgggagggcctcaagggcagggaccagtgcccaccactggctgtcaaagggctcctaggggagaaatgcactcagcacctttgcagaaaaaaaaacacatgagaaatatgggcccctgcatgctcctcactgaaaccacttctcctccaagcctcattctgggtgggagccacaggccccactgcttccggctgccagaaaccttccctacactctgggccaggtgggggccccaccatggggcagcctggaggccccgggagacagagtgtgtggcctgacggtggtgggcggtgttttggacagtcccaggccctaaaccctgcgcccactcgcgccacctgcagctgctcgcaagcgtctggtgtgtctctcacggccccatctgctcctcggccgcaggtcccacctgtctctcccgggcccaggagctcccagaggcacggcctctgcaggctctggggggcgccccctgctctgggaaggggacagcagtggggaggggctgggcttacctccgcaatggccagcttctcctgggccacgtagccygacacgttgatcatctccatacggtctcgcagcggctcggggatrgtgtccgtgacgttggccgtgcagatgaacagcacctgggggcggcggcaaggtgctgggggactggccgcttaccctccccagcaagcccaggccccagacaggccccccaccttggacaagtccacgggcacgtccaggtagtggtccaggaagttggcattctgctctgggtccagcagctccagcagtgccgacgacgggtccccctggtagcctcggccratcttgtccacctggggcagcagacagcaggtggtgcccctcgccgtgcccctggccagcccgcccagtggggagaccccagggtcagggctggggagaccccgagtgagagcggcacccacaccctgccttggacgggcagcctgctgggcgtggctgtgggtgggagggacccgtccgtgccatcagggccagcatcacggcgatggcccctgagttggctcggggatcctaggacccggaaggctcggcttcatcttgcacacggcattgccgggttagggggtctccgggcctctccgcacgcacctcgtcgatgaggatcagggggttctccgtcttggtcttcttcaaacactggatgatcttcccgggcatggcgcccacgtaggtccgcctgtgggtgcacagcggggtcagaggtcacttggtagcctggctcggccacaacgacaccatgcaccctccagggccacaggggagaggccacctggagccccacaagatgtggccatgatgtgggaggcggaaatgctggcagccgccggatgtgtggcacctgcaggcacgctggtcacttgccctgactcgccagctcagattctggggtcactgattcaaagccagatctccctcagtcccatccctcagctgacaccatggtgaaagccagacaggcgctggcagcagaaggcccccactcctcactgagggacgccaggcacgcctcagccctcaagggctggggtgatactagccatggccagcactggctctcaggagggcttcctgcaagctctgtgctctgccccagcacaggggcccggcccgcgacagggacagaagaatcccaggccccacgagagacagtgaggaaggctctgtctgtgggatgaagacacagggaggcagggatggagggactgagatgccactgggatgtgtgtgacactttaagtgtgcaggggggtaaggagtgtcttagggagaggccccgagcaacgcacgtgaggagagagccacgtgagggtctgagagatgtgttccaggcccaggacacagcccgtgcaaaggccctgaaacaggaccacgcctggtgtgttagaagaacagtgaggaggccatgaggctgaggcagagggaggagggggggagagaagagggaggagagggggaagagggaggagatggagagggaagggggtagagggagggggaggaagaagagagggagagagaggagggggtggggcaggtcatgcggggtcctgtgggctgcagtgagaacttgggctttgaccgaggaacgtgggagccctggagagctgggggcaaaggagggttttgctgctgttaataacaacgatccatcgccccgcagccagtctcctgtccttgtccttgtctcaggaacccagagacgtcagcagacgcctgccctccccgcagccccgctacctggtgactccctcccaaggccagaggtgacccaggcttgttcagaaccccgccagggt

SEQ ID NO: 94531 - DNA, 44355 bp, Homo sapiens
ctcatttgaagattcactggctcctttggagcacaggacttgccacaaatgcatcagacctctcctcctctcacagtgagccagagatgccactctttaagttaaaaattattttgcttaggagaagacccaaagtctcctcagtcctagctgtccttcctgggataagtgggtcagattagctggcagccaatgagcaagggcagacacaggtggagagtggaagtgtgtcagggaaaaagcagactggtggaactgaagccagagggctccttgggagggagtcacttgatcagggcttcactgatgccttcttgttcttccaaatcttgattgatgccccatctcatccccatatgccatgtgtcaggatgctccagtctctgcctctccttgggatggaaagtgccaaagtatatccaggcagattactttggggggatagggtctgtttatagtgccacttgcatctttggggacctgagctctggctacacttaacagggaaaaaaagagcacagggcctcgaagggagttgcttggtggataggattagatcactctaacggggctttgtccagtgagcccagcatttctgggctggagaaagactgctggaggtcacattggttgacagggtcaccttggctaagactatacttccatcagagtgaccaaggactccttaagcttctcccttccattctaagcactgatgaggttgcaggagcctggggaaacctagatacacagttgcattcagaaaacactcagtatttgtttaactgtccctccccatggccaccccccacaccatggccttgccatacctatctctattctaaccaattttccatgcctagcttgaatgtctcctccatgaagcatgccctttccacacagacagcctgttctctttatccctaactccaaagtctaactttatcttccaggatttgtctggggaaactgatatgccaccctcataggcctgaagaaattgtaggagtttgaaggaagacctagaaaaaaagttcaggctgggggcagtggctcatgcttgtaatcccagcactttgggaggccgaggcaggtggatcacctgaggacaggagttcaagaccagtctgaccaacatggcgaaaccccgtctgtaccaacaatacaaaaattagctgggcatggtggcgggtgcatgtaatcccagctacttaggaggctgaggcaagagaatcgcttgaacccgggaggcggaagttgcagtgagctgagatcacgccattgcactccagcctgggcgacagagcaagactgtgtctcaaaaaaacaaaaaagttcacctgggctcggtgcagtgacccacacctgtaatcccagcactttgggaggctgaggcaagcagatcacttgagcctaggagtttgagaccagtctgggcaacagtgagaccccatctctacatactatttatttagagatggagtctccctcttgtcgccctgcctggagtgcaatggtacaatctcagctcactgcaacctccgctttctgggttcaagtgattctcctgccttagcctcctgagtagctgggattacaggcagccgccaccacgcctggctaattttttctatttctagtagagacagggtttcgccatgttgtccaggctggtctcgaactcctgacctcagttgatccgccctcttcagcctcccaaagtgctgggattacaggcgtgggccaccaagcctggccctggctaatttttaaatttcacatagaggccgggcgtggtaggctgccctggaaattgtattgtcctgagagaacactgccatttcagatagaggctaagatgtcacataattgatgtaaagcctgtaatctcaccctcttcatcagggccaaagcttgtctttaggctccaggattaggttcattacagtttgttgacacacttaccaccccttctccaaggactcccaatgattttagagagttaaaccattaaactgcagattctgtggtcaagaatccaaacagaaaacataccaatttccacttttactcacacccaaatccagtgaacctagcagtttcccatcccatcctggtcaagtccaggaacacagtggaagggctggctctagggggagaagcctgtgtcctccttcagcaaccccagtttcctgtagtcccgacctgttactgggtcaaaggagtgatggtccagagaagggcaagcttaaattcaggaaaacattctggctctggtcagaaggtgtttgtggaaaagccaactcagactgtatttttcctctgttctcatgccaccactacaacaatcaacacagacttctgtgaccaaatatgtgggggatttgccctcacaccaaacaggcaatcagttctgctgcgggcatcatctgggtgtcctccaattcaattctggcactgtacctggagataatatcagatcccacaggttgaggtcccagtccccaagaatgcccctggtttggacatcagtagttagtatgggcctccagaacttctgtccgaccaacttcaatttgggattcccatgatcccctttttgggttcaaccaatttgctacagaggctcacagaactcagggaaacacatttactggtttattacaaaggatattataatgaataaagatgaagagatgcacagggccaggtatgggggaaggggcctggaagctccatgccctccctgggagtggcatcctccaggaacctcctatctgaaagccctccaaatcatgtcctcgtaggccttttatgaaaacttccttggataggcatgattgataaccatgtagaaatatgcttggaccaaaaggtatgatctcatagtgatactctagactgagtgagggaacccagcaaggactgtcgagatttgtcttggcctctgtgcagcatcccttcctccaaggtacagggcaggaccccttctgaaatgggggtcttgcaacctacaatcagaaaagatatgacaaataacttatttatagccagctccaagacacaaagttgggggaagatttctgccttgggggaaaaggaacaggtgaaaggaaggcagaagaaggccagagagggagagagagagaattctgttctctgaggcctgcttctgagcctaaagtgcccccaacattataaacaaaagactaacaagagctgtgggagttataagcaaggaactttggatgaaaacttctgtgtgtgtgtgtgtgtgtgtgtgtgtgtgtgtgtcacaaggacagccctccaggactagtcaattcccaaagaaagaggatgcctattgggcagtgttggaatcattcacatacatcatcaaactccaccataaaagtaaattgtcctcaatttacttttgaggaactggacttctacacattaaattacaatatttggtcatagggaactggaactaaggtatgatggaacccaagcttgatctttttttgtttgtttgtttgagacagagtctcgctgttagccaggctggagtgcagtggcacaatctcggctcactgcaacctccgcgtctcgggttcaagcgattctcctgcctcagcctcccgaatagctgggactacaggtgcatgccaccacgcccggctaattttttgtatttttagtagagatggggttcgctgtgttagccaggatggcctcgatctcctgacctcgtgatctgcccgcctcggccaaccaaagtgctgggattacaggcgtgagccaatggctggcaccaggcctccaagcttgatcttctatactgtgctacttatcggcaaaaagaaaattaccttcagtgtgacaaatttttactatgcacttgtttgtttatttatttatttatttatttatttatttatttatttatttgagacgcagtctcgctctgttgccaaggctggagtgcagtggcgcgatctcggctcactgcaacctctgcctcctgggttcaagcgattctcttgcctcagcctcccgagtagctgggactacaggcgcccgccaccatgcccggctaatttttgtatttttagttgagacagggtttcaccatgttggccaggatgctctcgatctcctgacctcgtgatcctaccgcctctgcctccaagtgctgggattacaggcctgagccaccgcacccggcctactatgcacctaatgtgagcaacgattcgctggatttgtctctgccagaggctcgtggacagcatttctagaactgtcagatcaaaatctgcaactgaggagttagtttgccatcaactctacatgtacatttcagtcttgtgaacatatctagatttagaactttttcgtttgtttgtttttgagacaaggtctggctctgtcacggaggctggagtgcagtggagtgatctctgctcactacaacctccacctctcggattcaagcgattctgcctcagcttcccgagtagctgggattacagacgtgcaccaccatgcccagctagtttttgtatttttagtaaagacggggtttcgccacgttggccaggatggtctcaactcctggcctcatgtgattcgccggcctcggcttcccaaagtgttgggattacaggcgtgagccactgcacccagacaatttagaactttaaaatacaatatagtccagcatcggccagatccttgccatcccagtgttgtccaccactgttcttagtttgtcctcagctcaggggccagggagggacttttatgccatccctctttctctgatagagaggaatctaaccctccctaggggggcatgtcttttttccttctcaacaacttcatgttctttcaccaccttaataatcaagcatttccttcccaacaacaactaaagggaccaggaaagacttacagaagaaagtgaaagatttttatctcacttcaaacagaaatttacttttaggctgtcactgtctcctcccagcttatctgagctaacaggaagcgaatgaaggcctgtgattcagctgcaggcagcgggtatgcctgagcaggtcacacccatttggtctcttttgccaggaaaataaaaaaagaacctaagagaacggtcttcacattttgaatgcgcaacattgtatctgtgaatgaaggcaagagttaacagctgtttaattgataactgctcgcatcattagttgctggctaacaactgggaaatcagaaaatgtcttgtagaaaaatgtaagaaaagttccaacaatactgacttaaacacgacaaaggtgaaaacagaaatgctgactcctgcataggttatcggccctaatgttctgacttgatatttccagatgcccagctctgcgctaatatcaacaccgtctatttactttctactctgaggcattcgctctgcaggattccagaccctactaaattattcacatggccccaaccggtccttccttgttccgcggtcctaacacaatgaatggtcctaagaggaaaacggcctcgcgctcccgctccaggcccacttcgcagtccctagttctccctactgccgctccagtgccagagcccctccgaaggcggccaggacctccaaccacgcacaagtctgcagctctccccaactttccgttcagctcagtctccgagggtgmgccagagcagacacccggaggagtsgggagtggcagggcggggccgggagaatgctgccccggaacccataaatctgggccctgcccaggtaggccgggacagctggggtggccygggccgagagccaagaaaagagaccccatctggcagcccaacttggcggcaacaggtggcccggcgcccgggggtctgggaggaaagtcgctccgggggcgggccccgttgccccgccgcgtccccattggtcatcaggtttcttaaaatgtgactctgaatctgtgtccttccgccgcagaatttagtcccaccgaaagggcaacctgcccgcgcgttccgccrccgccgccgcgcttcctcctgaaggtgactgcgcccgcggggacgcagggggcggggcccgggtcgcccggagccgggattgggcagagggcggggcggcggagggattgcggcggcccgcagcgggataaccttgaggctgaggcagtggctccttgcacagcagctgcacgcgccgtggctccggatctcttcgtctttgcagcgtagcccgagtcggtcagcgccggaggtgagcggtgcaggaggctacgccatcagtccccaccaagggccagtcgcccggctagtgcggaatcccggcgcgccggccggccccgggcacgcaggcagggcggcgcaggatccrgggcgtctgggatgcagtggagctcagagagaggagaacggctcctcacgcctggggcctgctcttcagaagtccccagcgccgttccttccagatcaggcgggtccgccggctcctttcccgccccagccctaccccctcattctggtcccatcctcttcctcctgccccaatcctcaatgcgcctccatcctcgcctgccttctctcggtccctcgtgattgattccacccttgcttcccctttctccgcgccgcctgttccgtgctcgttttcccctcttcctccttaagtctggtccttccaccccctcctcttcaagctgtgcgtgtcccctgattctaatgctttctgtgtaactcattgaaactgcgttctggttcccctcccgcgtccattctccattcatgcgcgaccgcccttcccgcgccccagttccctctcgccgcccctccccctgcttgctggtcacgtccgctcccccgcatccccttcctcgcctggcgtgtccgctccctccctccctctctgctctggtcgcgcccgcccacttgctccggtctccgagcgcggtcccaccccccttttccatcaccgcctcccagctcccagcaggctcgggcggtgctgaggccccgtgtccggggcgggcgggcggagggctgggctgggtgccccgcgcggcgggcgggatgcggcggcccgggggcagctggagacttacgtaacgttggcctgccccgctgccgggaggcagggcggttgcccctgcggcgcggtgccgtcccctgtggccgggattagatgggcggcctgcgagggcctgggaatggctcggggcccgagagctcgaccggcccttgccgggtggccgccagggaccacgctccatctcgccgcggccgggctgcacgtagcggccgcgcccagggcccaccccgcttcaccgggcgatggccttgggcctcgtaacgggcgggataaacctctgcaggctttgctggggcctcctggccctcgcccgttccgcgcctctccggcacgtttctttcttttcctttcttttttctttcttttttttttttttaattatccggcacattttttaacaaatgcgtcctgattgtggaacgcggaggccgcggggtggggtggggatctggttacggagggggcaggaaatctgtcgcgttcactgaacgcaaacggtgtgggtcaagggctgtttgggggtcagagttagagaccaggatgactagacgagtcatagcccaccgagctcacaatcttaaaatgtatctcctgtaatgctgggagtggggtacgagcttcctgctgtgggagggagggggacaggaagcctcgtaaggtctcaccaggtggcaagcacactggattagaagatgcaggaaagcaccttccagtctgaagatcatttaaagactcagtcatgtaagggcatcccttggcttcttaatctacgtactccagacccagggcttggacctttgctggtacgggttaaagtgaggccgacagtgaaggtccacgtggagagagacattgggaagttgtcaaaaaggcgtttagaatcaggtttgactcattaatttcctgagactctgaaggagttcagcctctacacctcagtttcccctgggaaaactgggagtaacattttcctcatgatggttgaaaggattcatgcttacgtggatgtggcacactcagtaagtgtctaatctctggcgaaatacccagaagaaaagcctgtgactgaatatattatttttgagcacaattacttagtccacaattgagcataagggccttgatccattgtcttcctactgtccccaaacgcctacagctaatcgtgaggaatcaggctctctgaataaccacgtgtctcctggaaaccagttccccaagggatctggtttaatattgacaaagtaactgataatgtaactttccaactctctgcttggagcagatgctttttggtcatctgagattgggacctgtagacaaaggcaggcaaggaggggctgagttaagcctttggtgttccgctgtaagtagaatactacctaccagaggaacattccagcccttgacttgctctgcctgctggtgagattaggattggagccagggtcagtagcccccagttggccgtcttgagggtgtggccactccctaggtcacagaggagatggaggtcaggactcccctgctgcagcgttgttagcaaataatttgccctttggtggcctgaggtgctgtgggggcaggagtgggctgtcttgtggggaagggaaatgtaacgtatcaccaaatctgtgggggagtggggctctgtggggaagatgactcaacctttcaattattctgcttttgagagaattatcttcgctgggtgagtggggaaactacattgtggttcktgcaggcttaaaaagtcccttctcccctttcagtgagtcagataatgaagcatgcatttcccctaattaaaaatgcctcaactacggagcttgcagtgagccgagatcgcgccactgcactccagcctgggcgacagagcgagactccttctcaaaaaaaaaaaaaaaaaaaagccacaactaattaaaaaatgattggtccgggtcacctggttctctgtactgccttaagagcttaagtgtagactggcagagcccggtgcccagctaatgccgtctgtgcagcttcattcctggcccttttgtagcgggcacagccgcctctcctgggacttgattaatgatgacttaaagaaggttcttgaactcatttctcagttactgacttgagccaaaatgtatggatgttggtctcctgtctagcacaactgctttcattttaagcattgcattagaaataatgttgtattcatattttagcaaagagcatcattagctstttaagaacygtacccccagtgacttagcaaatttggtggcggtgactctaaacagctagcactttatgggagttgcttctgtgccttgaatgttgtgacactgatgtggggtcacaggaaaaaccattttatttcctaaagctgtttatttcttaatattgaggcaatggaagaaatgaggaaacggccgtgggcaggaaggtagaagaaaatgcagcacttacattacaaactcactttacttgggktttagtttattttgcttcagttttttgttttttttttttttttttttttttttttttgagatagttttgctcttgttgcccagtctggagtgcaatggtgtgatctcggctcactgcaacctccacctcctgggttcaagcaattctcctgcctcagcctcccgaagtagctggaattacaggcacttgcaccacgcccagctaatatttttgtatttttagtagagatggggtttcaccatgttggccaggctggtcttgaactcctgacttaggtgatccacyggcctcggcctcccaaagtgccgggattaygggcgtgagccactgcacctggcctgcttcagcttttatgaaggcaagtcaggatgtgttatcttggccaagagctaagactgagaccggagtagaggaaaatgactcatttgacattacccttctttctgaatcactccaaaagtccacagtcaaatctcaattagctggtataacacaagaatgcgttgaccctgtgagcagagttttattgcawcttcaagggtcttcgtgagattggtttatttggtatgaggtcttaaggattttaagttgtccctttaagcatcagttctgatacagatgggaatagagctaaacaaccagatatatgaagaccatttttgataccaccatacttgcggggagcttgcatttttttaccaaggggcagactggataattgagtaatttaaatacttgggactttgttaaagaagctgttgggggaaggtgagcctgggtgagtggtggagggtgatgtgcagcatctgctgggccttcctgcctcttggtatgactgctcagctcaggagttgggtgctttagggcccctaccatgcagtgcggtgaagccccgcccctgcagtggtttgtgcttgtctgcacgtaggagggaacaagcyggctgcagtaccttcggtggcctctgagactcacctcccccacttctgtccatagacaaagctcctggggagccctaagcctctttcctcatgccagcaagcagtcttggaagcaggctggggctgcagtgggagagatgccaagaccagttattcaagggcagtgaggttgccagtcctagcattwcacactgtggaccagcacagctgctggctgaatactgcagtcaagattctctgaagggagtcmtatcccttccaaacatcttcagtttacttgcagataatgtttcttcattttttattttattttattttattttatttttttgagacggagtctcgcaccatgacccaggctggagtgcagtggtgcaatctcagctcactgcaagctccgcctcccgggttcatgccattctcctgcctcagcctcctgagtagctgggactacaggcaaccgcaaccacgcctggctgattttttttgtattttttagtagagacggggtttcactgtgttagccaggatggtctcagtctgctgacctcgtgatccacctgtcttggcctcccaaagtgctgggattacaggcatcagccaccgcgcctggccatgtttcttcaattttaaacaactgatatctcccttggccatgaacgaaaaagaactgcccatcagtggagtcagtcagggcacataagacacactgtgtccaccatgccatttcagaggagatttgattgagttaagcagggaaatagagatgttgtaaacgttgaaactatctgggtatccctctttggttattaacattagatgagcagaaaaacaaatgtcaccgatgggcaaacatttaaaaagtctggcagtaccaagtgtggaaaaaggtgtggaaggcagcaactcagcgttcattgatatagccactttggagagcaattcagccttatttagtaaaaatagaaataaacatactccatgacctaagacttcaatttctggatatatagaaactcacacagtacagggagacatgtactacaagagtattgattaatagaagaaacttagtttaacggggagggagagtggccaccagtaagacagtccataaataaaatggtctgttgtacagtggactagtgtaacagcttaaatgaattagctagatccatatacccactggatggatcttaaatgtgctgctgagtgaaaaacaagttactcagtgatatatacagtataccacttagggcattaagaaaaccacaatattatagggttcagtatagacatagatacactgtacatagacttcagtgaactggaaggatatagagttcatgacagtgattgggtgtcaaaatgcatgatgtggctgggagcagtggctcacacctgtaatcccagcactttgagaggctgatgcaggaggatcacttgaggccaggaggtcgagaccagcctgggcaacatcgcaagattcccatctctatttaaataaataaaatagaaaaaaaagtttaagatggaggtggaaagggttggaggagcttggggatggagaaaaaatgaactgtataaaattaaaattcttgtttttgtttttagaaagtaaagagggccgggcacagtggctcatgcctgtaatcccagcactttgggaagctgaggtgggcggatcacgaggtcaggagattgagaccatcctggctaacacggtgaaaccccgtctgtactaaaaatacaaaaaaaaaaaaaaaaaaaaattagccgggcctggtggcgggcgcctgtagtcccagctactcaggaggctgaggcaggagaatggcctgaacctgggaggtggagcttgcagtgagctgagatcgcgccagtgcactccagcctgggcaacagagcgagactccatctcaaaaaaaaaaaaaaaagaaaaaagaaattaaagaaaatacagctcagcctttatttgtgtttttttttttttcctttttttctgagacagagtttttcactctgttgcccgggctggagggcagtggtgcgatctccgttcactgcagcctccacttcctggattcaagcaattctgtgtctcagccacccaagtagctgggattacaggtgcgcgcctggctaatttttgtatgtttagtagtgatggtgtttcaccatattagccaggctggtctcgaactcttagcctcaagtgatctgcccgcctcagcctttcaaactgttgggattacaggcgtgagccaacacagccagccatggctcagtgttaatggtcagttctgggtggtagagaggcagatgttaaaacttttttttctttaattcgtaacatagaagcaaacctataaaggctgcygtaggaagaccagtcatagtaactagttcagtgctcttggagagttggcactgcctttcctcctttatccccccgactagaatgcagggcagcccttccagtaaatgttgagccagtgcctcactttgctgaggccatcacccaccttagttgcacttaagaggaccctaaatcagggtcccaggtcccttgctgattttagagtgtggatatcatacccagaaacaccgccctacttttaatcctagtaaggaggcaccatgtcccaggacaactaatgcttcccccaaaccacctccttcaggctgaaaccagttctctgcactgagcagctgggatggaaccaggaaatcctcggcatctgaggacattgagggttctctgacttagggcttcttcacctgaagttgagtggtctttgagggaagtaggcccatttagcatcagctgctcttccctattccacactctagttggaaataggaccttaggttcctgttgacaagtcatttactttcagccccgaagaaataaaagagccaagattttttttttttttttaaagccagggaattttactagaacctacaagtgggctcattttgttctgtgtagcctggtaacaccatactgctttctgctgtggggcctcctggggttaaagtgtgggcttaagacccaggtctcttagctagaagatatcttatcctctgtatcctgcacccatatgcaaatacattattgtcattacccttaactatagatgaagatgaacagtgcctattccagaccttactaggttctgctggcccgtcacccattttgatcatgttgctggcctagtttgattagggcaaatcttagaaactccatttccattgttgaggaagagaactagagagcaggctgacctgaatgccagcgtatcatgatgcagactttctaacggatgcaggtgttcggaagagttgtggatcgaaacgccttcatgatggcttggaggtgtaggtagcaaactgacgtcacaggaaggaacacaatcttgggtacctactggcaacgttggagggagaaagtgagcatcaggtgccatcattttatagttgatctatgtgatgaggttggtatcggagcataattggtacaaaggaaaaatgacttaggcagatgcagactcacgggccaggctattttattagggcagaatgatttggtcctttgtggaagaattggtggagtgaagcgtgaatctttcccagcacaacccaacaacagtcctggccctaagaagtggagcatgggagttgggtgtggttcgtgcctgtagtcccagctacttgggatgctgaggctggaggatcgtttgagggtgcagtgagctataatataatataatcacaccactgcactccagcctgggtgacagagtgaaaccctgtctgaaaaaaaaaaaaaagaaaaaaaaaaagttggagggaggagtgttgggtattttttatgatttttgtctcctggtttctgaagaatggccaaaaaattgtgtctgacacaaaggaaactaatataaaaagccaggagctgtctgagatgagaaaggaaagggagaatagggcmcttggagctgagctgtgattgtgcctgttccaacctgtcactccagactaaggcctcttagagatggtgtctcctttctcacagaggagacatggctctgaggaagatcttactgcaggggctcgggctcaagaataaggctcctggacctgggcatggtgtgtgctgctatcagtggatacgccaggcttccactgctggctggaggttggctctgcatgtctgtgccttcctaggaggaggatgcaatagtgagtcagactggcatgggtggggccacatgtcctggcaggcactgtccaggcagctggcatgagggagaggagtctttcccagaagtccgccctgagaaaccaaggctgggctgctctcctggagccaggggagtccagtgagtgttttacatacaactctaggtacgtggttggtgggatgggcagtttgtgctgggaagaggcttgtggaggattttggagaaggcaggagagctctggccctccctgcaagggaggcttcaggtcagagcctgaggaaagacctgggcatgagatatgaggtctctggctgggtagagagcatgaaggacacatgagatctggagtctggatgaacttgctgacaagcaagctttttttgactgctaatgcgtaaatccactatagaaattttcatttgtcatttttgtacttattggcaaaaaattagagcttataggcatcagatttaatttgagatagttgaaatagggtttgtgtttgaggccaatataattttatctgctaatggcatctcgtggacttggaggcagcccttctgtaccagaacattgtcaaaagcttttactgtaaagcttgagaacaaactagtttgctggatttgggcatgtarctaacaggtttgaggcatgggattatcctgtggactttttttttttttttttgctttgaggttctgaatgtattaaggttgaccttcttaagccgttgaaactgttctgcagtacatttgtgatgtagggcctaagacttgtatcgttttttttttttaatcacaacccagtgtacagaacttgagacatgcgtcttttctctgccaccttttaaaagcagattattcttgaagtgcatagagcagcaattgattaatggaattggtgtcttcacatttcatttacttcctcccaacaattttataggatgcatataaatatttccaaaagaggtacacataatttcttactataaaagtatttttatatttatatcagtaaatttgttaataaagaggatttttttttttctgtaatcctaccaccccaatgacgtcctattaaaatttcagtatatatcctcccaggtcttttaggtatgtttaatttggtgtcccttccccgctcccaaaaggggagggaccaggttcttgtatagaatagtggaatgttagtaaatcacaggtttaaagagacataacagtggaatctctagagcagctgtcacctggatacctggttattaaggtaatttttccattaccccaaagagctttagttacactcagctttttccttaatccttgtgcagctctccagggcacaccgtattcagctctgagcggtctttgctagtgaggccaaggagccaccctgagccaaaaggggagcattatgtcaccggaagcccaaccccagagaaccaaaggtatgacctgatattcagtggccccagccaggtctttacaggaagaccctcatatctcaggtctaagaagagccagctgatggtttttaaaaagagtggaattagttactccaacccacttattcagatcttattttgttcacaatacagtccctagattgtaggcccattggaggccacagcaaagcctttgtgttccagttggcctgatgtgccatctctcagtaatgttcccttaacagccagacttccctaagcccagctgggagctctgaaggtatgcgagccctccctcaaccatgagtgtagggaaagggaccaggggccccaggctttcctgtcagtaatgcagaagttcctmagatttagggaagggggagcagaggcataactttgattctgacaaagaggcattcagagagactgaaaggtcatttaacaaacactggaatgcttccacatactaggtgctaggagatacaaaaccatataggtcctggaagggaggattgattttttcattttggtacgtagtagatattaggggcttaggaaatacacatcgaaatgaagagtgcatttgccatgttgaaccgttagccggtatcttatttccccattttaaaagttttagaatctgtggttgaggacttgtggccatcagttttccatagcyaacagactgttcactactgccttcagagctccttggacctcagcgggccttctttggagatggcagagatggatttagatgtatactctactcgagccacccagagagcccacaaagtcagagatggaacagggtaaaggagtaagggtcatatgtgtgagatgccttgatttggaactttgagatttaggatgaggtggggaagggctaaagaggagcttgttcctgagccttgcttggccgaagcatttaggctcaagcgttttagaaagagtagcccttggtctgagaactcaaggaaacagctttctgatgagacgtgtagcaagcttctggttcacatccttacctgatagttcttcaaacactgcctggtctggttcacatccttacctgatagttattcaaacactgcctggaagcttctcctgagtttttgtctctaatcagctaactaacaggctgagtgagtttagttgtaagtcattaatgaagaaagcaaaggttggggccattgtcagggttgtgacctgggctagttaattacctggaactgatggtctgtgttacagagtggtggtatacttgtcaggcttagaaaagaaatcaggatgtgtatcaaaaatcatttggggaaaagatttgaccagcaactttaatttctctatgtttgcaactatcctgttaatgtagttgtgataatttcagaattataccagtgcccttatgttatccttgctttgcaaattgcaaattgctttgcgtgtcctgacatccttctggccaacagtagatgtggttttaggtttagactcctgggatggaagcttttgcattcaggggaatgactttgggtttgggtgaggattgtaaagaggcaatatgggtgccccacgacaaagcagctatttgtagctttgtgacagcttgacatgcagagatctaggcttatcaaggcactaagctaggagtcagttgtttgtatcactggaagattggttacaacttccttcattggaagctccttcagtgcatgttaaatgatgttatttatagatagggtggtgagaaagctgtctaggtagatgtcagtcagcccagtgtaagagagacctgcttactgtgggtgcttgggactatgtggagtgggtgggasgttttaacttgttcagtaaggtcctttccattgttcacaatctggtgaaccctttttctaacatgaggagcacccacataaccagatcatgtctggcttccctgtggcttgtgtacaaagcgtgcttattgagttaatgtgtaagcaggagacagccttctgtgctaaatggtatattaaccacttctcagtcttaccactctctttcaatttgtctcgacccaggacctcagcagccatgtcgaagccccatagtgaagcygggactgccttcattcagacccagcagctgcacgcagccatggctgacacattcctggagcacatgtgccgcctggacattgattcaccacccatcacagcccggaacactggcatcatctgtaccattggtgagtgggtgtgccccttcccccaaaaaagggcttcatgggcagtgacctttctctcctgaaaagagtaactaaatgtcctaacaaacctaggtgctacatgggatactacacagattcttatgaaaggactcaggtcataggaagttgcagtaaagaattagtatgtgcataggatggcaaatacagttaataagagagtattagacatttcaaaattgctaagatggcgaggtatggtggctcccagcactttgggaggccaacgtgggaggattgcctgagcctcgaaatttgagaccagcctgagcaacttagaccctgtctctccaaaaagtgaaaaaaaaaaaaaaaaaattagctgggcatggtggcatgcacctgtagttctggctacatgggaggctgagacaaagatcacttgagtccaggagattgaagttgcagtgagccatgatcacaccactgcactccagtctaggcaacagagcgagatcctgtcttaagaaaaaaaaattgtccgggcgcagtggcacatgcctgtaatccagcacttcgggaggctgaggcaggtggatcacctgaggtcaggagttcgagaccagcctggccaacatggtgaaatcccatctctactaaaaatacaaaaaaattagccgggggtggtggcgggtacctataatcccagctacttgggaggctgaggcaggagaattgcttgaacctgggaggcggaggttgcagtgagctgagatctgaccattgcactccagccttggcaacaagaacgaaactctgcctcaaaaaaaaaaggaagaaaaaagaaaaaaacatcgctaagagtaaatttcaaatgttctcaccacaaaaatgttaagtatttgaagtcatggatatgttaactaacctgatttaattattccacattgtatccaaactgtatgtattggattacataactttgtaacccaaattataaattaccagtttataataaaaaataatttgttgcaaaaagaatccatatggtttaggttttatgctataggcaaaatttagaagatgttttccttagcaggtctttgtaggagcaacttaaagacctaggaaagatctttctaacatgttctgtgctaccaagattctgtggttggacatctggctgggtttcagtgagggtggagaaggctggccaagtcttaacctaggcttttctgatacagtgggagcctgcagaacttgaaggaaatggtcgaagtgtcccagtagatcaagaaagtaagctggyacggtagtagccttccatgcactttttaaagacttttgagctatttgggagaggaaaagttttcagggaaaaaaattctttaaacttaagcaaacttaaatgtttttccttctttgaataattaatacttgtggctttaaaacttttcctaataggcccagcttcccgatcagtggagacgttgaaggagatgattaagtctggaatgaatgtggctcgtctgaacttctctcatggaactcatgaggtgagctgtggctggaccctatggccattgtgatggcctgtaggaaacagggagggggtgcagtgttcgtttagccacagtggactagacaaggatgagtctgagtttcacagtcagtgtgaagtttgtctttactagcccatccctactctccttccctcttgtcctgacaaagcaactggctgagtctcttttagcaaaaaggaccccctttgttgctggctgtggttctcccacacacctctcctacccttagcttttacaaaggaagatatggaaaggttctactggaaaaccctctaagccttaggtgtcctggccacagcgcttgactctcctgtcccagggtttctgcttcaccttgtrttgccatggtaaaccatctagcagattgattctagcttagaaccaaaataactgggcaggtccatgagaacggtttccactattctaagttttgagggactgagcctaatgcataagcactatctggggtgtaataccccacttcctcagcactgtattctcagcctgtgccttcccaggggttctggtacattaaaataacaccagttagcactcttccccaggagcctagtaggactgtatttrtgctgggctctttattagctggctttacctatggacagaggccttgcccaggagccaggtagcagctgttgggatggctccattcctgcctccattgccagatttagaattaacccattctgaggagcttggggttccctgaggtaccatgacttatttatttttttattttataaaacaaaattttgctctgtcatccaggctggactgcagtggtatgattatggctaactggatccttgacctcccaggttcaagtgatcctcttgcctcagcctcccgagtagctgggaatacaggcatgcaccaccacacctggctaatttaaaaattttttkkggggaaatgaggtctcactatattgccttggctggtctcaaactcctgggctcaagtgattctctcaaatgttgggattacaggaatgagctaccatgctcagcctgggattgtgcctttttaaaaccttcagacttaaccataggtttcccatagatcatgggatttcgtaatggcattgataagaggaattacagaagaggcaaactttgcacctgtcttggcttctgtatttcctgttgagagtaaagaaaatgctatcctgtaaggccaattgccttacagaggttgccctctggcatttggaagttggtattaagtttggactaaaaataaagcctcaggaaatgcaatccaagagtgaattcctccttttgggaaacacaagactcttcatcatagatwccctaacctgtgttcataaacagcctatggcctggctagtggctggcccttaaatgtcatggggacctgaccaagtccagcagacataccatgtaggttaagacatgtccctgtaccttttggaaaattctgtagttttccaaaagcaaggggtccttagcaggagtcaccgagaattacttgttagagaattaagtgttagcttagcttagagagagctgaagacaatgctggaggtctgttcgctgttgatccctgctgctgtagtctgccatgggctcctgcattcaggggaaggagcagaaatagatttttaagaagttgacctttaagtaggctttatggttccttcatccagtaaaataacaccacatagctctaacatggcaagggcgagtgatacctgccacacctgctggatgagagctggctccgattttggtattttaaactttaagaggcttttggagattatctctactttcactcctattcccagattataattaagatttattttttattttttatctatttattttttaaagatgtccctcttgtgtgttcattttgaagttttagaccaagatgaggttgtgtgtgggctcagcttggaaactgatctgaaattattctaatttatataatgtaatgtaaacagtttcagccttaccatacgtcagggctatcgtttcatgtgcacctttgactaggggctggggcgtacttttccagtttctgactattttaaatgctcttctgagcagaacgttgagattactgtcttccctctcactctgacagagggacatcaaatgtctgcatctgatcttttaacagctttttttttttgagacagaatcttgctctgttgcccaggctggagtgcactggcacaatctctgctcaccacaacctctgcctcccaggttcaagcgattctcatacctcagcctcctgagtagctgggattacagacctgtgccaccacgcccagctaatttttttatatttttagtagagacggggtttcgccatgttggccaggctggtcttgaacttgtgacctcaggtgatccgactgcctcggcctcctaaaggcgtgagccaccacgcccagccctcttttaacagctttggcaactagtcttcagccctcacttttggcagttcacatgggcaagatgcattcttgctgaacatgtggttccatatgccatgttttccagatttatttatttatttatttatttatttagagagggagtctcgctctgtcatccaggctggagtgcagtggcacgatcttggctcactgcaacctctgcctcctgggttcaagagattcttctgcctcagcctcctaagtatctgagattacaggcacctgccaccacacccgactaatttttgtattttagtagagacttggtttcaccttgttggccaggctgatctcgaattcctgacctcaagtgatccatccgccttggcctcccaaattgctgggattacaggcgtgagccaccacacctggcctagaaataatgacttttaaacaacctaaatgtagagccttccacaggacagcattgatggatgctttaccacataacatcccaataaagccacagctgaagtggaagactcagtacacctcccagagatgctctaagagattatgatatatgacatagatttgaataatatacctaataattggtatgtttataatatatggttttacatccccaagaccaaaaatgcatgtttgcatgaaacactcatggttacaaaaatatattaggccaccaaaaaaacccccacgtttcataaagtagaaattatacagacacattctctgataaaattttttagtggaaattaagaacaaagtcaagaaaactgaagtgtgcttactttagaaagcaaagatctcaaggtagatgaaataaatatttaactcagaacactaggggaggaaaaccctaaaaaggrtgaagaaaataattttgtaagattatagctcaatgaaatgaaaataaatttgacagattaagctaagagctgattctttgtggggaaaaaatagtaaaatagaaagttctgagaagccaggtgaagaatgcgaggatgtgcaaataagagtatgaatagaaaagagaatatttcctacacattggagattttaaaagtcaagaaagacttataacttaattcctatatagagagatgactctggctattttcaaagaaaagataaatatccaaaagatagaaaatatgaatagaccagtggccataagaagttgaaaaagtgggctgggcgtgcggtggctcacacctgcaatcccagcactttgggaggccaaggcggagggatcacttgaggtcaggagttcgagaccagcctggccaacatggtgaaaccctgtctctactaaaaatacaaaaattggctgggcatggtggcacatgcctgcagtcccagctactcgggagcctgaggcaggagaatcgcttgaacctgagaggtggaggctacagtgagccaagatcgcgccactgcactccagccaaaaagttgaaaaagtgattaagatctggttcacctcagaacacttaagtccaaatgattttagtggctgaattgtctccccttcaaagttcagttacattgttaaactgttccagagcctagagaaatatagaaatcttcccactgtgttctttgaaaccaatatacgctgatactgagatcaaacaaggacagtaccaaaaccaggcaggtactaacagttagtgtgctagaccagtctcacttagatgcagaaaacaaataaaatttaataatccaaatccagtagtgattgaaaggaatgtcttgatccatgaccaagtagattttattctaggagaacaaaattctacatcgggattaagtagagttaaggttgacatttttttttttttcttctgagacggagtctcgctctgtcacccaggctggaatgcagtggcacgatctcggctcactgcaacctctgccttccgggttcacaccattctcttgcctcagcctcccgagtagctgggactacaggcgcctgctaccacgcccggctaattttgtttttgtacttttagtagagacggggtttcaccatgttagccaggatggtctcgatctcctgaccttgtgatcccccctcctcggcctcccaaagtgctgggattacaggcgtgagccactgcgcctggcctgagttaaggttgacttttaaacaacctaaatatagctaaatatagagccttccgcaggacagcattgatgtgtggaactcttatccacgtgataacatcccaacaaagccacagctgtagtggaactcagtacacctgagtcttatcattataagatgataataggtaacatttattagataattaccatgtactttgtcctaatacttcatgtattcttttactcctcacgtcaactctgaaggaaaggcaccacctatccccttaaaagaaaacaactattactattctttttttttttttttcttttagagacggaatctcactctgtctgtcgcccaggctggagtgcagtggcacgatctcggctcactgcaacttctgcctcctaggttcaagtggttctcttgcctcagcctcctgaatagctgggactacaggtgcacgccaccacgcccagctaatttttgtattttaagttgagacgaggtttcaccatgttggcctggttgttgtcaatctcttgatctcatgatccacccgccttggccttccaaagtgtttagatgacaggtgtgagccaccgcgcccagcctctattctattctattttgttctatttctattacaagccagtaagcaagaaaatatcataatttataaggaaccctataaaaaacagacaagccaagggtctgtcattaggaagtatgcctgaataagaagctgaagatttttagacacaggtttcaggcaacactgtctttagaggctaggctctggctccagctccctccagcctcctgtgaataacaggcaggcttacttgcaggtgccactttcctggacagtggtggttaaaggacaaggcccagaaagtgctgaattaggtgcccttgttaccgctaatgtcatattgatgacactatcttagagctcttttgacatcttggctctgcgtcttttttttttttttttcttgagatagggtgttgctttgttatccaggccggagtgcagtggtgtgatcatggctcactgtagccttgacctcctagacataacccacctyagcctcacaagtagctgggaccccaggcacgcaccatcatgcacagttaatttttgtgttttttgtagagacgaggtttcgccatgttgcccaggctcatctcaaactcctggcccaaactgtcctcccaccttagcctcccaaagtgtttggtttataggcatgagccrctgtgcttagcctgagtccctcttttaaacaaacaaaatggtaaatggaaaggaggaaaggcttaagaaaaaagattgaagccaggatttgttgtaagcaaggagtaataaagggcagttcatttagagaaaggcatatgaccacctttccccctccaatcagaatctagaaagtgattgaggccgggcgcagyggctcacgcctgtaatcccagcactttgggaggccgaggtgggcggatcacgagatcaggagatcgagaccatcctggctaacatggtgaaaccccgtctctactaaaaatcgaagaagttagccaggcgtggtggtgggcgcctgcagtcccagctactcgggaggctgagaggcaggagaatggcgtgaacctgggaggtggagcttgcagtgagcctagatagtgccactgcactccagcctgggcgacagagcaagactctgtctcaaaaaaaaaaaaaacaaagcgattgagaaaatcaggtctgtgtgaccttagcaatgagttatttagcttgggccactgttagcttaagtcaataacttcaagtttgcgttgtagttggaatcaatagaggaaaagctctcagcattaccacatatatcagaatgtgacattgattgccagaccagccttatccaaacacaagtcctaggctttttgccctgtttatgagctttatatgctgagggtatttgatgagtcttagggaaaaaagaacagccctggggacacagctgcttttatgatgagacatgtttgcacccataccttaatgggttttggtggcaatattctgaaatttgccacctacatttcaaagatttgccctttgggtgaattagtgctgtagtagaagtgggtggaggctgaggaggttggattaagcaggtagaggatttctcagtgcatggatcgtgctgaggatggagatagagctctaagacatccacgggcctttcctgagtgatcagctttggctcctgggcaggggaattggagctggattctagtgtgggagcacgcttgtcatcttccttcttttcccccagtaccatgcggagaccatcaagaatgtgcgcacagccacggaaagctttgcttctgaccccatcctctaccggcccgttgctgtggctctagacactaaaggacctgagatccgaactgggctcatcaagggcgtgagtattctgcggagagcgaggggaaggctcagtaggcaatatgccccagagacatgtcctccaaagcgctgggttgccatgtttcttcccagtactatgaaggactgcagaggagttgaggtctacaaatgaggatttattcatcactgtaaacaatgttgatttgatctactttgctaggaaatggtaccacaaaggaaccttttttttttaccctaaaaacctaaactttaggctttctaacttggagaaccatctctttgtatctttttccccatcattaagtagcataactgaaacatattcttttcttggattatttccgtgaagtatacagagttagagaataagagcaaaaaactgtattacttttagcagtgacttgagcattgttcccgggaggaaagagcttttccattccttctgaggtgatgctgctactggtgtctccagtttggactcttgcttactctcttgtccctagagyggcactgcagaggtggagctgaagaagggagccactctcaaaatcacgctggataaygcctacatggaaaagtgtgacgagarcatcctgtggctggactacaagaacatctgcaaggtggtggaagtgggcagcaagatctacgtggatgatgggcttatttctctccaggtgaagcagaaaggtacgtatgggagctggagtccarttgtctaaaacagtcttttgtctctaaacttccttgacacaaggaagatgggaaggttggttgcctggcagtgagattgagtctgtgtgttctcaggaatcccttttataactcatttatcctcaaagataggctttaatccagcatagttacattcttctggttctggagaacacaggaacatacatacatatatatatatatatacatatatatatatatatatatatatatatatatatatatatatatttgtttcgctgtgttttgttttgttttcaagacagagtctcgctctgttgcccaggctggagtgcagtggcatgatcttggctcactgcaacctctgcctccagagttctagctattctcctacctcagcctcctgagtagctgggattacaggcacccgccaccacacccggctaatttttttgtatttttagtagagatggcgttttgccatgttggccaggctggtctcaaactcctgacctcaggtgatctgcctgccttggcctcccaaagtcagaacagtcttaattatccttatttatgggtgaggaaagtgaggtacagagaggttaaatggcttgcccaggattacacagtgtagtaggttttcaactctggtaaaacagctccagcacccataatgcaccacttcccagctcactgtccttgcgggaaaggtgcctgcttcctgttgacctgtgccctcgtgctctgcctcccctacttaccctttttcatacaggtgccgacttcctggtgacggaggtggaaaatggtggctccytgggcagcaagaagggtgtgaaccttcctggggctgctgtggacttgcctgctgtgtcggagaaggacatccaggatctgaagtttggggtcgagcaggatgttgatatggtgtttgcgtcattcatccgcaaggcatctgatgtccatgaagttaggaaggtcctgggagagaagggaaagaacatcaagattatcagcaaaatcgagaatcatgagggggttcggaggcaagtccccgttgtccctgctccagtcccagcgcagctctccgaagggcatggtccatcctgtgaatgtctgattcccagcccctagcccatcagaatgtagactcccaagccagttccaaacctgctgaatcagaatatcttaggagagtagaaggcattatgtttttttgttyttgtttttttgttttttttaaaaaaaagcttcccaggtaattgagatgctggcagcttgacattgttccctgggcctggggaccaacatttgagagaacagggtcactgctcacaggaccaggggccatgatgttctgttcctgatcagaaacactaccagtgtttgctggaatggggggaccagggggaaagatgacagcagacacttaagaaagggctctttttggcccttcctggggagccatgtggaatttcagggcctggtgtccatgttaaagcttatggcctcctggtcttcacttagaatgcagctggctcagtgatcatgctaactctggtatggtccattccactctcagaggaagatgtgtggttcttctccagtttcagattgccccaacttagcttaccccctccccaatgctcacaaagtagagcccagtgggcatggccaccatttttggcatcctgctaggaatacaactcagcacaactaagatgctagacacactcttgtggattagaagtgtgtttggggagggtgggggagcaaccctgtgcacccactgtagtggccttactgtctgagctttgtgtagatatcctctgtaccaggcaatttggggtcctcccctttgccatcctgataagccataggctagctgaacttggccctaggccaggcaaagccacattccctcttgccttcagcaggttggagtgggccacctcaaagggcagtcctcaagtgtccttgactagatgaggccatgggtctttgtggtggaagcagtcatcaggcctcaggttccctgtcttgaagtgctgattggaaaatggaggccctagagagacccctaacatgcatgggatttggagaggagaccttgggaatgagcccatttggatttgccctctcccctttcttccgtcaatgaagcatccatattggtgttgaagcccagcaggcagaattgttggcccactctgggggcctaaggtagctggactgccttgccatctgtgtgcacccatgatgatatcatggatgtctgtcctggtacaaggacatctaagttagggaatcccagggaaacttcttgtctactgccatacttgtggcctctgttctatataacctctctccccccmactttgtccatcaggtttgatgaaatcctggaggccagtgatgggatcatggtggctcgtggtgatctaggcattgagattcctgcagagaaggtcttccttgctcagaagatgatgattggacggtgcaaccgagctgggaagcctgtcatctgtgctactcaggcatgtgcccacccttccccacattctcatgtgcacactygcatgtttgtatgggaaagctctggaggctgtctgatctcttcccatggaattgtcgcacgtaacacacagataatccccttcccccatgtacctacacaaagccatactctgtgtacctactcactatccagaggatcagcttgctgtcatttgtctctgaagacagctcaagcyacatctcactaatgctctgtcccctcccagatgctggagagcatgatcaagaagccccsscccactcgggctgaaggcagtgatgtggccaatgcagtcctggatggagccgactgcatcatgctgtctggagaaacagccaaaggggactatcctctggaggctgtgcgcatgcagcacctggtgagttctggggcctgccccatcccccagggcttyggactgggcctgggatggatgcaagctctggtgcagagctttttaggtttctccatcctcttatgcacagcctttcattatcctccaagttacagcagcaagagggtgggggtggaagtggaggtggcttttttttttctcctgttctgcattcctgcccacacccccacccctccatttccttctgctctggaggcatcctccttcattggacaccacacagtttatttcacttctgacttcaaggttgtgaattcttcccatggcttaagtcctgggatacttctgcagtgaaaggaggtcttgtacctcttcctcagagtcagaagttctgagtacctttgccctattctgaaaagggctaggggctcctgctcccagctgccctcttcctttggcttccaattcagttccctctgccccgcatcctgcagacaggcgctcccgcagggggcccttgtggacctgcactggagtctgttgccttcactgagctgcctgtgctggccttgcatggtgcctgtagggggatttgctttgctgtgccattggggtacagctgctgctcttactctagaccaaaaagtcgggttgagtgactggtggcagggccacagatagagacagcggggagggtggctgaccctggcggccctggactgagcgtctggaggagtcgtggaggctctttcccttctttctcctctgagagctcgttcttcaggctcttccagcttgtcatgtcgagtgcctggccactgctcagggttggaggctcagtccctttgccctgtctgttccagctctggagctaactcagggatccctgatcagggttacrtaggtttggtaaaatgagtgctggaaattaactttctcccagtagtcttaggtcwwgctcagtgaacttaaactttatccagatatggttttccttcagcctttctattccctttctagccagtgaaagacccgctgccctttgacctcagcccctccaagcccccaagtttaaaacgccaccccctgccaccagaaaaaacagaaaaaaaaaaaaaaaaaaaaaactaaaacacccatctggtctgggcatcttcctttcctttttcactatgtatcctgttactgggcttaaacagctttcagagaagagatgtcatttctattaaatgctctttcagtagcgaactgagttcacacttgactaaggatattttccggactgtctgtcatcagcatccttagtgggtttccccatatttaaattggtagaggccagggatggtggctcacacctgtaatctcagtactttgggaggccaaggtaggtggattgcttgagctcagaagaccagcctgggcaacctggtgaaaccctgtctctactaaaaattcaagttagctagctgggcatggtgatgcacttctgtagtcccagctacttggagagggggtgrtgctggggcagcaggatcgcttraacccaggaggttraggttgcagtsagccaagatggtaccagcctaggtgacaaagtgacaccctgtctcaaaaaagaaaccaaacaaacataaaaaaaaaamcaaaaaaatcggtagagagtgatttctctcccaggcccacttaatgtagactgggcctggctgacacctcaccattcgtgtgatgtgattgctgttctgatgcttagatactcttggcgcagtctcacaattgccaccatggtaggaaggtgtcccaggagacggtgcaccttgaaccagtcaccactaaagtggctgcctttctgggtctctccacacatcccctctctctaatttccctacttaatcgtgtgacttcatggtctcaaaggaggaacagaggctgatcttgacttagatatactgaaccatgaaatcactgcatagaatgtggggacttgaatgtgtctttgggcaagtcatttaacctcttaagacctcatctgtaaaatggattagatatgtttaattatagccttagcattaaatattcattgctgttattattaagtgtctgataagtctctgtgtacatggatgtaatcttcctaactcccattacctccatttatagatgagggttatatggccaataaagcctgggtttgaatctaggtctactgcctccaaagccagtcttctctcctgcaacatcatgctctgtctagcaggagatgagaacaggtctccatttggagcctgtcagtggggtcagagactaagattcaggctcagggtctaaattccrtatcctttcttccataccctggtgtttcctatgaacagatagatactttagggctgcaaggtttggattgcatggcactgctcagaagataagttacaggtctgggctaggctgtagctgcccctccaggtggctagacctttcctttctgtgtcaccagttaacactggccaacagttccttccattaactgttcactgctttctcctgtgtctaactgatgcagtttatgacccataactaagagcagtaccaggtatggctctgtttcctgttcatgtcccctgtcctctgggctgcatgcattccgttcttacagaaagaatacctttaacctagtacmtcctgccacacatctgcttctactgtgaaattgatgagggggtattaccgattcttccctcwcccatcatttactgagatgctggtgattgcattataatcctctwaagcttacattgtctttctgattcttggtcttatctgagcaagtgatctataaataactcagtggctttctcatgactgttttaattattagattttaatcaagtgtcttattaaatatatctgcatgcttccacaggcatctgtctcttcacatggctgttcagtgtgcctctcacaagttagcccacgttttctgttctcctgcttcaaactcagttgagctgccttgctttggctttgatcccagctttccagcgctgctcaatctgttgccatggcaggccattggaaaggctcagtkcatccccgtgcctgaagccaagtgagcgctcactccatgcatgcatggaggctgggcaggagcctgcctaatcaaccagccatgtgaggagggagggcctgttccttcctgtaagctatgtcatgaggcagcgtggtcaagtcctctgccagggagtggcctgggcccagcctgggcatgttttcatgccagggtgctagagcctactgccagattgtctccctccacccccaatgaaaaaatccttccagaagggaagagccaatttcccctgtattggaggggaagtggcagcacctcctgaagcagttggactttcatcaccctacctctgcatctgcctgaaggacagatttagccaattaacctaaggttaccttcctctctgataaattccccattctgtcttcccatgtgttgtgtctcgtttttttcctcctccttccctcttccttgccccctcttcccctaaaccttacagatagctcgtgaggctgaggcagccatgttccaccgcaagctgtttgaagaacttgtgcgagcctcaagtcactccacagacctcatggaagccatggccatgggcagcgtggaggcttcttataagtgtttagcagcagctttgatagttctgacggagtctggcaggtagggccctaagggcaggtaacactgttaggataaccagcctcttgctscacctgcycyaggagaagacagccaggcccaacctggcatctgggmacagagcctcttctcgtctgtaggaacaccgccagggaggtcatggcagggcaggaccaaagggtcctgtggctcagtaggcacagtagatgtcacaggcacttggtgaaggactggtttctgtggagtcttgatcttggctcagctcagaatctccagtgattgggctcctcttggcctttgttcccaggaacatgttcctcaccagctgtccggtgactcttcccctccctctccttttgtgacaaagctctgacaaagctctgtccccctctcgtccctctggacggatgttgctcccctagattgcccgtgaggcagaggctgccatctaccacttgcaattatttgaggaactccgccgcctggcgcccattaccagcgaccccacagaagccaccgccgtgggtgccgtggaggcctccttcaagtgctgcagtggggccataatcgtcctcaccaagtctggcaggtaggaggcggcagcggctccctggaatgccctgctcagtggtacctcaccttgggggtcctgggagcagtccattgaacaatgctcaggtggcactgagccaaggtaagacccctctgcctgccaccttgggcctgcagggaaggattgagcagagccccttcccwgggcccaaaggactctaggtagcactcataaggaatgtcagaacatttggatcaaaagcaaatttatgctggagatttattacataacagtgcacaggctgactacaaatggttatttgatattgaaaatttagtcctctaaaattgtaaaagataaccacttttgcttattccagttactatgtgctctttaaaaatttcagttgggaaatgaatttatttaaatgctgtttactgtgcctccatttggcacactagtccctgctgtttttgagccctaaagacaaattgggttccagctcaggagaggttgctgtgctatcttggctgacattctgtggggcctggcagccaggctgaggactgtgtggcctatgctgggcctccaacttgggatcccttccttggcccaggacattgagttaatgtccttcactctcctagttagggagtatgctccttgtccctgtccacagggsagcaagggtttcctggaagaggggagcaaacaggcagtgcccatgcactgaggagcagcagatgggcgtgggcagcccagagaaccaggacacaagctctgtgcagatgccctcagcagagggctccagcctcccactcttggctgaacagctccaacccgtagggttgacctttcttaaaaggtccagttcttgctgtttggctattttaagctctagtcttctggggtttcactcagctggtcctggcttcagcaattgcttccctctgaaggccttgcatagaggccaagcgtgaagtgcagggacttctctgctgtgatgtggcttaagtttccctgacacctgttgagtgtcctcataacttcccttctggtgcccctccccagctcctgagacayagctgcagctacaagtgtgcagtgtcagtgttcaagaaagtgcctggcagaggggctttagaagggtcccctgccttccaaaggagctttggcaggcagasstgctcctgcagcaacactcccatttcctgttcttgcctgctgagtagcacctagatttctaagcctcatctagatactcagatttgattctgggcctttatagcccagttgctgggactgtttcaggagctaggggccatgtggggcagggagagggcacaaaagtagagaagcctgatgttgattcccagggggctggtcagctctgctactgctccttgcagatgtcaagagtcaggtgctagtcacgtgctgcttggcttgtcactgtcattggcagcgagaggaatgggtgctggtgacattgggccagggctgcctctctgtgtcagagttcagggtgtaggaggggttctgccaaccatgggctgtgtggggtaagtgggtgaggctgatcttkctgggtcaaggtgatcctgagcccttggcctgtggaatgggggtagagggcaaatggtaacctagcatgctgtgggggatataggatgaggggctgcccgascctcgggaggggtcctagggagcagatgttgaagaggccagagccctcagtgagctggatgagrgggtgagcygtttgaaykccctgagggtacttcctggggcctcgtgtaatggtctcttctgtatgtcccccatcccatctcaggtctgctcaccaggtggccagataccgcccacgtgcccccatcattgctgtgacccggaatccccagacagctcgtcaggcccacctgtaccgtggcatcttccctgtgctgtgcaaggacccagtccaggaggcctgggctgaggacgtggacctccgggtgaactttgccatgaatgttggtacgtggctggagcaggggctagagcctagaggakcttggggatgcttgagcattggcttctgtgggaccccgaaagtttggggaatagaaagrggaacacacagaccttagtggggcaaaaggcccagcgactgttcctctcccttattgggaatgttcattctgaatctctcattctccgaagtcctaagctgagccaggagggaaaagggtcctttgagttgtagggctgagcaattcagttcctcttctcttctagtctggggctcaaagcaaaattgtccattttttggcatctgctcattactgagagttttttttgttttttgttttttttttaaataaaattggccacagctcctgtgctgtggggtggcatacacagattacgtactgatgtggccattgtccctgtataaggtagggtatcatcagatgacaggaagcagctagctctgaccctgggcaaggctttgcaccctctccaggatagtgaatgatgtccaaaggtccctgccaaccctgccatctgagtgataaggacatttcagggccttcctcctgtttgcctgggctgtgagtttggtgccaccttgtggtgtgaggaagtagtggtcagccagcctagttcagtactcaggctatggggcagctgcccaggtgcaaacctgcctggcttggcttttactcaccaacctcccttctcttcctccaggcaaggcccgaggcttcttcaagaagggagatgtggtcattgtgctgaccggatggcgccctggctccggcttcaccaacaccatgcgtgttgttcctgtgccgtgatggaccccagagcccctcctccagcccctgtcccacccccttcccccagcccatccattaggccagcaacgcttgtagaactcactctgggctgtaacgtggcactggtaggttgggacaccagggaagaagatcaacgcctcactgaaacatggctgtgtttgcagcctgctctagtgggacagcccagagcctggctgcccatcatgtggccccacccaatcaagggaagaaggaggaatgctggactggaggcccctggagccagatggcaagagggtgacagcttcctttcctgtgtgtactctgtccagttcctttagaaaaaatggatgcccagaggactcccaaccctggcttggggtcaagaaacagccagcaagagttaggggccttagggcactgggctgttgttccattgaagccgactctggccctggcccttacttgcttctctagctytytaggcctctccagtttgcacctgtccccaccctccactcagctgtcctgcagcaaacactccaccctccaccttccattttcccccactactgcagcacctccaggcctgttgctatagagcctacctgtatgtcaataaacaacagctgaagcacctgtttcctctcttttctgctggggagggggaggtggttgaaccctgccctctgagcaggctgggaatggctgcagcctcgtgccccgcagtgggagctatggtggtgtcacctgccatcctgcccacctcctggtgcagaggcgctgggaaagcagtagcttactatcttaggggttacaggttgcccccttcagtgctgcggggagactttaatggcttacgtgaaccgaagatgggaaagagcagggacaaggcctccctcccactctggtagataaacccaaattgcaaagtggccttggccatggttcttccactttggtcttcctgcattagcgtatcccttatgggggctgtaggaggagtcagctctgggcgcctgagactgggtttggctcccaggtcctcagttgtggacctaggctccccttgggacccctcctgtttgctggtgccctcccaccatgatgctgtagtgccaaagggctgggggagagagttgggaatgggaccaaatctggcctgcgcttttcctctcccctgaccacactcccaaggaccaagtgtcctggtggggatggaagaggaaagggcctgcaggccaggcaaaagctcattgtcacactgagctgtgcctctgcttccctgcctttgatttgtgtccaccttcagcccctttgcagactcctccaaaagtgtatttccttggagaaactgcaatgttaactccggcaaaagtgcgtgggagcatcctggctcccgggttcgtggtggtgacttggctgtcagaccatggtgttcaatatcccctttggtgttccccactgacggtaaaattgaaacttatccggagctctatgttgggaagggttaggttggagaggggccggaattggttcctgcagagggacccaagccgcaagactaggacgacagaagcgtccagaggggacacaataccctcgacgtgagggacaggaggtgccgcgccaggccctggcctccgggacctcccagtccggggaaccgagcgctaggatctgctcagagcttggagccccacctggggaaggtggggaaggagagaagctggggaagctggggaatgagggggaggaacggccaatgggctgtgcccggcccgcgcgacccgccaatgggcgggcgggcggggcgggctctcgacggggcgggcggggtccggcgggcgctgggtcccggcgcgcggtcggggcgctgggtgcaggcgccgggatgaccgctttaagccggagcgaggccaccgaggagggcgggtaaggggttgcggcccgggggccggtctcgggggttccggaggccgccgcgaggggctgctgccgcgcggggcaggacggctcctggggccgcggcaactcggcgcgttctgcccacggggcaggcacttcccggccgccggaatgcgggctccgggccagagctgcaccgcgcgcccaggcgtctcccggggcccgcgaggtgttcgcactaggaccgggtgtcttggctgagtctgctgcgacctgggggatgagggacggtcccggcagcatcggggcaaggaagggcaccctcctcgggacgccccgcatggcccatctccgcctcgccactctgttcatcctttcatttattcattcatcattcgttgcccgcagtatcgactcccagtcctaattgcccccgacccaaaggttggatttccctgcgtcccctggagggccagactgtttcctctcgccgccgaatccgtattgtagcggcccgcggctgcggggaggcagctcrgagctgtctcagcacgacgcggcctcccccgggcgccaggcccatcccggtcgggcgggctggggccggtctcccggcctcgagacctggtccaaagtcgccctgggagaaagggataaggaggcagggcagacaggagctggcgctgcacgtaacatccagaattgtggtttctgctgcttgaggtcttagggtcctgggagtgacattgtttgggggaacctgtcaattcctgccccggtccaggttccaagccgcacagcctaaggtcgggtacagcctggcatcctcggccagctagcactggggcaggtaggatgaatgtgtgagccttgtgtccaaatcagcccgagacacacagggatgtggaccccagcgggactccctctgccttatactcagagggactggtggggctccaccccgctgtcgtctgtgtctctgctctgcttgccgccccactcactatgcttgattgtttaaaggtgcccctccttgcaggggccaggctcctagggaacgagagagggtaccctcgcaacctgatgtcttcaccccatgtccacctgtagccggctctaaagtctggctcctttcagagcaaagacttatggccttgctgggagaggtagaatagagggtgtctatcccattcttcagtgaggagtcagtatgcccctccttcttttttcttttttttttttctgagacagtttcactctgtcacccaggctggagtgccgtggtgggatcttggctcactgcaacctctgcctcccaggttcaagtgatcctcctgcctcagcctcccgagtagctgggattacaggtgcccaccaccacgcccagctaatttttgtatttttagtagagatggggtttcaccatgttggccaggctggtcttgaactcctgacctcaggtgatccacccacctcagcctcccaaagtgctagcattacagggactacaggtgtgagccacgtgcctggccccctccatagtcttctgatcaggctggctggagaccatgctgcagacactcttaggtttaagttttagtttgacaggcattgaggtagcctcagtgggcacctctgggacaaatgggcaggtccagaggggaaagctgacagaggccccatcgagcttccaggagagtttaggctggggccaaatagaagttctccttcccaacttccccttgggagaattttctgaatagcctgaagagggtagctcaagctccatctgtgccttgatgttgctggctgctttcaaatttctttctttttttttgagacggagttttgctcttgttacccaggctggagtgcaatggcgtgatctcggctcactgcagtctccgcctcctgggttcaagtgattctcctgcctcagcctcccgagtaggtgggattacaggcatgcgccaccacacccggctaattttgtattttttagtagagacggggtttctccatgttggtcaggctggtctccaactctcgacctcaggtgagctgctcacctcagcctctcaaagtgctgggattacaggtgtgagccactgcacctggcctcaaatttctaaatttagcaaggccccaaagctttggcacagaccagagagacttgtatgctaattcatccacctagggtgctcccgtgaccccctgaggttgaggtcggcagtacccaaggtgggttgctgccagctggcctcttggaagctctcccatgagctgctgcgctgttagtgcctcctgggtggctccaccccgcccctaacctgcttaggttcgctctggtccttgcctgccacggaccatgtttatcagctggagggaagagcctcactctggaatcagaagtgagttctaagcctcaggctgttcctgttttgctgcgacttgggacaagtcacttccgctttctgggcctgctttacaccataaggtaaggagattggactgtaggttccctaaaggccttctgcatgcagtcatccagtgattctcctaactagacacttctagcagcttcaggggaagtttgtctacactcatgctacagtattttcagcaaatgtgattggacaagtgggcctgtgccttatcttttggtggagtgaaaaaatttgggccagtgaagccaaatccttacagcaagcagcatgcagcatacctggctctttgctgattgcaaataggcatttaaagtatgaatttgagccgggcgcggcggctcacacctctaatcccagcactttgggaggctgagacaggtggatcccctgaggtcaggagttcaagaccagcctggccaacatggtaaaaccccatctctactaaaaatacaaaaatgagttaggtgtggtggtgtgtgcctgtaatcccagctacctgggaggttgaggctggagaatctctggaacctgggaggcagaggctgtagtgagctgagatcacgcaactgcattccagcccgggcgacagagtgagactctgtctcaaaataataataataataataaataataaagaaaaaatatgagtttggaatcagatatctccattacttccagctaaagcgtcatcataggtatttcctaagttttaagttctggataaaaactccactggtgcctactatctccaccatgaactctgttaaggaaccttcacttttgtatatgcctgctgttttctcttcatttccctgtcttctgcataagcatgccctcttgctaagtaattcaagcataaggtcttggaatactaaaatcataagcttaggagaaagaataaaataaaacttattccccgtccccccaaaatccctccaatttccttcccagtttcggaagatgtttcatttattttcagaatttctcctttgctgtggctacccatggaaagcccttgaagtcaagaacggtgtagcattccactctgacatctggtgtgagcctgaacaccagaaaataatttttctcccttccaggaaagtgaaaatgatttccctcaattctgcagccatctctgatgcaagtgtgagtttcacttgaggtcggccttggccactgtgcgctattcacctggacttcagggcatcagtctgtcaccacctgtcatcaccaacctttgaagctttaattccccagttatttgctaatgtgggaaaggaaggaggagggggagggcagaagcccctgggaatggagcttcctgtgtaattaagaagtaacagcctccctgaggtgcacctgcgtgctccggcacagattccaaaagacaggcattgttctcagggatataagccactgtaggagaaagtgattcctcgcccctccttcccactactatacatttttattagtttagaaatgcacggcctggcgcgttggctcacacctgtaatcccagcactttgggaggctgaggcgggcggatcacgaggtcaggagatcgagaccatcctggctaacagggcgaaaccccatctctactaaaaatacagaaaaaaaattagccaggcatggtggtgggcgcctgtagtcccagctactcgggaggctgtggcaggagactggcgtgaacctgggaggcggagcttgcagtgagcagagatcacgccactgtactccagcctgggcgacagagcaagactgcgtctcgaaaaaaaaaaaagaaatgcacaagccgggtgtggtggctcacgcctgtaatcccagcactttggggggctgaggcgggtggatcgcctgaggtcaggagtttgaggccagcctggccaacatagtgaaaccctgtctctactaaaaatacaaaaaatttgctgggcgtggtggcgggcacctgtaatttcagctactagggaggctgaggcaggaaaatcgcttgaacccgggaggcagaggttgcagtgagccaagatcacaccatttgcactccagcctgggcaacaagaatgaaaaaaaaaaaagaaatgattggtcatcatttaggactggaggcgtgttttaataacctgtggcgactgaaccaatctttatttatttatttatttatctatttatttatttatttttgagacgaactgtcactcttgttgcccaggctagagtgcaatggcacgatatcagctcactgcaaactccgcctcccaggttcaagcgattctcctgcctc

SEQ ID NO: 94532 - DNA, 12384 bp, Homo sapiens
ggccgggccgggcttggtcagggagcagaaagaacctgcaccgcagggcggggttggaagggttcttggaaaggtgggcctgggtcaggtcggaatgggccttgcagacctgacggggctgaggctggtgcggccagcgtggcagagtgcaggaggaaggaccacaggtaacggcggttatgtaagtcatgtctgatccgtgtcctgggttcgttcattcatcccatacacgttcaacgagcgcctcctaggcgcagatgcagggctgagcaccaggctggggagaggcggttatagccattgagaccaccctaaggccaagaggaagcccgcagggttctttccagcaggtggcaggggctcagggatccttactgaagaagtggcaggggtgagttcagcgacgaggctagggcgggtccaggccagcgatagggcctggagccagggtcagaaagtgtgtgcggaggggctgctgaagatgaaatgcccccaagagtgaggctacctggggtgagggcccaaagggagaggcaaacatgggtggagggggatagggaagccacctcccccatcaaagcggcaaccacctgagggctctcggtgatcacaaaccctctttctttggaagcccaaattggaagcctgcttggccctggaggctgccagggaacctctctttttttggagacagagtctcactgtgtcacccgggctggagtgcagtggtgcgatcagagctcactgcagcctccacctcctgggctcaagcgatcctcctgcctcagcctccagagtagctgggaccacaagcaggcaggcaggccactgtgtttgacttctctcctttcattccttcaacacttcccctgtgcttgcttgcttgctcagtggttacgaaaaaaagccggggctgggggtttgaacacactgttctaataaactttagaagagacctggttgggtgcagctgtgaggaccagattcccccaccccagccttcgcagggggcactatctgggggcaggagcttgcccagggcacttgtgcaaaggccctgaagcctccagtggcaacaggtggcttcacaagctgaagggagtccctgggggctgaagccagggctggccagccttggaaccccccgtgggctatgtcctgaggcaccaggtgcgttctgggaagggggaggcagacatcacatgggaatgcacagaaacagagcgcatacacgcctgcgccatttatttagaacacagagccgggcacagtggctcatgcctgtaatcccaacgctttgggaggccgaggcaggtggatcacttgaggtcaggagttcgagaccagcttggccaacgtggtgaaaccccatctctactaaaaatacgaaattagccaggtgtgatggcacggccataatcccagctactcggcagacagaggttgcagccagctgagactgggtgacaaagcgagactgtgtctcaaaaataaagaagaaaaagaaaacaactcctttacagaagaggtgggagagtcactagtcacaagaacagccctcgagggtggaagggcctggcctaaccacggtcccccaggagggccctggagagatgcagagcccagaaccgggaagggagccttgggatggagtcctctggggagggcccccacgtcctcatcccgggacctgtgcccttggccttgcccttcagcagaagcccaagaccagggtggcaggaaacccactccaggcaacctgcccccagctgctgggtcctgtcccgcaaggctcatcactttttctacttgaggtcaataaaaagtggggcctaaacacccctgggcctcccattcccaaatggggtcccgatgcaaccacagttgcccgagacgtgcgtgcactacacaatgtgtggcgtttcctggcaagggccggagcagctttccgtgtctgcactccatcctttgacgggcaacacacagcagctcccagtctctttaaccccctctcaccatctgtgtgcagtccctatctctgggcagggcagagagggaagccagctctgtgcacagggcccagctccacacagggctggggacaccacccactgtccgagaggcactagaagctgcaggatggtggcccatgatctggggctggaactgggaccccacagcaggtgtggcccagccctgggggagccagccctgggccagcttttgtgagggaaagtttcactgctctgttttctctgcgttgatgggaagagaatcagtcccggctgcagggacagtggcctccccggggcacatgcagaggcctcaccaggcaccaagaccaagaccaccacaaaatctaaaatccatacaaacatttattctgtccctgcctggaggtgagggggaagggggtccggagagccccgcagaggaggacggggctctagcgggaagacagtgtccggaggccggtgggctccctctagacggcagaccctggggctaacgaggggccagctgggttctcagaggtcacggagtgcaggggtggggcggcgagtggtggaagccggcgcccccgaagaccggccagcccctggagcacagaggcgggtccagcccacactgcgctgagtgtggccctggcccccactggggtctgtcccacccccaccccgcaggagggaaggcagcaggcccgctcttcccggtgggaaagatgctgtgcaagtcatcaggtttaaattaaaaataataaaaataacaatacaaaataaaaaaagactgtctcaaacaaacctgggacaagcccgccccgcgacccacgtgaggagcagaggtgccggccaccacccgggagggagggcctggcaggaggggcaggaggggctgcgggccgggtgggggcgggctctgtcctggtctccatcagcagcagtttctagagacgccagagggctggggggcagagggtggggaccggcggaggggtgcggcaggacgtgagcgggggtgggctgggctgggcgttctctggccgccagctcatcccgctgctctgggctgcctcggccaggtggacgggttaccggagatttattgcactgttttggaagaggcatggggctaaggaccagcgggacggcaggagaggcgggtgggaggcgggcaggcgtcatcgcttggtcttggcgtcttctcgaaccttccagatcaccaggtgcatgcaggcgccggcgtcctcrctggagctgtgcccatccactgcggggcagatgcggtgagcacccggcccctgcgcagggacggccccagggcaggcaccggcactcaccattgtcctggatgatctgtctgaggtagtcggccatgaggttccgcagggaccgcttgtaggggaggcccaggcggtgggggaagagcacagacgtgtccaccacggtgctgtggatgacctgtgggcagcggcagagatcagcgcacgtggggcctgcgcaggtcctgctggagaaccgcgcgggacccgggccggcagggcaccttcagggccaggaggtcgctctccaggctgtgtccgatgaggatggtgtcagcgctgaacatgctcagcagaacggcctggacgtcacgcagcgtgacacttgtgtcggcaaggtcagcctccgtcacccccgaaaacctgggggaacgggcaggaggggcaccagggctcagcctggaagcactggctggtggggcgggggagggtgggtccctggggagaggcggctgggagggctcccagctcgtggagggcactggccacacctggtgttgtagtccacgatctcgttgtcaggcttcacgaaggtgtcataaaccacgtgcacgtccgtgtcgaccaccgtgacgcgcgtcagctccaggccatatgtggtgtaggactgcgggcaagggatgcacctcagatgtgtcccaggcaccggcctccctccctccccttccctgcccctttgagtctccagagcccctccaggcagaggcagtgaccagagactctgtgggacttctaggagaggccgagtggggtgtgacctcagtaaccccctttcgcaaagccctcctgcctcccattcagaggcagagccggggcccagtgcccggtgtgcttggctctgctgggaagtatggggtgttggtccagggcaggagccacaggcaccggtgctgcgagagaaaccctgagcgctggccggtgagccaggcccagatggggccagatggggccagatggggcggccgcaccaggccaggtcctccccaatcctgaacccgacgctgggcagagaacagcctcaccatctcgcagtccagggcgtagatccccgggtgggtgtctcctgagagctctttctcaaaggtcttcacgaagccctcaaggcgctccttccggccatcctgcacgtgttgctgggggtggagaaggcaggtgagggcagcttcggggtgcagtgggggcgggggtggcagcagcagcacatctctgagcccttcgggaccatcctatccatccatcacgcccattcactggttgggaccctggtgagcaggtggggaagggggcttgccaagaagacacagggaggacggcttcccaggatgggaagtggccagggacagggcctggggcctacgggtgctacgttctctgggtaacacaagaaaggctgcccgggggcccagaccctgagcccaggactgtgctgtgtcccgagaccccacaccaacgatggggaggcagaagtctgttgagaacaggcagaggggactgggacgccagggctcacctttgcgacttggcagccgacagagccggcggcagccgagcagcacatgtactgggtctcccagcctccggccactgcaggggacacagacacacagtcagggcccggccaggcccactccacagcccccggggcactgaccacctgcatctaccgagccttactagggagtgaggactgaggacaggaggcctcagcctcttggtggagctggaagcagaccaggccccggcagtcctgtggcagccaggacgcccaggcctggatccagggagaccagtgccctctgcagaggcctcttggcagcgctgccccgggcagcaccctccaggtatccctgaggcgatggctttaggggccgccacagggctgtgcaaggctggccatgtgccctgagcgtggctgcgtggttgcctgggggattgaatagaaccaccaggccaagggtgggacaagcccctccgctcctggggccagcaacctccacatttccatggaccaagggcacaggaaggcagggacacagggcctttcaggtggtggcatttgaaccttgtcatgggaaagctcttgtcttacttttgcataaagaacaggtggagagaaaatgaggccaagggctagccccggctctgccaaagacggtgcagcccagggaccctgagtgggatggagggcctgggtaaagccttaccccggttctgggggcctcaagggagggcccaggttccgggggccatgggtgggaaggggraggacccgggtaaggccttaccccggttccggcgcagccgtccccagtggtaataacactcctcgtcccggatgcagcggcctgaagaggacacgaggtactcggtgccacagcggcagcaggtcctgcaggaagctgtgggtggggacccaggtggaagctgaggctcacgctggggcccgcatgcccggccttgcccacatcccgcacctgcccacctaggccgtcgcaggccagcgactcacagtccttgggcctcttctcctcagctgtraagatgattgcgcccccgggccgctctgggtgcgggaaggggtagccgttctccttgagctggtcctgggtgagcaggtactccctgaggcggctgtacagggcagcccctgtggacaggcacagtggtcagcccctgcctgggatggcccacggggcggtagacaccaccgggaaaggcggctgggccggcaggggcccacgaagcaccgtgtggcasagcaggggctgggccggcagaggcccacgaagcaccgtgtggcagagcaggggcagggccttacctttcaggtcctccacccgggggctgcttggacggctgagcgagaagctggtcttggcggccaacctgccccccaacaccacctcgtgggacacaaccctgcggccacyggtttctggaaggaagggagggaggggaggagggtgtgaagtagctggctcagacccctgccccgcctgctctcccacccaccctgccctcctcagacctctgcctcaactccccctttctgggacagcaccccactgaccccgggttccagcctgacccgaacaggagaggcagacatgcggtgagccagggacgcagggcagccgccagctctgcaggccccagagctgcacggaggccccacacccaaagtcttcgtcccctcccctcaagcgaagggggaagggcggggagaacagcacgggggatctaatggctttcgagggctttgagccttcatgggccacccagcctgcgacgccaacccagggcccctccgagtgctaatgcaggcggggacgggggcaggggccggtgatagcttaatgcagcctggagaggctgcaatgaaacgcccaggtctccgctttcttcctccccagagcttaatgcatggagctcgcccagccctgggcctcctgctttgaagaagctgccgcagctccattagcaggcggcccctcggctcggcttggagaccccactcagcggaggaaggcggctgacagcgaggacaccagggccaggtccgtcctacacagaagcctgggaaccaggcagcaggcagcccccccacagcaccgcgctttccttttgtctgagactgtggctgagctcagggctgtgaaggtcccagcgagggtcccagcccagctgccaccccaagagcaaccctgagcctcccccgcccacccgccaggactcactgctgaggccgggcacagcgctgggggccaggcccctgagcttcttgagggtgttcacggccacattcaggtagatgttcttgctggggctgcggtcatagrccaccttctcctcgttcagtgcctgggggacaggcggtgcccagctgaggccatgcctgcctggtgccggggagccccagcggtggggtcgccatggggtcggggacttgcatctctcccaggcagctccgggtcacagctgcggctgagaggccgggggatgtctggggaccaccctggacccctagtccccacccgaccggccagataggaactccaggacctcaccttctctatggcctcctggttggaggtacagaacttgagacactcctcgatgaacaggttgagatagcgctggcggatgacggtggggactttgcccccaaactctttggggataaygggtttctttaaactctagagggaaggcaaaagctgccatgggtgagggcctccacaaggcctccagcggggaacgcagacgcgatgaggccgtgcccatggctggaggcaagagtgaggtgcgctgggacagatcagcctggctgcagtagggacagacacgccaaggcaagacaggagcagcaggggaaactgagggcagcggaactaaggtcatgggaaactgaggccatgggggcacaagggaacttgctgtactttctgctcaattttcctagaaacctaaagttgctcaaaaaacataaagtctattaattaaaaacaaaacaaggccaagcgtggtggctcacgcctataatcccagcactttgggaggctgaggcaggaggatcacttgaggacaagagttcaagatcagcctggacaacgtggcaaaaccctgtctctacaaaataaaaaacaaaattattagctggggtgtgatgacaccggcttgtggtcccagctactcaggaggctgaggtggaaggatcacttgagcccaggaggtcgaggttgcagtgagccatgattgcgcccctgcactctagcctgggcaacagagaccctgtctctaaacaaaaaaaaaaaacaccaaccaaccaaaaaaacaaaacaagacaaaacaaaaaaacaccgccagggcggtcgggcatggtggctcacgcctgtaatcccagcactttgggaggccgaggcgggtggatcacgaggtcagaagatcgagaccatcctggctaacatggtgaaaccccgtttctactaaaaatacaaaaacagccaggcgtggtggcgggcgcctgtagtcccagctactcaggaggctgaggccagagaatggcgtgaacccaggaagcagagcttgcagtgagccaagatcgcgccactgcactccagcctgggcgacagagcgagactccatctcaaaaaaaaaaaaaaaacaccaaggcatggggagggaaggtgaaggctgtactgcggtgtggagcacgaaggcccgcagggcaggggcgaggctggccctccgcaggtcccatgtggccgggcctcagggcgtggtcttgggggtggtggtcctggccgagatgggaggggctacctgtaaggatggactgtgggcgattcgcttagggatgatggtggtggtagtcttggacgccatccccgacaatgtgcgtgttttcagctgctggccacctggctcagggccgttggaggrctggctgccgctggccgcaagggtcctcttggcacctgtgggggctggcggggcacagggggtgtgggcacagggcgagtggctgcccatcaccacgtggcggagcaccaggcagccgcggccgctcagcgccagcagcacgtgcatctccgcgtgcagggggccgggccagggtgaggggctggggctgcgcaatggcatcaggctctagctgccttcaggcaagtccatcgaggcagaggacacaggtcaggctgcggaggccgctgaggacacgtcaccggtggggtggtccaggcctctgccacgtgttctgaccccaagcccaaggcgtcgatgtctgagggaaaggccctggctcccggacagaggaccgaagggtctcgggtgcccccacctgctcattggctttgccctgccctgcggcctctgtgttctgccttgccctttgatgaagtcacaaaccagagggaggaggccaggcctgcaggggctgcttcggagggctggccacgcgggcagctgcaacctgggcatgtacgtctgtgtggcaggggggcttctggactgggggctcggcaccgacccaggaaggggagctgtgagcagggacatctggccctagtctcagagcaacatccctcgaaatgccatctggccctggaaggtgcaagggaggcaggatgagtctgctcatgctaccgcgggccgcccagcaaggaagcaggctgcccgccaggctggcacgcgcctcttgcagtggagggtttgctcttcaggaacggacagagaacctccagactccctcggctgcacgctgggggcgagcccaggcagccacaggagtcctccaagccagatgagcccgccctgcggcactgccagcacttgggacgccagactcccttcaggcggcgggccccaagggcactgcgacagctcagcacccaccacagatcagcaacaggacaacccgagcgcggagacacagacgggaagcgtgtggggtcctgggataggcccaactcaatgatttcccctccctggggctaaggtctcagccgtgagggggctctggggaggggaggtcagagtagcctggagagctctccctaaggagggccgtgggatccatgggatctgcaggggaatcgccggggctggccctaaggctctccagccagcgccagggaggcaggggctccaaaccagcaggctgctcagggtggtcctcggacagcagccatgccctcccagggagcttgccagacacacagacctttcccagcctccagaccagaacctgcattttttaggagctttctgggggaccctcatctgtgacctgcctccagggatactttctcgctctacagacaccactgatgtgaagacgcaggagacaggacaaccccccgtgaagggtcctgtccacccaccactgaggcctggcccgactttctacaagaccctgctgggggggaagtgcccctcggagtaaaggaaatacagccccactcctgggaagacagcactcatttccatcagaggccacgccccccactcacacgccaggagaaagccacacctgcagaagcctgctccccacccaatgccaggtaccccgacatggctccccattccctggaaccacaggctcaggccctggttcagcccagtccccagcaggctgttggactcctagtaaccccggagctgggtcagggaaggaaggtgctgggccaggcctcctgcacccctcaacagtccccatttcacagacaggcaggctgagggccccagggagggggcccaaagtcatcccatgagcaagcaccatgtggttcaggtgagctcagagacctcagggtgccacctctcctgcccacatgcccacggccccccggcacaggccccctgggccaggactcacctgcagccaggcgggggttggggatgtgggcgatcctcctcttctcgccaggggcggaaatgtggacggagggcgacttctctgccagcctggcgggggcctgcagcaagctcgccgatgccctctgcgcctgctgggcccgcaggtagcacacctcctgcgccgtcgggggccgggccgggggcaccgcgggacccctcctcgggggctccacctgcgtcaccacaaatgctaaggcctggcagcacagcgggggcacctggagcaggcgaccccgggcaggcttgggagagggtggctggagctcgggggccggaggcaccacctccctggctgccttctgagctgctgggcacactggggggaagcagcagggggcagtggtcctcaatgccatgtggctccaggctcccccactcccagtgtctcccggtgcccaggctatgtcctcagccctgataaggcacgggtgggcgggactaccccgattacactggcactccaatccaatcccactacgcctaatcttcctcaaagcccctcctctggggaggctctgggactggagcaactgggactctcctggctgctgaccccggagccaggctctctgcttgtcctgcactacctcgccacgtctgcacaggggcctgacaagcgctactgtctccgggctacagaggacactggagctcagagctggacaaccggcccaggcccaggccgcacacggcgcagcaggccgtctgccgcactctgggggaggtcaccctggggctgctgacctgctctgtccctcgccccagcaccgtggcaatctaacaggaaggggcagggccagctccctctggaactcgggcagcgtcaaagataaggtgtcttcaaaaagctcatggaaaacgtgcgttgtgacgaaacttgcatggctttcaagtttttttgccccaaaataaactgatactaacttgtcataacatgtctgaaccagacggagtttgaggcactaaaaaaaagtaagacatcagttagaacagagccccagtcagagcaacaggagttctgctaaaattgaagcaaatgttaagcatcaaatttatggtgaaacttgggtggaagaacgaatggggaaatcactgatgctttacaaaaagcgtcacagatttacaggaacaatgtcccaaagaaatcagaagtttatgaatggataactcattttatgtatttatctatctttttgagacagagtcttgccttgtcgcccaggctggagcgcaatggcacgatcttggctcattgaatcctccacctcccgggttcaagcaattctcctgcctcagcctcccgagtagctgggattacaggtgcgtgccaccgcgcccagctaatattttgtatctttagtagagacggggtttcaccatgttggccaggctggtctcgaactcctgacctcgtgatctgcccacctctgggcgcagtgcctcatgcttgtaatcccagcattttgggaggccgaggtaggcagatcacgagaccagtctggccaacatggtgaaaccccgtctctactaaagatacaaaaattagcctggtgtggtggtgggcacctgtaatcccaggtactcgggaggctgaagcaggaaaatcacttaagcccgggaggcggaagttgcagtgagcagagatcgtg

SEQ ID NO: 94533 - DNA, 30293 bp, Homo sapiens
  misc_feature (1)...(30293): n = A,T,C or G
ttcactggagatgctcctcaagtaggggcctgaggaaatggaaaccatgtagactcagtagactaatggcctcgggggccactttcagtcttttttttttttgagacagtctcactctgtcgcccaggctggagtgcagtggcgctatctcggctcactgcaagctccgcctgccgggttcacgccattctcatgcctcagcctcccaagtagctgggactacaggcgcctgccaccacacccggctaattttttgtatttttagtagagatggggtttcactgtgttagccaggatggtctcgatctcctgacctcgtgatccgcccggctcggcctcccaaagtgccgggattacaggcttgagccactgcacccggcccccactttcagtcttaaaatggtaggattctttcatttttttccccctctttttcctgagcacatgcttaattcccaccagagaaaataagagcttttctagcctggtgcggtggctcatgcctataatcccggcaatttgagggaccaaggcaggaggattgcttgaagctaggagtttgagaccagcctgggcaacataacaagaccctatctcaacaaaaatgttaaaaaaattagccgggaatggtagtgcgtacctgtagtcccagctacttgggaggctgaggggggaagattgctttagcctaggaggtcaaagctgcagtgagccataattctgtcactgcactgtagcctgggtgacagagcatgaccctatctcaaaaacataaaaaagaaaagaaaaagaaaagagaagaaaaaacaaaaaaaagagcttttcttgcacgtgaacttaaccgttactagaaattcacatggtggaacagtgtctttatcctcacaaactcctcagtaatgtcattccatcccccacacacatcagagggactgcctcatcacaacttttccagaatgaaggccctgagctgtagcagaaagctgataggctgatccactggtgacgatgacatttctgagccatcagaagtccagctgttgtgttttaaaaaaagaagaagaagcaaaagtccaggtgtggcttctccagagggacagcgaaggatttcaaggtaggaaatggcaggaagagataaaagaccctgaagaccttgagtaagaaccaggatgtctgctctgagcccatcagggaaggggtaccctccagaagcaatgggatgggcttcaacctgtggacacatctgggggccaactaggaaacaagcaagggcccccgtgccttagtgatatggtaggctgaattcaaagatagccccaggattcatgccccctgtttacatgcccttgtacaatctcctcctcttgagtagggggcagaatctgtgaatttctttagatatcattcccaagactagtttactagtcagtctactttgagtgaatcaaaaagttaccctggtgggcttgacctaatcaggtgaggtctttttttttcttttgactgagtcttctgtacccctggctggagtgcaatggtgagatcttggctcactgcaacctctgcctcccgggttcaagcgattctcctgcctcagcctcccaagtagctgagattacaggtgcccaccaccacgccctgctaatttttgtatttttagtagagatggggtttcaccatgttggccaggttggtctcgaactcctgacctcaagtgatccgcccaccttgagatgaagtctttaaaagcaggtaaagtgtcagagagacactttcctgctgcttggaataaataagctccaggattgtaagaagggcctatggagggagccaagtggagaggacatcagggcactctctaggagttgagagtgtccttggctgacagctaccgagaagaaatgaggaccttgtcccaccactgcaatgaaatcaattctgccaacaacctgaatgaccttagaagaggcctctgagctccagatgagatgtctaacctagccgtgatcttgatttcagtcttgtgataaccagtagagaattcagttatgctatacctgataaattgttaggcagcaacaaaaaatgaatgcaggcaattagggctgtggactgctctcaaggtagcagagaattcagaactgactgaaagacaagcaaaacctaccttcagcagtggtggggaaagaacaatttctggagtcagacaagtggggactaaaacctaactaccactatttgttagctgtatgatttttggcaagtatcctttaagtctattcctttatcaataaatcagggctaggccgggcatagtggttcatgcctgtaatcccaacattttgggaggccaaggtgagaggatcacctgaggtcaggagttcaagaccagcctggccaacatggtgaaacagcgtctctaccaaaaatacaaaaattagacgggcatggtggcgagcacctgtagtcccagctactcgggaggctgacgcaggagaatcacttgaacctggcaggcggaggttgcagtaagccaggatcacaccactgcactccagcctgagcgacggagcgagactccacctcaaaaaagaataataataaaataaaataaattttgaaaatagggataaaaacttatctcacaaggttgttatgaggcataaatgggataatagtttgtggcatgtagtggcacattgtaaattatagtcataattgtattttaaaaagaaaaaaaaacacttcagcagccaatctaagtgactgtaggcaaagtggagggattctgacagcagggagaccagctgggattcaagcaatatagcccagtgctttcttacttgcttttcttacttttcttactttcttaccctgacctcatcttaagcttccagccttggagatttgatgaacactaattgaactgcagagaggtcaaaggtttccccgttgccctttggccagtgtaggggcagaaaggggtgatccttttcctcaccatcataagggtcatggctgacactcccataacaaaagacaggttaaaaagaaaaaaccataacaagtttacttgatcatagttttatgtgacatgggaggcttcagactgaagacccatagatacaaggaaaatcgtcctttatgcttaggttcaataaagcatatgtagaattgtgattggacaaaaagggtccaagctaacggaaatggattgagtgggaaaacccagcaaagcctgtctgttcaaatccttctggcctctcttttgtagcatttcttcctccctgtcctccctactactggaacgagtgtcttttctttcttttttttggagatagagtttcactcttgttgcccaagttggagtgcagtggcaagatctcggtccactgcaacctccacctcccaggttcaagcaattctactgtttcagcttcctgagtagctgggattgcaggcatgcaccaccatgcccggctaattttgtattttcagtagagacggggtttcttcacgttggtcaagctggtctcaaactccagacctcaggtgatccccccacctcagcctcccaaattgctgggattataggcatgagccatcgcgcccagccttaacttctttttttctttttttgagacggagtcgcactctgtcacccaggctggagtacagttgtgcgatctcggctcactgcaacctccacctcgcgggcccaagtgattctcctgcctcaggctccagagtagcgtgcgccaccacacccagctaatttttgtatttttcgtagagacggggtttcaccatgttggccaggatggtctcgaactcccgacctcaggtgatcttcccacctcagcctcccaaagtgctgggattacaggcatgagccaccatacctggccatgtttccttttctccttttttttaaaaaattttatttttgagacggagtctagctctgtcacccaggctggagtgcagtggtgtgatctcgcctcaccgcaacctccacctcctgggttcaagtgatttctggctaatgttagtaattttaatagagatggggtttcaccatgttggccaggctggtctcaaactcctgacctcaagtgatctcctggccttggcggctcaaagtgctaggattacaggcgtgaaccaccgtgctcggccttaatttctttatggccagctgttacatagaaaggcaaagagaaaggttagagcaatatttttaggctttatggctggctttgggacaaaggggttctactttctagaccccctcttggggaggagggattctagtttctgtggcatgcctggagggagagtaaggggcaagagacaagagggcagaaggtcagagagaaactgcttcataggccttcactttgtggtattgttttctaagccccagcactaggttggtgggaaacggtgagggcaggtgctttgaaaacattttaaaaatccttttccccgccaggttcctacccactgaagccacactgctagggaggaaaaagagaagggcagatgctgaggccctggagagtcggcctgaagtgaggaagtggcacatgaatggccaccttttctttcctcagtgtgcccagggatagagaatgggagacagcaagacagaatacaatgtctcattaactctgggcagcatccagatacttcaggcctgggagaggtgtccttgactgcccaggggctcaaagttaggatgtagctagtgagataagatgcaacaactgtggaacttgatcaaccctatttcagagccatcgtggattcaggagccctcctgtaggagatgggaaacattcaggtgagagtcctcagaactggggatgtggcgaaaagatccttgactgccagcagcaacctaatttctgagcctctttcctaatctgtgaaatgaagtagtttaactcattttttatgcaagctggtttgtgatataagagtatgtactaataaaatcccttacgcataggccttttttttttttttttttttgagatggagttttgatcttgttgcccaggctggagtgcaatggtgcgatctcaactcactgcaacctctgcctcctgggttccagcaattctcctgccgcagcctcccaaatagctgggattacaggcatgcgccaccacacctggctaattttgcatttttagtagagacaggggtttctccatgttggtcaggctggtctcgaactcccgacctcaggtgatccgcccgccttgggctcccaaagtgctaggattacaggcgtgagcaaccgcgtccagcggcattctttcccccattcgctgttttattttatgccacaatgagaaggcggggctaagcaaagtaggtttttgttttgtttggtttttttgagacggagtttcgctcttgttgcccaggctggagtgcaatggcaccatctcggctcaccgcaacctcctcctcctgggttcaagcgattctcctgcctcagcctcccgagtagctgggattgcgggcatgcgttgcgccaccacgcctggctaattttgtatttttagtagagacgggggttcctccatgttgcccaggctggtcttgaactcccgaccgcaggtgatccgcccgcctcggcctcccaaaagtgctgggattacaggcatgagccacagcgcccgggcgcaaagtacgtattttttattatagtttgttgttattgctgtcattcctattttgaggtgattaagtgccctcctgggcctgactcgaacaagatcacggtcggttgctcctccctcgcctccattcctacttacaggatggcagctgcacgtcacctgaccagagacaaggcgggacgcgaggctaacagtttgtcctcagcgcgccgccgtagcccccgccgccgccggccgcgcggtggcccctcccgcccacgcgccagagtcgcagtgggcgggcctacgtgctccgcccgctgtgagcctgtccggcccccgcccgctccggagcaacccgcgagcttacaccggcttctctctgtcctcagcccgcgcgccgccatcgccgtcatgctgggcgccgctctccgccgmtgcgctgtggccgcaaccacccgggccgaccctcgaggcctcctgcactccgcccggacccccggccccgccgtgggtaaggcccctgcttgccactgcccgcgccctcgtgtccttgcggtgacctgggtccccgctgccactccggggcgggctctccccggcctagcccttgccctaccctggttactgaacccggtgaccgcgggccgccctgcccgccgcctcgagtagtggaggacctgaaagcgcgcccccggggcctccccccgcgcaacttcctggctgtgccaccgcggacaggtcagatgtggacctgctgtgggcgccgaggaggggacgcagcgctccccttcggttcccgggccatgaccctgccccagcgccgaccctgcggccacctgaccgagagtggccgccgccggcctgcagcgcctcggcgaaggtgacattgagcctccgggcacgccgcttggggtccgaggacacaatatacttccgtatgggacacacgattatacttttcaatcaggcatttctcggttagcgattagtgtgtcaccttcacagccttttccatcatttttagggtctgctgtgccacgttctaattcttccacgtttaaaatagatggaagtgtgtggttgtttcctgatctccggaagatagccagagttttgatagggcttatgataaaaatatcactcttttgaaaactgaatgtcacagacacaggaatactgggttttacaagcataggaacgcttcgtgttttttcccctttgtaatagaagcctgattgctggagtatgagacgtgcttctgatttttgtctattttccttccctttatatgtgtgctgggaggttttgagtccaccaccatagaataattacagtaattgcacttcgatcttggtccgtgaaatttagcttctatgcatgcatattatattttatttttgaacctgcatcactggcaactatgcatgcgtatttaaacataagaactcagaaactcgtttcagggtatgctgaagttaaaaattaaaaaaagaactcagccgggcgcggtggctcatgcctgtaatcccagcactttggtaggccgaggcgggcggatcacctgaggtcaggagttcaagaccagcctggccaacatggtgaaaccctgtctgtactaaaaatacaaaaaatttagctgggtgtggtggtgggcgcctgtaatcccggctactcgggaggctgaagcacaagaatcgcttgaacctgagaggcggaggttgcagtgagccgaaatcgcgccattgcactccagcctggccgacagagcgagactccgtctcaaaaaaaaaaaaaaaaaaaaaaaagaatatgttttgcttcattcattttagacttttatcatttgtcgtagaaccataaggctggagggtactttatttttgtttatttatttatttttaaattagagacggagtgtccctatgttgcccaggctgggcttgaactcctgggctcaggtgatcctcccacctcagcctcccaaagtttgggattataggcatgagccactgcagccaacctagagtgtactttagagatcgtggaagccattttattttatagaaaaggaaaccaaagtccatcttgggaaactgactccttgtttttttttttttgtttgtttgtttttgttttgttttgttttgttttgttttttcttgagacagagtttcgttcttgttgcccaggctggagtgcaatagcacggtcttggctcaagcgattctcctgcctcagcctccggagtagctggggttacaggcacctgccaccatgcccggctactttttgtgtttttagtagagatggggtttcaccatgttggccatgctggtttcgatctcgtgaggtcaggtgatccgtctgcctcagcctcccaaagtgctgggattacaggcgttagacaccccacctggccgaaacttactcctttttaatggtggaaccatttttgtttcttatagttatgtttgggccatcctgatgtttgtttagattttgtgttttgctaaagtaacagtacaatttacatttttcagcnnnnnnnnnnnnnnnnnnnnnnnnnnnnnnnnnnnnnnnnnnnnnnnnnnnnnnnnnnnnnnnnnnnnnnnnnnnnnnnnnnnnnnnnnnnnnnnnnnnnnnnnnnnnnnnaccagcctgaacatggcgaaacccagtatctactaaaaatacaaaaattagccgggtgtggtggcacgcacacgtggtcccagcttcttgggaggctgaggcattagaattgcttgaacccgggaggcagaggtttgcagtgagccgaaatcatgccatctcaaaaaaaaaattttttttttatttatttatttattttttttttttggtgatagtctcactgtgttgcctaggctggagtgcagtggcaccatcacagctcactgcagccttgacctcctgggactcaactgatcctccwgcctccaccttccaagtagctgggaccacaagggtgcgccaccagttttattttccgtagaaacaggctggtctggggactcctgggctcaggagtgcctccctcctcccaccttccaaagtgctgggattacaggtgtgagccaccatgcccagccaaatttttctttttcttcttctgttgttgtggttttgttttgtttttgtttttgtttttgagacagggtctcgctctgtcatgcaggctgcagtgcagttggcacagctcactgcagccttaacctcctgggctcaagccatccttccacctcagcctcccaaagtgctgggattacaagcgagagccactgcacccagcctcagtaactcgttaatgtgccctcattcctacagttaccaccaccaaagtgttcattctttgggcctgtcagggttgattatttattaaatggaaaactatccgatttaactaaatttaaacccaaaggatcaatgagcccttttatttttctatatatgttagccttttttgtttttaaatggagtgcttaactgaatgccaaaaagcagtgttagaaatagctttttaggatgaagccctaaaaatgtcctcatttttcacagctgcttcttttttcttactttgggactttcaggttacgtaaaagctctgagtaattgttttccaaaataatttgcctttcaagcttcaatactaggtggagatcctgttcttaagtggggtggggtgtgtggggcagagaatgctagtagagtttacctaaaaaaagttaagcatgtgggggatgtgtccatagctaatagaatagatcctgctttacccattattggatttaacaatataatttaaatcatggccgggcatggtggctcacgcctgtaatcccagcactttggtaggctgaggcgggcggatcacaatgtcaggagatcgagaccatcctggctaacgcggtgaaaccccgtctctactaaaaatacaaaaaaattagccgggcgtggtggcgagtgcctgtagtcccagctgctgggaaggctgagataggagaatggcgtgaacctgggaggcggagcttgcagtgagctgagattgcgccactgcactcccgcctgggcgacagagtgagactccatctcaaaaaaaaaaaaaaaatttaaatcacgtggggagagtctgttttagcccttcagaaagggatgtatgggtttttaaatttttatttattttaatttgtttgatatagagtgttgctctatcacctaggctagagtgcagtggcgcagtcatagctcactgcagccttgttgccctgggctcaagggatcctcccgcctcagcctcctgagtagctgggaccaccaaaccccgctaattttttaagttttttgtggagaatggaggtctgtctttgttgcccaagctggtctctcagtcctggcatcaagcgatcctgccttggcctctcaaagttctagttctgttttataaaagactttttggaatacaaccagtttgtaatttggcttccagaagacatatgatcaaatccttgaaggtggtgatctccttgacttggatttgctgttggtggtcatcttattcacagttaggaaacaaagcctagcactcatgtagtcaaatccatgcccagcagtgaacaaaacgaattgcttatcatgaagcactgttgtggatgggacaggtaattacctctggggaaggagtacatagacctttcaytgggtaaatacttaggagtggaattactgtgttatatggtaggtttgtgtttaacttgataagaaactgcttaaaccgtcttccaaagtgattgtatcattttatacttgcactttcagtattcagttaaggctagctttagtttttgaagaggtggcttataattttttcttttttgagacagggtctcactctgtctccgaggctagtgccactgcatctggccctaagttcttgataatagtgcattagatggttgttctaatctatgtttttagatagatagatagatagatagatagatagatagatagatagatagatagatagatattttttttttgagacggagtcttgctctgtcgcccaggctggaatgcagtggcacgatcttggctcactgcaacctccctgggttcaagctattctcctccttcagcattccaagtagctgggactacaggggtgtgccaccacgcctggctaattttttgtattttagtagagacagggtttcaccatgttggccaggctggtcttgaactcctggcctnnnnnnnnnnnnnnnnnnnnnnnnnnnnnnnnnnnnnnnnnnnnnnnnnnnnnnnnnnnnnnnnctgggcaccgtggctcatgcctgttatcccagcactttgggaggccgaggcaggcagatcatgaggtcaagagttcgagaccagcctgactaacatggtgaaactttgtgtctactaaagatacaaaaaattagcctgacatggtggcgcatgcctgtaatcccagctacttgggaggctaaggcaggagaatcacttgaacccgggaggtggaggttgcagtgagccgaaatcgtgccattgcactccagcctgggcgacagggtgagactctgtctcaaaaaaaaaaaaaaagaaattaaaacgtgttcacttctagtccatttatgtacatgttccacttcattctgggcttggattatgtaggtaatttaggtctctgggaagatcttttctgcttcgtttttttgctactcttcctcctgccagttactgcattaaagatatataggatattactaatgtttaaatttcagtgttcttagaacaacaatgttgagaggtttctgggtgaagtttttaaawatatatatatatgtatgttaaggctgggcatggtggctcacacctgtaattctagtattttgggagtggtaggattgcttgaggctaggagtttaagaccaccctgggcaacatatcaagacccccatctctaaaagtaaataaataaaaatatgttaagccttaaacaactggaagttacaccacacttatctaatacaggtagtaggaaatgtgatttgagataggtttcatttctttaagttatgatttctataaatagacaactaagacgtttttagataagggttagtttatagctaccatttgtttaatacttaccagtgcatagtgttaacctacctgttttcacatttaatcttcataatctgctaaggggggtagcgtccccattttacagataaggaaaataaacttaagttaattttccagggtcaaacagagagagcgaagagcctagaggtatctgagtgctaggttgtgctgcattcaatacccaaagataaaattttctgcctccgcctatccccctacctgttccagaggctgttcagaaggaattcagatttccaaactcaattcagtgtccatttgacaagaagaaagaaaaaatggggctgggtgcagtggctcgcgtctgtaatcccagcactttgggaggctgaggtgggcagatcactggaggtcaggagttcgagaccagcctgggcaatgtggtgaaatcccgtctctactcaaaatacaaaacttagccaagcttagtggcgctcgcctgtagtctcagctactcagaaggctgaggcaggagaatcacttgaatccaggaggcagaggttgcagtgagctgagattgttccactgcatttcagcctgggtgacagagtgagactcgatctcaaaaaaaaaaaaaaaaatggaaatgcttttcatacagtactctatgtaaacatcatttctttttttctttgagacagagtcttgctgtgtcgcccaggctggagtacaatggcatcatctcacctcacctcaacctccgcctcctgggttcgagtgattctcctgcctcagtctctcgcgtagctgagattacaggcgcccgtcatcacgcccagctaatttttgtatttttagtagagacggagtttcacaatgttgatcaggctggtcacaaactcctgaactcaggtgatccaccagtctcagcctcccaaagtgctggcattacaggtgtgagccactgcgcccagcccaaaatattcctagtaaaacagtattattttgcattaggtgtagattagagtgtacgttcccttaggggatttatcagaatattttgggaaggggctgtagtttgataaagcaatttgtatgtgtaatttgtcaggatgtgtaatttattttggaatataataacatgagaattttttttttttttttttttttttttttttgagacagagtctcgctctgttgcccaggctggagtgcagtggcgtgatctctgctcactgcaagctccgcctcctgggttcacgccattctcctgcctcagcctcccaactaggtgggaccacaggcgcccgccaccacacctggctaattttttgtatttttagtagagacggggtttcaccgtgttagccaggatggtttcgatatcctgacctggtgatctgcccatttcggcctcccaaagtgctgggattacaggcgtgagccaccaagcccggcccgagatttttttttttttaatgtgtgaatgaagtatataagtttatttaagaacttgaatggtgccaagggctggtggctcacacctgtaatcccagcactttgggagccaagggaggaaggaatgcttgagcccaaagaatttgaggctgcagtgagctgtgattgcgccactacactccagcctaggcaacaacagagcgagagcctgtctcaaaaaaaagaacttgaatggacattagtattgctcttagtttttttttttttgttgcttttttggttttttttgttgttgttgtttattgtcttttttttttttttgaggcagagtctcgctctgtcgccaggctggagtgcagtggcacaatcttggctcactgcaacctccgcctcctgggttcaagcaattcccctgcttcatcctcccgagttgctgggactacaggcacgcgccaccacacccagctaatttttatacttttagtagagatggggtttcaccatgttggccaggatggccttgatctcttgacctcttgatccacccgcctcagcctcccaaagtgctgggattacaggcgtgagccactgcgcccggcctagtcttagttttttagtttttgtttttgtttttgtttttgtttgtttgtttgttttttgagtcggagtcttgctctgtcgcccaggctggagtgcagtggtgtgatctcagctcactgcaacctccgccgtccaggttcacgccattctcctgcctcagcctcccgagtagctgggactacagccgcccgccaccacacctggctaattttttgtatttttagtagagacggggtttcaccgtgttagccagratggtcttgatctcctgacctcgtgatccgcctgcctcggcctcccaaagtgctgggattacaggcgtgagccactgcgcctggcctattcttagtttttagaagtggggtgtcgctgtgttgcccaggctggaatgcaatggctatcttatcaggttctgtcatattgttagcaccctacgaccttgaactcctgggctcgggtaatcttcctgcctcagcctctgagtagctggcactacaggtgtgtgccccactatgcccacctgggacatttttacttaggaattaatactctggttatgtgtaaaaattcaaacaatatggaagtatataaagtagtttttacgtcccatgattatcactgttaatttaaaatcagagggaaccactgttaataatttcaagcgagtattatacattagggagaaaagtataaacatgcctatgtaatactttttgttctacttgattttatttgcttaatttaaaatatatctttctgtatcaatgtatacgatgtatttcatttgacctgttcaatatttttgctgccacaacatatatagtcaactcaaaatttaatgcattgaacaaaatatatcaagtactatttgtgtacattgaagttatggttctttcacattatagctatccagtcagttcgctgctattcccatgggtcacargagacagatgaggagtttgatgctcgctgggtaacatacttcaacaagccagatatagatgcctgggaattgcgtaaaggtaattggaacataaacatatttgtctattttggtgtgtaaatatgaactgcttctgctcctttattgagagcaactgtttcgaaaacatgcgttgtttaaactggttacttcatgcaacttgcagttaggaaagtttatggctacctataaagcaggattttaaggcaggcactattgacattttgggccagataattctttgttgtaggagactgtcctttacactgtagggtgtttagcatcacctttggcctctacctgctaggagccagtatgcacacattcgtatcatgacaaccaaaaatgtttctaggcattacccagtgtctcctgagggatgaagtcacccttaattgaaaaccactgctatagcaataaggctagatgagcaaaaggtaacagttttgtacatttcaaacaatttacatagcacgggcgcagtggctcacgcctgtaatcccagcactttaggaggccagggtgggcagatcacgaggtcaggagatcaagaccattctggctaacatggtgaaaccccgtctctactaaaaatacaaaaaaattagccggacgtggtggcgggcgcctgtagtcacagctactcgggaggctgaggcaggagaatggcgtgaacccgggaggcagagcttgcagtgagccgagatcgcgccactgcactccagcctgggcaacagagtgagactctgtctcagaaaaaaaaaaaagaatttacacaaagcagtcatttggttcccttcccctttgggtgatggtttgggttttttgttatttttgcattgttttgccatgaataagtatctaagtaagttagaacttgtctttcctaaatttgcagatgcacacttaacatgaaaaaatagaattaggtgtagggtaatttatctcataccaaaaattcaatctcaatgactatcgtattcactggtatcctttgtttaaatattttaaagtaataaaagcaagaaacctaagtgctttaaacttctctgcagaaatgtaatgattcccttttgctacaaccaatagaattcttactgaacaatcctggagtagaagtaataaaaagaacaattatgtattcccattaagagaatcttaaattttattatgtgtcattttgtgcagatctgaaagtaatcatgcccaatcattttctggttgaatgtttatgagtctgtgtactaatgtttctctataatatctccttaatgtcctcatttaggcttcattaactctacgcatttctctggctgtttttaggctgttttccagttgaatctcttttattttggtttttttgtttgtttgttttgttttgtttgagatggagtttctctcttattgcccaggctagagtgcaatggcgcgatctcagctcactgcaacnnnnnnnnnnnnnnnnnnnnnnnnnnnnnnnnnnnnnnnnnnnnnnnnnnnnnnnnnnnnnnnnnnnnnnnnnnnnnnnnnnnnnnnnnnnnnnnnnnnnnagacagggtttctccatgttgaccaggctggtcttgaacccctgacctcaggtgatccacctgagcccagccttgaatctcttttaaagcatccaaaatgtgttcattgtactaagagttaaagataggagggccggatgtggtggctcatgcctgtaatcccagcactttgggaggccgaggcaggtggatcacgaggtcaggagttcaaggccagccaggccaagatgctgaaaccccgtctctactaaaaatactaaaattagctgggcttggtggcacccgcctgtaatcccagctacttggtaggctgaggcaggagaatcacttgaacccaggtggcagcggttgcagtaagctgaggtggcaccactgtactccagcctgggtgacagagcaagactccatctccaaaaaaaaagttaggagttgaaaatgaccctcttgttctcaaaggggaaaaaaaaaactcaggattttttccttcaatctgcgtgctgttgcatagttctttctttccactgattcactaagggagatccactgtgatcttattatctagaatttgttaaaggtaggtttctctcattttataggtaagagaatggagacccagacagataagatcatacatcagtgattcagtaaaaatataaataactcatagtttaagtgaggctcttcgaggttgacatggcccttctttttaattttgcagggataaacacacttgttacctatgatatggttccagagcccaaaatcattgatgctgctttkcgggcatgcagacggttaaatgattttgctagtacagttcgtatcctagaggttgttaakgtcagtgaaataataatgctaaaattgttctgtaaatgagtgggctattgctgaggtatcagaatattctgtwtttttgaatttgttaaaatgcctaaaatgagtccttatataactagaaggaatgtacattgcagttaaaatctttctagaggctactttggcagcatttattcaaggccttacaaattgtacatgatacacttttgttcagcaattccatttaagaatttatcttttttcttttttctctctttttttttttctttcttttttaagaatttatcttggccgtgtgtgatggctcatgcctgtaatcccagcactttaggaggctaaggcgggtggatcatgcaatgtcaggagtttgagaccagcctggccaacatggtgaaaccctgtctctactaaaaatataaaaattaggccaggcgcggtggctcacgcctgtaatcccagctctttgggaggccgaggcgggcggatcacgaggtcaggagatcgaaaccatcctggctaacacggtgaaaccctgtctctactaaaaatacaaaaaaattagccgggtgtggtggcaggcgcctgtagtcccagctactcaggaggctgaggcgggagaatggcgtgaacccgggaggcaaagcttgcagtgagccaagacagcgccactgcactccagcctgggtgacagagcaagactctgtctcaaaaaaaaaaaaaaaaaaaaaaaaattagctgggcatggtggcacatgcctgtaatcccagctacttgggaggcccaggcaggagaattgcttgaacccgggaggcggaggtagcagtgagctgagannnnnnnnnnnnnnnnnnnnnnnnnnnnnnnnnnnnnnnnnnnnnnnnnnnnnnnnnnnnnnnnnnnnnnnnnnnnnnnnnnnnnnnnnnnnnnnnnnnnnnnnnnnnnnnnnnnnnnnnnnnnnnnnnnnnnnnnnnnnnnnnnnnnnnnnnnnnnnnnnnnnnnnnnnnnnnnnnnnnnnnnnnnnnnnnnnnnnnnnnnnnnnnnnnnnnnnnnnnnnnnnnnnnnnnnnnnnnnnnnnnnnnnnnnnnnnnnnnnnnnnnnnnnnnnnnnnnnnnnnnnnnnnnnnnnnnnnnnnnnnnnnnnnnnnnnnnnnnnnnnnnnnnnnnnnnnnnnnnnnnnnnnnnnnnnnnnnnnnnnnnnnnnnnnnnnnnnnnnnnnnnnnnnnnnnnnnnnnnnnnnnnnnnnnnnnnnnnnnnnnnnnnnnnnnnnnnnnnnnnnnnnnnnnnnnnnnnnnnnnnnnnnnnnnnnnnnnnnnnnnnnnnnnnnnnnnnnnnnnnnnnnnnnnnnnnnnnnnnnnnnnnnnnnnnnnnnnnnnnnnnnnnnnnnnnnnnnnnnnnnnnnnnnnnnnnnnnnnnnnnnnnnnnnnnnnnnnnnnnnnnnnnnnnnnnnnnnnnnnnnnnnnnnnnnnnnnnnnnnnnnnnnnnnnnnnnnnnnnnnnnnnnnnnnnnnnnnnnnnnnnnnnnnnnnnnnnnnnnnnnnnnnnnnnnnnnnnnnnnnnnnnnnnnnnnnnnnnnnnnnnnnnnnnnnnnnnnnnnnnnnnnnnnnnnnnnnnnnnnnnnnnnnnnnnnnnnnnnnnnnnnnnnnnnnnnnnnnnnnnnnnnnnnnnnnnnnnnnnnnnnnnnnnnnnnnnnnnnnnnnnnnnnnnnnnnnnnnnnnnnnnnnnnnnnnnnnnnnnnnnnnnnngtcaggctgatctcaaactcctgacctcagttgatccgcccgcctcagcctcccaaagtgctgggatgacaggcgtgagccaccacggccccggccggcactttcttagttcttttgacttcttattcgttcctaaggaaccttgtgacagcacaggtgtaactatatattacagtgaaaagtctccagccctggacatatgtattctcaaagtacagctctccatgaaaagatactgtggtctgtaagaaagaaacttaaggtccgttaacagcaaaagtgtgacattactttatctataatgggtaagataattaagggttctgtaggctatcaatccattcagcactggtagttaattcagttaaggtctcaaattggaggcaaatgaaaaaacttttcccgttaacttaattattcgtgttgcctgctgggcatgtctaattgccttcacaaaattctgtcatcactaccttcttttccagtaattctagactttaagatgttctggatttagtccaattgcagttattctcaaggtatttcaaaagcctaccttgaacagtacatatataagttgccctctttatttttatttaattattattattatttttttgagacagagtctcgctctgtcgcctaggctggagtgtagtgtcatgatctcagctcactgcaacctccgcctccctagttcaagcattcccgagtagctgggattacaggggcgtgccaccacacccagcaaatttttgtatttttagtagagacggggtttcaccatgttggtcaggatggtctcgaactcctgaccttgtgatccacccgccttggcctcccaaagtgctggaattacaggcatgagccacggcacccagcaagttgccctacttaccgaacaaatgtgttaacttaaaagtagatgacctgttttgttttgttttgtttcgttttttgagatagaatcttgttctgtcacccaggctggagtgcagtggcgtgatcttggctcactgcaacctccgcttcccgggttcaagccgattctcctgcctcagcctcccgagtagctgagattacaggcatgtgccactacacctggctgatttttgtatttttagtagagacgggatttcaccatgttgtccaggctggtctcgaactcctgacctcaagtgatccgcccgcctcagcctcccaaagtgctgggattacaggtgtgagccaccatgcccagctgatcacctgtattattctgtcctacctgcctctgcataagtaattaaaggcatttttaagttcatttcatgaattaatagacatggcttttgagagagttaaatgtgaatattctctttgccatcaggacaaagcaggacctcataaggaaatctacccctatgtcatccaggaacttagaccaactttaaatgaactggraatctccactccggaggaactgggccttgacaaagtgtaaaccgcatgggtaagcgacaaaccactgaagaaggcaggaaaacaatccagagaggtgtgggtggatgacatttcagtgtgctatagtaagacctttcagtgttcttgttagaggtaatggccgtgagcatgaagagattttgagaataccagtaatggtaaatttaaagaactgaaatgatttctagttgttgtcattattttctttctttccttcttttctttctttcgtctttttttttttgagatggagtcttattctgttgcccaggctggagtgcagtggtgcaatctaggctcgctgcagcctccgcatcctggattcaagcctcagcctcccaagtagctgggactacaggccacatgccaccacaactggctaatttttgtatttttagtaaagacgggatttcatcctgtcggccaggctggtctcaaacccctgacctcatgatccacctgccttggcctcccaaagtgctgggattacaggcttgagccaccgcgcccggcatcattattttcttactggtagaaagacaaataaaagccaccttaattaaagaaaaatcttcatacaatattctaggcataaacagtagcatagatgataatatagtgagtctgtgtacacatatccagattttcagatacttttattgttgccacatttgctttggtgtgtttaaagtatttctatttgggctgggcacagtggctcacgcctgtaatcccaagactttgggaggccgaggcggggggatcacaaggtcaggagttcgagaccagcatggcgaaaccttgtctctactaaaaatacaaaaattagctgggtgtggtggcatgtgcctgtagtcccagctactcgggaggctgaggcgggagaatcacttgaacccaggaggcagaggttgcagtgagccgagactgtgtcactgtactccagcctgggtgacagagtgagactctgtctcaaaaaaaaaaaaaaaaaaagactcaacttggctggcagcaatggctcatgcctgtaagctcagcactttgggaggctaaggtggaaggattgcttgagttcaggagtatcaggagtttgagactggcttgagcaacatagtgagaccctgtctcctttagttaattaaatacatacatacatagaaagaaaaatattcagaattcaaggaatttttatattcagtcttcctgttgcgaaactgaacagaaaatgctgaaaactttgtaatctacttttaagatttttttttttttttttgagacggagtctcactctgtcacctaggctggagtgcaatggcatgatctcggctcactgaacttccgcctcccgggttcaagccgattcttgtacctcagcctcctaagtagctgagattacaggcatgcaccaccatgcccggctaatttttgtatttttagtagagacggtttcaccatgttggccaggctggtcttgaactcctgatttcaggtgatccacccgcctcagcctcccaaagtgctgggattacaggcatgagccaccacgcccaggtgggatctcgttttaaagcttgctttaacggagtggtctttttgtttgtttttgtttaatttatttatttttaattttgttatagagacagagtctcactatgttgcccaggctgttcttgaactcctgggctcaagtgatccttccaccttggccttccaaattatttgggtttcaggtgtgagccaaaagcaatggtcttttcattttatctttgtccaccccctcaccagcacaacctccctgaagtagctcatctttataatatatgcaatggttttgacttctgtgagtacttaaagaaaactagttgttcagaatggaaattttcctagttatacttttgaagctcttgtttgttttttgttgttgttttgagacggagtctcactctgtcgcccaggctggagtacagtggcacgacctctgctcactgtaacctctgcctgttgggttcaaacaattctcatgcctcagcctccctagtagctgggattacaagtgcccaccaccatgcccggttcatttttgtatttttagtagagaccgggtttcgccatgttggccaggctggtcttgaactcctgacctcaggtgatccacccgcctcagcctcccaaagtgctgggcttacaggtgtgagccaccgcgtctggccctgtgattgatattctttttcttttttttttttttttttgagacggagtctggctctgtcacccaggctggagtgcagtggcatgatctcggctcactgcaagctccgttttccaggttcacgccattcttctgcctcagcctcccgagtagctgggactacaggcacccgccaccatgcccggctaattttttgtatttttagtagagacggggtttcaccgtgttagccaggatggtctcaaatctcctgacttcgcgatctgcctgcctcggcctcccaaagtgctgggattacaggcgtgagccaccgcgcccagccctgtggttcatattctataatgaactcctaaaagatggttttagttttcattttatcaagtattattccaaggggtccagaagatcttttttatgtaggatatattctagctatactaactttttttctttttttcttttttttgttgggagacagagtcttgctctgtcatccatgctgaagtgcaatgaagcgatctcggcccactccaacctccgcctcccggttgaagagattctcgtgccttagcctcccgagtagctgggactgcaggcatgggccaccacaccaggctaattttttgtattttagtggagacggggtttcaccgtgttgcccagggtggtcttgaacttctatgctcaggcaatccattcgcctcggctttccaaagggctagcgttacaggcatgagtcaccgtgtccggcccaaaaaaaatttcttttgttaaatggcagctactggacacttttctgattgggaaggaagtaccagtgtataaacaacaaaaaagccacaaagctagtcgcttgtgggttgacagtaggcaggattaagtaagagcagtaaagggtacagagagacagtgatttccctggttgtagcactaagggttatttttaaaagatttctactttttctttattctttcctggctaattctttgtgttttctcttacagatgggcttccccaaggatttattgacattgctacttgagtgtgaacagttacctggaaatactgatgataacatattaccttatttgaacaagttttcctttattgagtaccaagccatgtaatggtaacttggactttaataaaagggaaatgagtttgaactgaaattaggtatttgtttcatgtgtttgcattaataagcagaaaattaagtgctgtattggtttcatggttttgctgccctcttacatgctgagagaactgtgttaattctctggaaaccatctgacatgaaaatcagcttcattaatatgtttgggtgccctagcttgtaaattagctgaaggctagaagtcatttatatagaattttcttgttgacaccctaggcttaggggactggttgtctgtggggatagatcaaatygtgtacctttccaaaacaggttttaatgatgtttaaaagtggtcactgagatagtcttgaggatgtgctatgcagtagccaagccctcttacggtgtgttcctctcttagtgcccctttcctttcctacctrttcttcccttgcagtggtgtattagccttggacattaaaacatttgctttgtaaatttggaggcattctgattaaacagctgagtaaaacaaatcctgcttgtcttagaagcgccataatactagaaccagctgctggataaagaggttctagatctgggtgacttctagtatagccagtccagactgcagtattagggaaattgaattaatattagcttgaaatttagatgtcttctctcctagagccatgtaagggattgttattaaaatcagttttggtgaagttctaatactagtgagaccttttataaaggctgatccgctaccagaaaaccccctgcccagtttttaggaagtagaaatgtgaaactaaaatggcacatatttttaatgtatagttggtaggccatggttcttaggtttgatcccactgtgggccagcgctttcctcctcactgccataaaaatggtctcgttcctcatgtcatgggaggagcagaggaaggaacatagggtcacagttatctatgagggtgagataaatgctgtgatggtcttcatgctacaaaaatttgtcgaacacctactgtctaacaaacatgccaggcactgaaggtaaagcagtgaacaggagagacagtgaatattggaacctggagacactggaggtagggataaaagttaggcacagtgtggttataacttaatggggattttgaattagggtagtagccataggaatggaaagggatgaattttgagaatcacattattgaggtgtagttaataagtaattcgatgaggggaaatgagaactctgggaaggccatttttgagatttgagtggtgatgccattcatacaggagtcagcaaaaggaggaccttggtgcagagtggagaaattgctacatttgattctggatctgttaaatttcaggcatccgtgggctagttacgacaagagctctgaaaagagactgagactagagaaaagaatttaaggtttgaaacagcaaaaagtaagacttccaaggaggctgtttggaggcagatgtgaactacgttgaaggccgaaactgtggaagcaggtacatttagagggaaagaagagagcaactttagtaaggtataacttacatgcagccaagtgtgcaaatcttaaagtatgtagcttgagcttttacatgtgtatacctgtgaaatgctgaatggaggacttttaagagccatttttgtcaggattaaatgacactaagtgaagcaagtaagcatatacagatgctcagcaaaattttttttttttttaagacagagtctcactctgttgcccaggttggagtgcaatggcccaatttcggctcactacaacctccccctcccgggttcaagcaattcttgtgcctcagtctcccaagtagctgggattacaggcatgcaccaccatgccctgctaatttttgtaattttagtagagatggggtttcaccatgttggccaggctggtctcgaactcctgacctctcaggtgatctgcctgcctcagcctcccaaagtgttgggattacaggcgtgagccaccgcgcccagccagatgctcaagaaattttaatttcttggccatgtttttgtgggcggttgaggccaaactgcaggaggcgaaggagtgatcttaggcaatgagagtgatttgaaagatggtgagggttgaggcattggcttttcttttacaagcagaagatttatttgtagctggatagaactagtagatggaaagtgattcttgttgcctttgcttttttttttttttttaatgtgtttttgttttgttttgagactgtcttgctctgacacaggctggagtgcagtgatgtgatcatggctcactgtagcctcgacttcccgggctccaacaatccttccgtctcagcctccagagtagctgggaccacaggcgtgcacctccacacatggctaatttttgtggttttggtctcatgttgcccaggctggtgtcaaattcctgagttcaagctctctgcctgtcttggcttcccagagtgctaggattacaggcgtgagccaccacagctggcctcctttgtatcttaggtaaggttgagatttcaacattttattttatctgattcactcatgtatacccttagaaggaaacgggtactctggtaagttttttgtttgtttgtttgtttttctaagacggagtcttgctctgttgcccaggctggagtccagtggcacaatctcggctcactgcaacctctgcctcccaggttcaagcgattctccttccttagcctcctgagtagctgggatcacaggcatgtgccaccacgcctggctaatttattgtagctttagcagagatggggtttcaccatgttggctggactggtcttgaactcctagcctgaagtgatccgcccacctcaccctccaaagtgctgggattacaagcatgagctactgcacctggggtgctctaggaatttttacttttttttttttttttcgagacagggtcttgctctgtcacccaggctggagtacagtggtgtggtatcagctcactgcaacctctgcctcctgggctcaagcaatcctcctatctcagcctctgaggagctggtactacagatgcatcacacccagctaatttttgtatttttttgtagaccacgttgcccaggctggtatgggttttttgtgttttgtttttcttttgagacagagttttgctctgtcgcccaggctagagtacagtggcacgatctcggctcactgcaagctctgcctcccaggttcatgccattctcctgcctcagcctcccgagtagctgggactacaggagcccgccaccacgcctggcttattttttgtatttttagtagagacggggtttcaccgtgttagccaggannnnnnnnnnnnnnnnnnnnnnnnnnnnnnnnnnnnnnnnnnnnnnnnnnnnnnnnnnnnnnnnnnnnnnnnnnnnnnnnnnnnnnnnnnnnnnnnnnnnnnnnnnnnnnnnnnnnnnnnnnnnnnnnnnnnnnnnnnnnnnnnnnnnnnnnnnnnnnnnnnnnnnnnnnnnnnnnnnnnnnnnnnnnnnnnnnnnnnnnnnnnnnnnnnnnnnnnnnnnnnnnnnnnnnnnnnnnnnnnnnnnnnnnnnnnnnnnnnnnnnnnnnnnnnnnnnnnnnnnnnnnnnnnnnnnnnnnnnnnnnnnnnnnnnnnnnnnnnnnnnnnnnnnnnnnnnnnnnnnnnnnnnnnnnnnnnnnnnnnnnnnnnnnnnnnnnnnnnnnnnnnnnnnnnnnnnnnnnnnnnnnnnnnnnnnnnnnnnnnnnnnnnnnnnnnnnnnnnctttactcaaaatccacaaaattagccgggcgtggtggcgggcacctgtggtccccactactccggaggctgaggcaggagaatggcatgaacctgggaggcggaggttgcagtgagccgagatcatgccactgcactccagcctgggcgacagagcgagactctgtctcaaaaaataataaattcaaatatggtgtccataaataaggttttattggaacacagtcacacgccctcattcatttacatattatctgtggcttatttttttgccttttagtaaattatggtaagatcatacataaaatttaccatcttgacccttttttttttttttttttttttttttgagatggagtctcgctctgtcgcccaggctggagtgcagtggcgccatctcggtttactgcaacctctgcctcccaggttcacgccattctcctgcctcagcctcccgagtagctgggaccacaggcatcagccaccacgcccggctaattttttatattagtagagacggggtttcaccgtgttagccaggatggtctcaatctcctgacctcatgatccgcccacctgggcctcccgaagtgctgggattacaggcatgagccactgcacctggcctcatcttgaccatttttgagtttacagtacagtggcattaggtacattcacactgtgcattatctatagctgcttttgcattaaaatgacatagtgagtagttggaccagagagtactatttgnnnnnnnnnnnnnnnnnnnnnnnnnnnnnnnnnnnnnnnnnnnnnnnnnnnnnnnnnnnnnnnnnnnnnnnnnnnnnnnnnnnnnnnnnnnnnnnnnnnnnnnnnnnnnnnnnnnnnnnnnnnnnnnnnnnnnnnnnnnnnnnnnnnnnnnnnnnnnnnnnnnnnnnnnnnnnnnnnnnnnnnnnnnnnnnnnnnnnnnnnnnnnnnnnnnnnnnnnnnnnnnnnnnnnnnnnnnnnnnnnnnnnnnnnnnnnnnnnnnnnnnnnnnnnnnnnnnnnnnnnnnnnnnnnnnnnnnnnnnnnnnnnnnnnnnnnnnnnnnnnnnnnnnnnnnnnnnnnnnnnnnnnnnnnnnnnnnnnnnnnnnnnnnnnnnnnnnnnnnnnnnnnnnnnnnnnnnnnnnnnnnnnnnnnnnnnnnnnnnnnnnnnnnnnnnnnnnnnnnnnnnnnnnnnnnnnnnnnnnnnntactagaaggcaaaagtgactagataaattcaatctactggtgaatttgtctcatcaaactttcttcacacacacacccattaggcaaattgaatcaacttctttgttgtgctggaaaaagtaggtacatcttggccaggcgcggtggctcacgcctgtaatcccagcacttggggaggctgaggtgagtggatcacctgaggtcagaagtttgagaccagccggccaacacagtgaaacgctatctctactaaaaatacaaaaaatttactgggcatggtggcgagcgcctgtaatcccagcaggaggctaaggcagaagaatcgcttgaacctgggaggcggaggttgcggtgagccgagatcatgccattgcactccagcctgggtaacaagaatgaaactccatctcaaaaaaaaaaaaaagtaggtacatcttttagcttgatggatcctagctctacctaaagaagtagatgggttgggtgcagtggctcacgcctctaatcccagcactttgggaggctgaagcggacggatcatgaggttaggagttcaagaccagccttcccaacatggtgaaaccccgtctctacaaaaattagctgggcatggtggtgcacgtctgtagtcccagccactcaggaggctgaggcaggagaactgtttgaacctgggaggcgtaggttgcagagagccgagatcgtgccactgcattccagcctggcgacagatcaagactctgtctcaaacaaacaaaagaagtagatggtaaatatgaggatccttccacagcttgacttggatggacagggcttctaccctaacaggatggggtctctagcctttttctttcctacagtttgttttaattaagtttcaaagcaggccgggtgcggtgactcacgcctgtaatcccagcactttgggaagccgaggtgggtggatcacgaagtcaggagatcaagaccatcctggctaacacggtgaaaccccatctctactaaaaatacaaaaaattagccaggcgaggtggcgggcaccggtagtcccagctactcgggaggctgaggcaggagaatggcatgaacnnnnnnnnnnnnnnnnnnnncatgaacccgggaggcggagcttgcagtgagccaagatggcaccactgcactccagcctgggcgacagagccagactccgtctcaaaaaaaaaaaaaaaaagaaataaaataaatttcaaagcaattaatagtttgtcacatttgtttatatgttatatatctacacacgtcacttcacccctgaatacttcagcaaaaatctgagaaaaaggacttttgcctcctacataaacacaattctgttctatttcaagaagtttagcatcaggctaggcgcagtgggtcacgcctataaccctggcactttgggaggccgaggcgggtggatcacctgaggtcagaagttcgagaccaggct

SEQ ID NO: 94534 - DNA, 16933 bp, Homo sapiens
ggacttggcagtgggggtctagaatcccaccctatccccaccactcatcatcgtgaccctgggagaggtgcttggcccctccagtccccagcaacccaccctcccataatggaaacagaagagtcacccagagcctcctgctgctggggagaggaagagaaaggagggtggggcagggctggcctgggatttgggggacagtggccatcctcagggtggaccctccctttcccagcatcttcctcagctggagccgctgggcaacagcccaatgggcctggagagagctggcttcccaccgggcctgggatcggacctgcagggctgtgctgggcctgtggcatcagcggctgctgcagtcacggctggtggagcggtgggcccaggagcggggctggcggctggcacgagatgccctatgccactggcactcctgttggcagggtgagtggagacttggtcgggggcactgcgggtgagggcagggccagggtctgtctgagacccagactgcagccctggccaacaacttgactgtaaccgcatgggagaacttgaggcagaggctaagctacatctggactcctgacccatagaaactgtgagataacaaacatctgtggtttaaaactaataagtacttgggtaatttgttacacagccatagctaacaaatgcagttgatcagagaggtccgctgagctgtgacactgacctagctgggttcaaagaaaacaggctgaccaactcttacacgttgtgctatgaatgagcaaatgaatagacctcagctgtgaaatttccgagagggacagtgactctgcagagtgcctcaccaccccccataccctcccatcccctagcaaattctggtgatgagacccccacagggcacacccaggagtcaggtggcagagcagaacctgggggcttggactctgtagtcttgagtttgaatccctgctcttccataccctgactgtgtgaaacttaaacaacctagttaacctccctgagtctcagcttacacatctgtaaaatggggataatgtagtccctatgtcatcacctttatcttcatccttatcctcacctggcctctaggagtcactggtcggagccctgagttgggagagaagtgggcagagtcatggtgcccttaggggccagcagagttagtcagggagggtcccaggaggaggtgaggagggctcagcgggcagagcagtggcgagagaagttgaggcgtgggaaggggtcagcaaaatagggcagtgggaaggactggatttgcagaggctggctgagggtgcagtgtgctagaagccctgaggaatgtggccagtgaagggaggagggatggtcccaaggcaggcttgctctctgggtcttggcctctgggcaaaaagagctgttgcatggcccaaccagtctttttttttttttttttttttttttgagacgatctcgctgtgttgcccaggcatgcagtggtgcgatcttagctcactgcaacctccaccccctgggttcaagcaattctcctgcctcagctcccctcgtagctgggattacaggcgcctgccaccacacctggctaatttttgtatttttagtggagatggggtttcaccatgttggccaggctggtctcgaactcctgacctcaagtgatcaacccgcctcggccttccaaagtgctgggattacaagcgtgagccaccgcacccagccccaaccagtctttttataacctgatatcagaagtgacatcccattgcttctgccaaattctgtctgttaaaagcaaattagtaaacccagcctgtattcaaggcggggcattgcccaggacacgaacacaggatgctgtcttggaggctgcccactacaccgacatatcgcattaatgagctggcaggcagggctgtggtggttctagaaagtcatgtcctgtccgctggagacagctgcttatgcagcccaatcattccccggcaggaacactgagccagtgtttccagaacttctagtttttacagaaaaattgaaaattagatttttgggccgggcgcagtggctcacgcctgtaatcccagcaatttgggaggcccggactggcggatcacgaggtcaggagatcgagaccatcttggctaacatggtgaaaccccgtctctactaaaaatacacaaaattagccaggcgtggtagtgtgcgcctgtagtcccagctactcgggaggctgaggcaggagaatggcatgaatccaggaggcagaggttgcagtgagctgagatcgggccactgcactccagcctgggcgacggagtaagactccgtctcaaaaaaaaaaaaaaatagaaaattagatttttacctgaattctccagatttgaaaatactgtggcaaaattaacaaacaaaaacaaacccaacaactctatgagctgggctggcctggtcaccagcaggacacccataatagaggctttttaacccagacagtcagggtggcctcctgtgttcccacctggtagggggcgaagggctggctgcgtagaggcccatggggagaggctggggtgagcacccagtggctcttcagcatctctctggccccagggcagcagttcctgcatgaaaagtgccagacatgggtgcaggtccacctccagggcctgcagaaggtggtgttccggagctggcagcaggcagcagctcatcagagatgcacagtgacccggccagagcagctgctactgcagaggtgggtgggcctgggggtgggagggtgttggtcctccccacgcaaggaatagcaaggagagcacccagggggtgggaagctcagacggtggcccagataggaggcctgtggcctgggaaaaaaggggcatgaagggagatcctagcctggaaacacagggccatgaccactgacaccttattacctattttgggagtggtggcaaaccccacccctaacctgtggccccaacaagccccgggagtccagctcctggccaggtcagttctttggttttagaggatatgattaagatgggagaaatcagctgggaacagtggatcatacctataatcccagcactttgggaggccgaggaaggtggatcacttgagatcaggagttcgagaccagcctggccaacatggtgaaaccccatctctactaaaaatatgaaaaattagacgggcatggtggcaggtgcctgtagtcccagctacttgggctcaggcaggagaatcacttgaatccgggaggcggaggttgcagtgagccgagattgcaccactgcactccagcctgggcgacagtgcgagactccatctcaaaaaaaaaaaaaaaaaggaggagaaatccactcctcggaaatctaccataacgcccattgtgaggagttacagcaaggagaattctgctgtacactgtcgctaagagaagagagtgaaatcttcatttaagtaaagatgttctggtggaacatgtatacagttcatgaatgcatattgtaaaaccaagcggaggacacagaatggctcctcccacagttcagtacaaatttgcgaatgttcagtgtccccgtggggcagtgaactgttggctacagaatggctgacgtctgtgcttttgcatctgagggtgtagatggttattttgtttgtttgtttgttttttgagacagagtttcgctcttgttgcccaggttggagtgcaatggcgcgatctcggcttaccacaacctccgcctcccgggttcaagtgattctcctgcctcagcctcccgagtagctgggattacaggcatgtggcaccacacctggctaattttgtatttttagtagagacggggtttctccatgttggtcaggctggtctcgaactcccgacctcaggtgatccgcccgcctctgcctcccaaaatgctgggattacaggtgtgagccactgtgcctggccgtagatggttttttttcttggcttctcactgagtgagagatggtgttcctctccctcaccaaccacctgggcatgtgatgggaggcagggcatggctgatgtgggacttgaacccatactgctggttcccatccccctcgcagggcagcccctgccctctgaggctgaggttgcaagatggaaagccagtgctttcacctgttactggtcgtttactgttttgtgggagatttgcaagtgtaactttgaataaatgtgacttttgactctgagaacgagacaagccctcccatgcatctgtttttgttttgtttttttgagatggagtttcactcttgtcacccaggctggagtgcacttgcgcgatctcggcttactgcaacctctgcctcctgggttcaggcaattcttctgcctcagactcccaagtagctgggattacaggtgcccactaccaggcctggctaatttttgtatttttaatagagacggggtttcaccacgttggtcaggctggtctcaaactgacttcaggtgatccactcaccttggcttcccaaagtgctgggattacaagcatgagccaccacacctggcccaatgtgtctgttttgcagctacttccaggcctggtgtgaggttgtaagagacacgggggtgctccgggcccagcatcaagcctttcaggatggcctgaggagaagagcactgggggctgtgtttgccacatggcgggaagcccaggaagtggcagccggggcacaggagcagcgtgtggcccaggcctcccttgcccgctggagaagctgcgggcagcaaggccaggaagatgggcagcagaagaaggcccgggccccacaggccttcccagcatggccagtggccccgggcatgcaccatgaggcccagcagcaggcaggagagagcgctggggcccaggcagcccagtgctggacttggtgctgggctctgtgggtgcatgagtcctgtcggggccaggtcagccgagcccatgcttcctggaagccgcgagcctggtgagtgctgtggtctaagtgcagccccactctgtgcttccagctcaggcctcaagcctgtttttggcaggggtagagcgtaattcatggctgggtggcagggcaaaggctcaagagggtggttgggggtgacagggagaggccgccctggccatctagtcctgggccacatcctggcaccgcctcttgctgtgtgtcccctccttggggaagtctctaatggtcatgccttgcagtcaccagcacagccagccactcagcaagcgccataaacgcgctcttgccagggaaggggaggcaaagtggcactggcaggactgtcccctctctgcccctaaacaggatgcttgtccccgtctgtgattttctccttccaggtcgctctccatcctgtttacccagattctccctccagaaaagggagtgtgggaggtgggtgggccccagcctggggctgggcccagaaggccccctcccgcagggcactgggggggctccctgcagagagtcctggccttgatggccctggctgcagactccttcctctcccgcagggtcctagaggcctcggtgcagtcggcggtgcgcggcggtgtccagcgagccatcctcacccagctccggccggctgagctcaggcgcttcctgcggacagtgcagctcagggtgcggctgggactgccaggggccggcaaggtacgccccaagccccagactgacctcacgctctggccccggatggccagcagggggagcctgctgctggacgccccagccccttggaaacaggtgaagggagcctaggcagggcgggaggtccaaaaatgaccctcggaccaccggccttagaatcagcttgattcagcccgtggtggcagcatggctggatgcctccccaggggcccagcaacctcgtatgcaccacctctccccagttctcagtcagcctctgacaagcaactctgaatccatcagcaaagatgaacctggcacctctcgagtgccaggccactgcaggtccggccgcaaagaccagcatgttgggtcacagcctgttagggagacattgaaatgcatgctttctcacggtgcagttgaggatcagaataggtacacgaggacagtagcatttttttgtcaagtttttttgtttatttttgagacagagtctggctcaattgcccaggctgaagcagaggagtgatctcagctcactgcaacctctgcctcccgggttcaagtgattctcccgcctcagcttcctgagtagctgggactacaagtgcacgccaccacgcctggctaatttttgtatttttagtagagacggggtttcaccatattgcccaagctggtctcgaactcctgaactcaagtgatcctcccacctcgacttcccaaagtgctgggattacaggtgtgagccaccgcgccaggccaagttttttttttttcttattggaaaagtgaaatatgcttattacagaaacctcagaaaatataaagtagaaaaataccaaaatttctttcataattctctctacccaarggcatcggtcagtccctctccagaccagaagcagttagttctgacaccaacaartggtgataagaggttgayagcctagcaagggggaagaagccaccaccaaaccaaacacaaaaaatgacactgcacagcagtctggggacatgtccttgaaggacacagccccaaagatactggcaggtgaggtagtgtccctaagatcaacaggcatcatcatgaatcctatttcagaatgccacaaagaatacattttagagaagattctaagagaaaaagctaaggtgattttttttttcagtcgttttttgttctcagacagtgtctcactctgtcgcccaggccagagtgcagtggtgcgatcacagctcactgcagcctcaacctccagggctcaaacgatcctcccacctcagccacctgagtagctgagactacaggcgtgtgccaccacacccggctaattttttttttttttttgtagaaatgggatctcactatgttgccagggcttgtctcaaactcctgggctcaagcgatctayctgccttggcctcccaaagcattgggcaggcccattacgccatgagccaccacacctgctggtttttgttttttaaatggaattgaaaggaactagccttggctagttgcagaattcacacatatggggctatggcaacagcagattctggagtctcagggtcttttctttctagataagttacagggcaattgcttttcagagtacttttacatttctattccattcttgtcagtaaagacaaggatcccataagctgatggagaaactgaggcctctagaaactaaacgctgggaatggcacccagggtgctgaattccagggtctcctcttttctgccacaggcacacatgccccagcagcccctttggagagccccctctctatagggtactagccgggggctcagactctggagtcagacggcttccgagggatgaggcctcagacaagtaactcagctttgaaatgttttcagtggggagagaaatagccccctcccagggctgtgctccgggaactgactgagggctaactattatgggcccaccccattgttggaatgtcttcagccacatgggggaatgggtggaagaagaggccgggatgtgtcctgccagctagagcagcgaagaaatcccagcggggccccaggaagtccaagcccatggggttcaggtgctcctctctggctaytccttcagacccrcagctgctggacacaggccacagagctggtgcctcccgcgccatcactgcagtgcagcctgggtggacggaggaagccaaggggaacggcctgggctcagagtaaggagaccttgccccgggggacaaacggtgtctgaagtgcaggggtgaagcggtctccagtcctcaggggcctggaaatcagctccttgggacacggtcttatgtgtattgaccattctccccatccattccctcttcggaatgtttcagctgttctgagaaaacactttgcattcctgccccgcccctgtgatttctctttgggyggcaggcagccgkgagaggctggaggcctggggagatgggggcagggcacaaggctaagctcagcaccttcctccaccctcctcactgtactcaactcctargcgggcactaagagcagctgccttcctggacccaccttaamctcttgtgactcaactcccctttccagggtgcagggaacattccctctgccctgccttccagctctggccacagtggcctggacagagtagctgggtcccaggcctgcccctgtggacgagggaccagggaccaagagcgcactccagccctgagcccagagcctscaaagcccaaagcaaggcccataaacggaggctacggtaagaggagctgtgtgtgcagtttggtgggtccgagggatgggggcaagggctgaggggcttgcctgagccatggctacagctgggccctctctggccagtgctcgttcctgcaggatcctggaaaagcaggcccaggcccatggctctgccctccttctggccctgaagggtcacgatgctcttggccatcaggaggaagtacctgcagcgccggtgcctcgaggcactgcttcacgggctgcggggttcccagcaggccaggtgcctggcagtggcatggcagcactgggtggatgcccaaggggcagagcagctggtgcggaccctggtgagtgggtgcacccctctccacactgaccatctcccatttcacctcatacttaacccaaacccctctcaaaagtatggcccttggacctactgactccaaaaccttgggggacaggcccaggaatctgcattcttaatactcctcagatgacacccccttgccatagccctttcactctggtgcagcagtgtcgggggagaaaggcagaagggctggggactgcgggggagcgtgagcacaagaggccttctctgccaactgtccccaaagctcagggagtggcacctgagatgggcctggcagacgtggtggcagcggatcctgcgactgcgagtggctcagcagttacagcagcaggaagatgggtgggtcctttcccaggtactgccctcttccctgcattccactcagccagccttccagaagtctgtgccacagccrcgcaccgtggagctttccctgcttgccagccccggggccccttcgttttcaggggagggggtcagttccattacagaacacacaggctggatgctggagcccttgctttgatttgtggccccagctcaggccaggcccacccggtccatcagtttgcgaagaaggtgtggcatgaggcatggctgccactcacactagcccatggagggcctgggtcctgagcgccccctccctcatttgctctgctctgagtacagcttcccagctcaccatcagatctattctgagcttgtgcatttggcctaggcaagactggctggctgcttggggcagagggaggggccctggggacaaaaggagctgggtacaggggttgctctagcaggcacagcacagaccccggagaaagcccacaacaatagcatttcctctcctccctggttccaggcctttaagaagtggcaccaacgcctggcagccaggagcccaaggagaggagctgccagtagcccaagaccctggagcaagccaggccccaagggccccgagagtggacaggaagccgccrgagcaccgcggggttgggggcytggggcagagcatggggcccagctgcagctgtgacttgttctcatagaataaaaaacagaactgaacttagccttcccagggaaggaaccatgccccacacatccagggagtgatgacagaggggacagcttgaagagctctgaaggacaataaaacccactcctcagtcctagctgctgctttcagtctctcctagcggctgcccctctgccccagccagtgaggccaggaagggagtaaagaggacatcccacaattgcgtccacccccttggccatcaggctgctcttccactacacgaaacagcccatctgcacctgccagtcactgcccccaggccctggggcttgcaggtgactcgtggggagccaggccaggcagataacctctgggacaggacgaggggatgaggaaggcagctggcaggacaagggcctacctgaaaaatacaccaggaagctgggctgctgcacaggcccaggcagatctggggcccctgtgctggcaaatctcatcttagcctctgacagggaacggggcagcatcaggcctccacagccaggcaaaaggggaaggccacgagccccaccaagcacaagggttcagactgccttcaacccttaaggggcactttttctctcaaggctcagaatagacaactgtgccaaaaagcagcatggtaggtgtcagcccaatgcccatccagggggctggtgccatggacggctaagtgggcaggcagggcagtggtgtgccccttcagtcacaagtaggtggggcccagctgcccacctctaggaggtggaagggtacagcactttgccacatctcttctacgatgccaccagtgcctgatgcccttgcgtgttttgcctgtactgcacgggctccaagkgtaagttcactgggagtcccaggctggctctggaggctgccttggttcgagggcttagttggcaacaaccactctcctcgccttctcaggaggtgccacccactgtggtcctctgcaggacgcaagtgctccccaccaaaagagcacagactcctggctagagcagagagtactaggttcccatgtggggccgactcaggtccaggaagagcctggaagcctcactccagtctagctgccattgtcaggtgggggagtggaggccggggtgggagagacacgaaggagagtggagttcccaagagaagcagcactgtggaggaggaaggcgggacaggagtggctccaacgcagggcgtcaggacgcagggtcatggagcctccgtttctctcgcattctgggtgggcctgttgagaagctccaatgtgtcttccaccacctgccagaggcagttgtccagtgggaagtcattgtccaccaggttgaccaggaagtagttgtcgtggatgtactggatgatggtgcgggacggggactcctcctcatacagctttccccaccgctcaatccacagggcaaaggcctcgtcctacacacacatacccccgcacacacgcacacatgcacacacacacagaggcaagattaacagggctctccaagggctctgctcaacaggacatttcccggaatagaacaaggcccactgccagtatcacttcccacccctgcccagaaataaacaccctgcgtcagcagtgacatgggtgagtcagagctgggtgtgccctgaaggctgggtccagtgtggccttcagcacacgcttgggacttggtcccaatccctccccacggttttccaggtgggcggggcaagcttgcccccggctcctttaccttccagaacatgaagctgacgggatccactacggtgggctggatgatctctcgcccagggaagatgccccaagtgacagcattcggctgcagttcaggggcattggtgatgttttcaccctgaggggatgtggggtgggggtaagacctgggccaagaacaactggagtcccactgcctggacagccttgactcaatgaggctgtctgggctcaataccctctgcctgcgcctccactcccggcctccactctccctgcgcctccactcccctctccctgtgcctccgctcctggcctcctctgcctgcatctgtgaatgatatctctccccacacaagcctgaacctagaggcgtcctggccacttcccctctcctccttgagcaccccctgctcactctctgatccattccctcttgtctagcccacctccaggagtgtgtttggcttgggtcactccaggggtctcttcactggcctccccggctctagccgtccccaatctctctcatccgtatgactatccactgtgatttgcctaaaataaagcaggaaccaagccaccccactgctggagaaaggcttcccttgcattgagggaaaactcaaattccagcaggacaaccatgatctctgcgggcctggcccctgcttaacactcccgcctcctcctgctcatgttcccggtttccccagatggtgcagctcactgcctctgcctgtcctctgccctgtcccaggaatacccttctctcctgttggccaactcctctttgtcctcagtgattcccacagatgaccctctgagaagccttccctggcctcccaggtgagatatccctcctctggacccgacagcatcctctcctgaacttgattttcccacttacactggctggtggtcacacattgatctgcctccctcactctaggctgggagctccttaagagcagggccccagttctgcctgtatctctctgtcttgcacaatgcctagcccaggctaggtgctgggtgtttgctcaacgaagggcctggtactctgtgggaaccctggggcctggcctaccttcacattgacaaggtggtaattaacccggagctcgtacttcttcagcacttgcagaagtgcttccgctgtctcgcgggaagtgaaaaactctaagtaggcctgtgggagagacaggtgcctgtcaccaaccccagccctgccagacgccctttcgcagacacctaaggtatcaggactactggcagccatgtgggcggaataatgaactgtggcgttggcacgtccataagcaaagggtgaggggagtggggacgtgagtttctcagtctggacaggtctgagggctatcagccacccctctcccaatcagtcagggaagactccacgaagaagccatttctgaacagcagcaactggtttgacaggccgagtcatgggagagaggccccacacattccatcctccccagtgcaagctgacaatgacattgacatctcctctagaaccagtgcctatcagggattaagctgggtttactcaaactcatttgctagaatgctgataatacgggaggctgggcacagtgagccccacgtgaggaaagtgggttcagggaagttgagcacgttggctactctgacagtaaacagtagagctggtccttaaactcaggtctttctgctccagggcccgtgggccttagatcagaacataatgttaactccagcagccctgggagaaaggtgtcaactcaggatagtaacagcagctgcctttcagggagtgcttcctgctcttaccatgtgccaagcacgttacatgctttgttaggtttcatgcccagaacacaagctacatcccattttacagacgagaaaaccaggctcagagaggtcgagtgacctgcctccataggtctgatttctatcttttttttttttttttttgagatggagtcttgctctgttgcccaggctggagtgcagtggcatgatctcagctcactgcaacctccgtctcccgggttcaagcgattctcctgcctcagcctcccaagtagctgcaactacaggtgcccgccaccacacccggctaattgttgtatttttagtagagatggggtttcatcatgtttgtcaggctggtctcgaactcctgaccttgtgatctgcccaccttggcctcctaaagtgctgggattacaggcatgagccaccaagcccagccaatcttttttttttttttttgagacagggtctcactttgtgggccaggctggagtgcagaggcacaaatatggcttactggagcctcaacctctcggactcaagcgatcctctcaccccagccccctaagtacctgggactacaggtgtacaccaccatgcctcggtcatttttgtattttttgtagagaatgggtttcaccatgttgcccaggctggtctcgaactcctgggctcaagtgatccacccgccttggcctcccaaagtgctggccgggttccgtgcccagccaggtctatctgacttaaagcatgagctcccatccgctccaatccatgctcattcaaaatttaagagcccaggagaggcaggctgctctgccctaagctctggggaacccacgggtgccggtcaagagaggggggcaccccgtgcctccctaccacaccttctggaagacatagcccccgctggggccccagcccacgatggggtcggaggacggcttcccgttgatgttgggctgtgagttgatggtgaggatgccctggcggttcacccgcagcagctcctccttcagcaggctggtctcagccgccaggggctcatcgttccagggcaggcaagtcacctgggagagacggtgagctggctggggcgaccatcaggtttggcaccctgagtccctctcacggcccccaacaaagacccagcctgtctttgcctccctaagcccttccaggtggaggtctcccaacttacccttctccctttgccatgtccacagcatggaggggagggcacaggatggggaagtcacagccccgcagcctggcctgcagctggggtcaggccaggggcaggggatgaaccagggtccccactccagcatcactcactttgtgaccattccggtttggttctcccgagaggtaaagaacaaagacttcaaagacactttcttcactggtcagctcctccccccacatcttcagcagctcctccttgggggacttgctcttcaggtagaagaggtagtagtccttcagctccccaaaggcaggggaagaggaattgcccctggcagaggggtgcccagaggtcagggcacactcctgacagagggcagtgccaccacatgcccaggaggccattcctgtaaattctgcccctgactcctcccaggtcaaccacaagcatgcaaacttcttctgccctcccgctcccaagaacaaagatatatttgcaaggaaggtctgcaggccctcaccagcggccgttagggaactcgtcccactcctgggtacggtagatgtaactctttggtctggaggcccagaagatgggacgtacatcttcctctcggcgcttggggtgggcgctgagagcccagggtaggggacgcctgggtgaggatggggacagagaattgagacaagggattggctagagggagccggaagcaggggagcacccctgaggctgagttcttccatctgatgccctctgagactggagccttcgatgtgcccagctagccatggcacagacatccatctgtaccaccgtggggagccagcactgcagccggggctgctcttggaccctcctctggggatctctgggccactgccctcacctggggtcctcagtccacatccccaggcgcttcagcacctctgtggtagccatctcgcggttgagggtgtagaagtggaggcctggcaccaagccactggccagaagctcctggcacaggctcacggccagctcgatgccatagttgcggatggcagcatcgttgtctttgattggctcaatcacgtccttgatctcctgtggcacctccagcttggacagcttcacaagctgccgaagggagtggtagccctgtccaagacatgaggggctgtggcggctgctggccagcccgtctcccaccctaaatacttctcccccttccatcatccatgccaaccacagtgtcaggcagagggacccacgaaagtccgatcatattctaggagcacacctgggcttggcctgccgttttctcctcttttttctgtttttagagactgagtctcactgctctcaaacgccagggctcaagccatcctcctgcctcagcttctcaagtagccgggactacaggcacgtgccactatgcccagctttcccactttttacagagtagagcagctgccctaagcattccagccttgggttgagccagccttttagccctagatgtgtctgttggtaacatggtgtcatctaacccagctgttcccatgctgcactgatcatccgaatcacctgccaagctcaagaagtaaaacacacattccaaggacctccctcagatttactgagtgagaacctccaggggtgggacctggagatccactttttgaaaaagcttatcaagtggttctgatgacagccacctttgggaaacactgatttaagcaggatttgtaatgagaattagaatcccttttggtgatgcttgttggccaaagtacaacaaacccctcaacagacactgttgctgggttttggggggaaaattagaggtaaccaaaatggggtggccaagcaacgctgtgcaagttctggacctgagaggagatctgggaagaactcagcgaactcagcactccacccagagcccccagcctgtgcgaggacggtgcggtgagagtggggtggagggagcttatgggctctcctgggcccctcacctggatgggaaagatcccggggacgatggggcaagtgatgcccatgtcggtgcatgccttcacaaagcggaagaatgtgtcagcctcaaagaaaagctgcgtgatgatgaaatcggctcccgcagacaccttctccttcaagtgcttcaggtcagcctcaaagctccctgcttcggggtggcctttggggtaacctgccaatagggatgacagtcaggagaggctggcctccacctgttcaaggcgagggatgaagagaccacagggactgggcagagagagtcctctgctttgggggctctgatcttgcac

SEQ ID NO: 94535 - DNA, 189391 bp, Homo sapiens
  misc_feature (1)...(189391): n = A,T,C or G
ccaagtttgcaccactgcactccagcctgggtgacagaatgagacttcatcttaaataaataaataaataaattttaatagaaatgggtcttcctgtattgccagtgctggtcttgagttcctgagctcaagtgatcctcccacctcagcctctcaaagtgctgggattacaggtgtgagcctacttgtatgctatgggatacagggctgagcagaaaataacccagcccctgccctcaaggggcttacagtctagtggtagggacaaatattaatcaagcactcaagcagtgtgaaaagccaaatgtaattatcaccacccctggagttacagagagctagatggctgaaacagcagggaagggacccctgagctgagaactggtgaatgggctaacaagcaaagagagggaagaacattccagaaaaaggaatcgcatgtctaaaggccctagggagcacagggactaaaagaggccagcatgacaggcagagagggatgggaatagagagggagatgaagctaggaggccttgtgcttgtcaaggagttttggctttattccaagtacagtgggaagccgttgaagctgggagcgtagagggagagggtaactatagcctgatcagatccgatttagatagttctggctcagaacagtcaagtggggaagagttgatgggtttcctggaaatgaaagaaactgacaagtagtgaatcagataaatacttggctcaaggtcatgtccattcctggaatcaacccatattcaaacactctttgattgggcaggggtggggtaggcaaaaaggcccactcccttagtcaaggcaggatgtctctgaacggtggtcctagtccttgagctccctgtgggatgaccaagaccttaaaacaaagataaacatgtagaatgatcggcccaggatttcagagaagagtgaggaggaccctgcttccacctgagcagcgggatgatcctgttccacccaaggcaggggtcccagtcctagaacccgccccttccttcctcctcctgatccccagaagaacggtgagctctgtgtgtgtgtgtgtgtgtacacctttggctctaggatcctggttcttactttctcacctacttgttctgtgactttgaataaatccccttctctctctgggcccgtctctttattggaaaaagaggaagttgaagtaatcagtgactcaacttttggggtggttcacagaccctttgagagtttgttgaaagctatgaccattatacacataatttctggcagttgcaggggttcctgtagccctggggtggggctgggtagcaggctttacctgggactcaagtgaaaaatccttggatgagacatcaacaggcaccttttctgatggcctgctaagaaccaagtctcatactctgttctagtcctcatctcaatcctttaactttttttttttttttttttttttcagatgaagtctcactcttgtccgccaggctggagtgtaatggcatgacctcgactcactgcaacctccgcctcctgggttcaagcaagtctcctgcctcagcctccctagtagctgggagtacaggtgcctgccaccacgcccggctaatttttgtagttttagtagagacggggtttcaccatgttggccaggctggtctcgaactcctgatctcaggtgatccgcctgccttggcctcccaaagtgctgggattataggtgtcagccactgcgcccggccatcacagtcctttaatcattacttttcccacttggagctcggagatagcacttaagtgacttgcccaagctgagaagagctgaagcaggacccccaagccaggtctttgtgaagctaaagactgttctccctgttccaaagggagacatcactactcttaccctttccccattccgccactgcccccataataccacacattttagacctcatagccccctcttttttgtatttttttaaccccaaagaaggcaaacgagggttgcaggtttatttatttatttatttgagatgtggtctcatagtattgcccaggatggcctgaaactcctgggctcaagaaatcctcctgctgcagcctcctgagtagctgggactacaggtgtgccgccattcccagccttttaaatttttatttattagacatgaggtctcgctatgttgcccaggctggagtgtggaggctattcataggtatgataatcgtgcactacagcctcgaactcctgggctcaagcgatcgtcccatctcagcctcccaagtagttggtactacaggtgtgcaccaccccacctggctgtattttcaactcctgtcatggagcaaggtttaccttatgaagtaagatagaggatctgaggcctcgataggctaagtggcctacaaggtcacatagcaagtgagtggtcgagttgagagctagagacagaggacatttgtgttcaccttggaagtcccagtgaggacgagccttacctagctccaactcagaaggccagaaggaagaatggtttgggggaggctgtaatcaggggaaggatgcagggccctggggtgagccctaaataaggggcttcctgtgagcctgaggatggccatgcccttgtatatactttgtcctccaggcaagttctctgctggccctttaaatcttctcaacagctctgggtggggcatctatccccactttacagatgaagataccaaaagaacttcatccaggccaggcatggtggctcatgcctgtaatcccagcactttgggaggtcgaggcaggcagatcacttgaggtcaggagtttgagaccagcctggttaacacggtgaaaccccatctctactaaaaatacaaaaaattagccgggcgtggtggcgggcgcctgtagtcccagctactcaggaggctgaggcaggagaatggcatgaacccgggaggtggagcttgcagtgagccgagattgcgccactgcactccagtctgggcaacaaagcaagactccgtctcaaaaaaaaaaaaaaatacaaaaattagctgggcgtggtgacacgtgccaatagtcccagctaccgggaggtcaaggcaggagaatcgcttgaacccgggaggtgcactggactccagcctggatgacacaacaagactccatttcaaaaaataaaataaaataaaataataaaataagataaaataaaataatattaagaaaaaaaaagaacttcatccagctcctgttcagaagtgaccacacacacactgtcttcagcatccctcccaagttcccctggtccatttctcaggcctcatcttcctgcccatctccatcttaccgtgcccttatttacggtgttcttcccttttcaccctctgaaacttcgcacctgttttcgcctttgcctggaatgttgcctccttcccccactgaactccttcctactcatccttcaagatcctatgccacagtctccccagtcatgcagcaaaatgggacagattgccatcttccttcccatttccctctcagctctcaccccacgtttccttttttctttcttttttttgtttttgagatggagttttgcccttgccgcccaggctggagtgcaatggcgcgacctcggctgaccgcaacctccgcctctctggttcaagcgattctcctgcctcagcctcccaagtagctgggattacaggcatgcgccaccatgcccacctaattttgtatttttagtagagatggggtttctccatgttggtcaggctggcctcgaactcctgatctcaggtgatccgcctgcttcggcctcccagcgcccagcctcatcccgtgtttctaatcaatggcttgtgtccattttcctctgccacacactgggctctcgtgtgtttgccaaaggagtgagggaattccaggaaccctcctgaaccacccagcctcaactggtctttcagttcctaagaacagcaggacatttaaagtcgatgcctgtaatccctactgctgacttcaagtatcaagtttatagttgctgcccccatccccttcgtttttactcccttagccgccttctttttttttttttttttttgagacggagtctcactctgttgcccaggctagagtgcagtggcacgatctcagctcactgccagctctgcctcccaggttcacgccattctcctgccttagcctcccaagtagctgggactacaggcgcccgccaccacgcccggctaattttttgtatttttagtagagacagggtttcaccgtgttagccaggatgatctcaatctcctgacctcatgatgtgcccacctcggcctcccaaagtgctgggattacaggcatgagccaccatgcgcagcctcccttagccttcttttatccatcttgtgcctcggccctaggggtccttgctatgatcttccctttatccagctttccatgtcccccccaggagccaggcattctaagccacagagctgaccctggaacctgtcaccacttaccttctaggctcccatggcctatgaaactcgcagtacccttgcctaaggcatgcagtgcccgtccctagctggccccctggaggagtcctgtttcccacccatcgtcttttccactctccatccatccgttttctctaccttgttaaagaaaaaaactaatcagattctcgttaaagatggcagggaagccaggcggggtggctcaggtctacaatcccagcactttgggaggcccaggtgggaggacagcttgaggccaggagttcgagacctgcctgggcaacacagtgtagtcccagctgctcgggaggctgaggtgggaggatcagtttagcaggggtgttcgaggctgcagtgagctatgactgcaccattgcactccagcctgggcagcatagagagatccttgtctttttttttttttgagacggagtttcttaatgtaggccggccagggtgatcacataccaagcgtggagatattcttgacagcaggattctggctaaaactggactaagaaggccaaggacagagcccaaggtcggggcctggtcagaaagaggtctcggaggagcctgactcaagtgtgatcaagggaagtcttggtcacccgctggcaacttggctttttcttgtctcccagcctcaattcaagctcatcccccttccctgctccatcaaaatctccttgatttccaaggccagcttcagtgtctcctctcaaacttttctgagccttccctccacgggaatccatttttcctgcctgggcctggggagagaagtccatttctccttcccaaacccagagaccattgaggcaggaaagctccctggctgccccatagggcagggcagggtaggcggggtttagtgactccccggcgccgacgctgacccgcacccctgaggaaggggtctccggggacggccgctgttgtcgctgtcgcctccagtccccgccccttcccccctcagtgaaggggacctagagtgagaactggtggtcacgtcctacgcctaggagggcccctgggtgttcacccacccccccgggggccccatcctgggccagggtccgcttcctcgagggaaggggcgaattcctggaaggtctccttccgggcgcagttgcaatggattgccttgggggtgctgaaccctgctgggggtacagagacgtttccgaaactcagcggctcggtcgcccccaaaggccaggcggaacacacgcccacaccgcggctcccttcccgaagtaagaccgccgggccacggccgcccccaggaagccccgcgccccgcaccccacacccggggacacaaacaggcgccgggtagccgcgagggccggcgcggcgcctttaagaggcggcgggcggcgctgccccctggcggccgccccgccgcttcctcgccgccgcgggctcaagcggggcggccgggccagcgcggggcggcggcgggcaggggcggcgagtgcgcgggcgctcgccgccgcccttctcggcgggcagcgcgcgaggaccaggccgaggaggaagtggcggcggcggcggcgggtgaggatctctggccgggccgagtggccgcgtgcgccccgccggggtccaagcgcgcccaggggttacggcccggctgggaacatcagagggcgaggacccgggcgggaggaggagggaggaagggctcggaggccgcgcttctgccgccgcctgagggcgtgtggctcgggcccgcgcggcgggagggcgggcagggcgggggcggtgtctgcggaggcccggcttcccctcctgcgggccctggccccagctccgactcagactcaggctcagccgtgccccagcctcagccggcaggccgggcggcgcggcgctcgcgagccggtgggcgggcgggcgagcccgcaggcggcgggggcgtgggcggtggcagcttggcccagccagtggccttccgcgctgagcgccgctccctcctcccggccgcccgccgcgccccgccccgctccgctccgcgcggcaggactgcgcgccccagctccgatccccgttccgcgtccccgccgccgggaggaggtgcccactcgctcgcggcgcgcgccggccgccagactcggcctgtgggcgatttcctccggacccaggctccccgcccgaggaggaagatgcagacctttctgaaagggaagagagttggctactggctgagcgagaagaaaatcaagaagctgaatttccaggccttcgccgagctgtgcaggtaaggagggacgcggcgccggcgcccggggacccccggcccgagcccggtgacccccggcccgagcccggtgcagcctcattagttgttttgggagatcggagccaaacgggaagaagcggcgcgcggggagactgagtccgagcagccaggtggcggtggcggccgccggccgcgttccagggaagcggtggccggtgcgggcgaggtggcacggaccggggcgttcaggtgcactgtgacccggctggggaggcccccagcagcccagggcgcggtgggagtgctactgagggttgcggagggacctgggaaatcggggcatccacgctgtggggtaagggcttgagggtacttttggaccggagtgtttttcttccttcgtccccttccctttcatgaagaaagggcacccacgtttgtggaccacctactatgtgccccgcgtgtgctcggctcttgaggctgtcattgcatatcatgaggttaagcccagttgaagcgagtagcaattcttggcatgtatgtggtgatttgctgtctcattagagcctcgcagcagccctgcaaattggccagggtggtgattctgggccacctgtctgagaacggggaccgatcggcagaggagcggggtacctagcttggggtcccgcagctagggagtggctggtgcgtagaaagtgctgggtaaatgcccgtggtgtggagtggccttctgccatctgggctgtgtgcccctgctcccaccatgctggtgctccttggcggagtctccggtgtttaacagatcacgttcttaataaattacagaactactgagtcttgggtcaggtaggccttcccttgctccacaactgtagctttgcctctgagaagcagttaagcccttttctcaatgcaagcctaagagaatctagctctgaaagccttttgcaaactccaggtggaaaccttttgtgatgcagcttgttagactgatttttgaaaatgggctctacttgcatttttgtccctgtgggggccccacacatcttggagaattgaacagttgggtttccgtaacccctggtgctcctgggggcccgtggctggtctgagctggcatgcgcaggtgagcctggcagcacctctgtgtgcctcatgcctttcccaagggcctgctgctcctttgccccgtgcaagccccgcaggcgctcttcctgcagccagaggggcacagcttgtacaggatagtgcctggttctttatcccttggtctggggatggggttggctgccttctcccaggccggtttccctagaagacaggctcttcatgatcaatagggcatgcagagtggccccagcaattcatgaagaaatcaggaggagctcgaagccagagctttgaaaatgagtcttaggacccttggaacattacaaaagggtacttgaacgttgtaccgcggatacactcacttgtgggaagggcattctaagacactaaagaaatttggagcagctgctttggcatgttctcgaagtccagttctgatgtgaggcaccggagctccccctgcagtcatgtaagacttgggaaatcccagcgaatacctcgcaccctttgtactgctgtctgtatttatgtcatcttgtgtctgcaactcaagcttgaggcttgtcattgggttggcttgttttgcttggtaattaggaggctctcgcaaaatattcttcgccgagactcacaactaggtcctcgtgctggacctgcagattggcttgaccttgtagacattcttcctttaaaggggtgggaggttcagagcaagctatgctatcaacgttctggggagtagagcattactttctctgaaagagttgttgtcttcaaagtctagttgccttcctttggccaaaatattggcttcaaagaaggcagaagtcatcagggccattctagaacccgagaaagcccactttgtgttttcactagggaagctttagatattttatcacttaagcctaagaaggaaaagaaaacaccaaagagtttttccgtttcttatttattactttcagggcagtgccccctggtggccacatttctatactggctgcaaaatgctgcaactgttgagccagtgaccagggagccccgtgaggttgttttgtttggtgtgagggccaatgagactttagtggctgagagacagtgcaaaggacattatcatgttttccacattcagaatctgggggcgcagggcttctgtactgacgacgggtgatgaattgtctatgaattccctaatgaaaaagtctaaaggtatttgaaaatggccctgctttgggccgggtgccgtgtcttctgtctgtaatcccagcactttgggagtccaaggtgggtgggtcacgaggtcaggagatcgagaccatcctggctaacatggtgaaaccccatctctactaaaaatacaaaaattagccgggcatgatggcaggcgcctgtagtcccagctactcaggaggctgaggcaggagaatcacttgaacccgggaggcagaggttgcagtaagtcgagatggtgccactgcactctagcttgggtgacagagcgagactccatctcaaaaaaaaaaaaaaaaaaaatggccctgctcttaatgtttgggcaaagaatgacccgaatggtccggcccggggtgggttgtttagctgaatgtccggccttgtaaaaatctgatctcagagcaggaagagatgttggccatcatctcatctagcccctttgtcttacagatggggaaacccatcaagagagggggcaggttccggactcttggtcttttcctttaacttctagaatgggtccaacctggctaccttgagattgcctttctgattgggcatctccgacaataaggcagtctccctcattatctttccaggggtctggtggctgctatttagcccccaggacacattccttgcaaagctgagcccctctgcaagtgtaatccttgtcttggggggagggtttggggggtagtgcacgttgatggcaacagtgggtggttagagccacttcatgggccatgaagtgccccacctgccgtaggtagggacaggcgccagccttttcagatgtgcactctgataggatggggctctgctagccagcagatgggcctttgaatccacttgtttgtcagtggtactgtttgttcctgttgccatcctgtttcttcccctttctctggggacacggctctggttgtgttctcttgtacccctcccacctgccttccctagcctgggagcaaccttgtaggtctcccacaccaccccctctttgtggctttttttttttttttttgaggtggagtctcgctttgtcgcccagcctggagtgcagtggcgcaatctcggctcactgcaacctcygcctcccaggttcaagctattctcctgcctcagcctcctgagtagctgggattacaggtgcgcaccaccacgcctggctaatttttgtatttttagtggagatggagttttaccatgttgtccaggctggtctcgaactcctgacctcaggtgatccgcctgccttgccctcccagagtgctgggattacaggcattcctggcctttgtggctttttctagatgctcagaaggggcttcagagggggagtgaagaaattaaagctgttagttggaaatactgggtgatattaatttaattttaaattttgtagttctgtacagtgcctcactggggaatactggctggccccagtttcctcagctcatgttttctgtgcctcctcctctcctcctctctgtcccattctttctgtggctgaacctacgttgcaggaggtgggggcggaagaggcacatgacttggtgaagctttccatataaaatttgggtgaaccttatctgtctttactgtaataattgctgatttttaatgaagtgcttccagggacctcatctcatttaatccttccagcagcccagggatggagggatgagggatggagggatgagggatggagggatgagggatgagggatgaggacatccctcgttgggatggagggatgaggaaacagaggctccgggagtctataggacctgcacagccagctagagggctttcttgagtccactcctgaggcctttgcgctgagaatgtggcttcccttgtttatttgcccaggttaggctggggcttccaggaggctacagaagcacaagaatgtctgtgagtttctcatcctccagagacttggaggccagctgggctgacttggcttgcaagaaacgtgtttctggagcagtctcagaccttggtatcccaccagggacccttttgtcccaataccttagaagggactgaggagttcattaatgttcacgtttatgaccacccttggtaggtagcccaggcctgcatctgctctcatgggtctgggagtttggtgtcaacagtaaactggcttgggaggcgtgccagtgagagtgtagcatgccaccgggcctgtcccttccccttgggccctacatttgttcctttaaaatagggccatctccaaggtccttttctacagggatggcttagcattctggtctggaattctttygggagattctctgcagggaggaaggaggatcttttccaggattaagtgatgctggtctgtgggtgggtatttttttatttgttttaatgtctggatttgccaccatttcgggggtgcagaggtgggaagaggtgctgacttaggttttctttgcagcagtgcacagggagtattcataacccagccttgcaaatgaacactttctaccagcctcctggggagcaaacagaacttcacrtaggaggaagcgtccgtgtgcacatggatctattgaagggactgcctcagtttcaggcctgactccacgactgactgcctatgtgccccatgaccctcgacacattccctacccctctgtgcctcactttcctcatctgtgagggtaataatttagcttagggttgcgagcatcaaatgagggaatttgctaaagggtccaggatagtgcctggaattctgtcagtggcgrcggccgctgctgtcgtcgtccctgtggagtgagtgagtgggtctctgcccatggatgcctctctattcagggacctttggcctttgtagatttagtgttcttggttttggcagtttgcaagtcaccctgaaggccacgatggctgaactgatcatcttgcagggatgtgggtttgaggatttgaaactgttcagtgggcatagctaaggagggggcccaggcttgcctggtggcctttcagcatcacagcggggttctgttctccttcagcacatggcccatctgaatattacagccccccaggaggtggaggtgctgtccccacctactttatggatggggaagctgagaaatttatgttaagatgctacttgtatttttttaagtttggagattgagaagagtttgttctggatttcctgaaaatgccaagtctccactggtaatcttgttactattactagctaacatttattgttttctgtatctttttgaatatttaagacatgcacatattaaaaaaaattcagaggactcaaagtatacaatgaaacgtcagccctgttcgcttctcattgctgagttccagttccctggggcagtctgtctctataggtgtttatgcacactcaggggcgcgtgcacgtgtrggtctctccatatgtattactgttgtgctcttgcacattgcatgggactgtgtgtcttggagaaactccacatcgctgcttcatttggagaaagttttgtatcattacctctttttttttaaacagctgtgtggtccagttcttaaaaggatggaacatgtttcttccgctggtgttggtttctgctggtatgggcagcatgacaataccccgtccccttgcctgggtgtacattgctagatgaggagggctgggtcagagggcacaggcattttactttttcatactttttgtgtgtatgtgtgagacagagtctccctctgtcgcctagactggagtgcagtggcacgatcttggctcaccgcaacctccgcctcctgggttcaagtgattctcctgtcttagcctcccgagtagctggaactacagtcatgcaccaccacacctggctaatttttctatttttagtagagactgggtttcgccatcttggccaggttggtttcgaactcctggcctcaattgatctgcccacctcggcctcccaaagtgctgggattacaggtgtgagccactacgcccagctttttcatacatgttctgaaactgctcacaaagaaatttcaatatgtcagtcccaatgacagtgaatgggagagcctgtgctgcgcaccctcctgcgctcagggccgggacaaatctgtgggtgagatggtcctctggattcatatttcacctagtgagatagtgagattgaggagtttaggttgctgggggctgactgcaggcacctggaagagctgggtgcacctgcatggcaggatgggcatcaatgtttctaaccactgggccatcctgcctttaccggttatttctcccacatggtttagcaggtttgggacattcagtaaatacttaaagtcaagtgccccatgagcacagttcctgaacagctggatgtaaatagggtttcagttcccactcattttgaattcagctggaaagctacatttgagagaatactatgrcacttcccttttaaaaagtagcattcattttaggaagcaaagcattcaagagctgtgcacctccttctttccctcgcaaagtcactgtcttaaacaccttccccatcctgcatgaattgggcccagcccagcctctcccactctggtggcccttggggagccggcccgggtgtgtgtggccttgctctggagagggtgtgggactcccgagaactggcccatggtcacacagtggaaatgtgggaggggaacttgcctcgctccaagccgagtgctccccactcaccactggccaaagcctccttgtgaacaggcctttcctcccggctgcggcccacggtgtgtattagagtggccaggccatacctgtggggccctttgagtctttctggggcttcgtcttgctgctctgagcctgctcagaaagcagctgcccttgtggcctgcatctccccagcagagcctcatgggctggtttctgtaggcccatcctctggatggcccctgggagtgctcccacagccatttttagggttcggtggggtggatctgagattcgtgtcagagatcccgtggagccgtggagcgtcaagaatcactctcacaagggagctccagactccagaccccgctccgcatccccccacccctccaggcccttgagtgctgggtgccccaccctgttaattgctcatgatgttccagggcacacctgtggcagaggccacctgcagactcagctgccccagagggtgaatcgggacccacaggccaaaggccctcccagacagcttcagggagatgtcttcgttccaaacctctctcgccgtcagaatcttcactgatacttaggcccccaccactgggcctgttcttcctctctgacttgctcattgtcctgcttattttaagtctgtcttgtttttaagtagttggttctatgaaggtagagattttggcagctttatttactgctgaaaccccagtgcctataccagtgcacataggagctcaaaaaagaatctgttagtggctgggtgtgatggcttacacctgtaatcccagcactttgggaggctgaggcgggcagattgcttgaggtcaggagttcaagaccagcctgggcaacatggtgaatacctatctctactaaaaatacaaaaattagcagggcatggtggcaggtgcttgttatcccagctacttgggacgctgaggcaggagaattgcttgagctcgggaggtggagattgcagtgagccaagattgcaccattgcactccagcctgggtgacagagctggactctgtctcaaaaaaaaaaagtatgttagtggatcaataactgcctggtggtttttggaagcctttttcatgtccctatggctcagccaaagccacttgtgactctggaatgctctgggccaggaaggaaaccccaggggtgggggagatggggagagagttaggtggtaagtcccaggttccggaggggcttgtgggcaagtcctgagcatctgccctggccaggcctgtgctgggtgctggtccttgccggcatgtacacctgcaggaggtgaaggcaaaccagctctcagatgcactggaaatgctgcaaggtgtgactagagccaggaaacctgcaaacaggagagaactatggcgcagtggctgcagccactttagcactctgtggtcagagaaggcctctctaaggaggcgacattcagcaagaggggcctagagctctctccaggagctaaaggacccacagggtggrcggtgtccactttgtagaggccacacaccctggcctctaccataagccttataagcctctgccataagccctgggttccatgtggattggagggcaggcagctctgggcagaactgaggccggtttccaccttagacagggtggttcaaggaggtgtcggggtgtccttctagagccttgtttcctgacagtgtgaccttcctcccatccgagggaggctgcagttatgccctcggggccagggataggaagacaaaatgctccccgtgggtctggttcagtccagcctttgtgttctggaaatgagccgctctgggctgtggggtggtggggtggatggggtggtagtgggtgggtcagctgacctttctcaagaatcaggttaggtctcaggtgcccaagggagccgagggaagccgcgcctgacctgtgtgctctttggcagtcatcgatcttcctccaagttacttgtttgccaaacttgcccaacaaaagagacaccaggggatgggcgtggtggctcacgcctataatcccagcactttgggaggctgaggcgggcggatcacctgaggtcaggagttcaagaccagcttggccaacatggtgaaacccagtctctactaaaaatacaaaaaatcagctgggtgtggtgactggcacctgtaatcccagctgctcgggaggctgaggcaggagaaacgcttgaacccgggaggtggatgttgcagtgagccgagatcgcgccactgtactccagcctgggtgacatgagtgaaactctgtctcaaaaaaaaaaaaaaaaaaccccacaaaaattagccaggcgtggtggtgggtgcctgtaatcccagctactactcggcaggctgaggtgggagaatcgcttgaactcaggaggcggaggttgtggtgagccgagattgcgtcactgcagtccagcctggtgacagagcaagactccgtctccaaaaaaaaaaaaaaaagctccaggggcactggggagaagggagaagtacacatcctgaagtctcccttccctgtgagatgaagattctcctgggaagggggctggggagctccttgtgaagtaccctgatgatttttatgggaaactactcactgtcatttcatgaagtgcctcagaagaccttaccccaaaactgtcaggcgtggggaagcaccgagttagccaaggctgaagcagtgtgtttcagacttctcaggggcaggtcccctccaggaggtttgctggagccagaggttcccaggctggctcctgggtctctgtaccctgagctcactgtgggaatctccagtctggcaccgttcacctgaggcctcactggagccccctcatgcaggagggagacatggcaggggcaccaggtcgtcagcccagcccagttctacctgctgttgctaccttttgccaaattccttctcaaaagaagccttttcagatttcttgcctctggctgctggtttgcccggagtgtatagaaaggagctagttttgcacaagagacattcctgggaccgatctggccagatagacacttgtggcgttttcctcagcagtttacgctgcaaacccatggactcctcagcaaccattcttattagcctggggtcactctgggcgctcttggagcccaagccagaaactgggactctgggtttgttcaggcggcctgctgtgctttggcagggctgtgttgcttcctctctgcccccttgtacattcatggctcatgccagatctcagaggatcctgagaacctaccatgggggtcaggcactattgcagatgggataactaccctccaggatggctgaggggtctccatttgctagatgagggccctgagactcagggagaggccaggtgctgtgagcrgcacagcttggattcaccctcagggatgggtgactcctgaaaccatgctgtttccactccgccaggttgcctttgtcttcaacacagcatccagctgccgtcgatcgatgtcaggaaaatcaaggagttctgttctttttttttttgagatggagtttcgctattgtcacccaggccggagtgcaaggtgtgatctttgttcactgcaacctccacctcagcctccccagtagctgggattacaggcacccaccatcacacccagcgaatttttgtatttttagtggagaagatggggtttcaccatgttggccaggctagtctcaaactcctgacctcaggtgatctgctcaacttggcctcacaaaatgctgggattacaagtgtgagcgaccgcgccctgcctcaaggggttcttttctgagcatcctttgtgtgcagttgttgggcccaggaggatagtgcatggtggagatggcagtgaagttggagcatgagacttgtcctgagcctctgccctcccaactgtaaggtgggtgcagtgcacccgccctagggccaaatgataggattccycctccacccaagaggccacctcacctgccctcctacccgcccaaggcagggcctggggcctctgacacatctctgctgggagctgccacccatctttttctgggggatcctccagtggtcagcttgctgcttcctgggcagggcggggcatggtagatgggtgcagagagaaccctcctgtggcagtttcactttcatttctgcctcacaccctgtttccatccaacagtcaagggctgggctgcggaggtgaggaaacatccggtctccaccctggggtacttgtcctagtgcaggttcccaggcctccccctcccctggaatgaatctggggtgggccgtggcatcttctttttaaaaaacaccccattcattcctttatgcacttacatgccacatacttactgagtgcctgctgtatgctgggcactcctgggttctggggattgatacagcagtgagcaccacagtctcctggagccccagggtcagtcttagggagagcttcagggcagttgtctcaccactgggagctcttgcccacagtgtgctgggtcacgtacctctcagggtcctgggctcgtgagtttcttcttcttmttattttttttttgagatggagacggagtcttgctctattgcccaggctggagtgcagtggtgcaatctcactgcaacctctgcctcccgggttcaagygattctcctgcctcagcctcctgagtagctgggattacaagcacgcgccaccacgcccggctaatttttgtatttttagtagagatggggtttcactgtgttggtcaggctggtcttgaactcgtgatctgcccgtctcagcctcccmaagtgctgggattacaggcgtaagccaccatgcccggccctatttttctttttttctttctttctttctttttttttttttttttttgagayggagtcttgctytgtygcccaggctggagtgcagtggcgcgatcttggctcactgcaagctccgcctcccaggttcatgccattcttctgcctcagcctcccgagtagctgggactacaggcgcctgccaccatgcccggctaattttttgtatttttagtagagacagggtttcaccgtgttagccaggatggtctcgatctcctgacctygtgatccgcccacctcggcctcccaaagtgctgggatgacaggcrtgagccaccactcccagacttgtttctgtcttttttgccgttgttgtagagacagggtttcactgtgttggccaggtttggctgtaactcctgagcttgatcgatcgcccgtctcagcctcccgaagtgttgggattataggcttgagccactgtgcctagccagcctattttctttttcttttttgttagtctygctctgtcatccaggttggagtgcagtggtgtgatcttggctcactgcaacctccacctcccaggtttaagtgattctcggacctcaggtgatccttccacctcagcctcccaaagagttgggattacaggtgtgagccaccaygcccagcccagcctattttctttaagattttaaagtcctaacattcgtcatgggatccttgaaaagaaaaggaattatggccttgccactagaggcctttgccgcctccctgcaggaaggtgtgtcccgcggcattgggatcgtgttggagaaaggttttgcttcctgcacagtcagctcccaagcaccctttttatcaccttgacctgggcgcagccaagccgtggcctgtgcttgcggagatttgggtgccccatcctctcgctgctctggggaagcctgtagctgtggagaggccagtccaggccccagcttctgacctttgtctacatatcaggaggagccctcctggtgaggaatgtgcctcgttcttttgggggagctgacgaggtgcctgtagtgtggagggttaggggcaggggagtccctccagaaatgcacttaagcttgcagagtcaccctgccctgcattgttaagtggtataaggacagttagctccagaaacagcagtggctcctgtctctggagctctagcttcatgcctgacatggtgctgagcgctaacatgtggctctttgaagctgtcagtccgtatgtggagactgaggctcagagagggtaagtgactttcccggggtttcatagccgatcaccctgggggtggggttcaaacatcagtttgcacagtgcygcgatctcaggtcactgcaacctccacctcctggattcaagcgattctcctgcctcagccttccgagtagctggagtcacaagcgcacgcctccacgcccagctaattttttgtatttttagtagagatggggttttgccacattggccaggctggtctcgaactcctgacctcaaatgatccacttggcttggcttcccaaagtgctggcattacaggcgtgaaccaccgtgcccggcctcggcttcttactaggtggatgactgtgggtgkgtttcagctccwctctgggccttaatttccttgtcagtaagaggtgaccttgtgctcatgcrtaggagggggtcagcacatgcaaacttcccttctgtgcagggcagaggccatctctggaaggaagaagggggaaagtggccccttactcacctgtgtcaggtggtatcagagtaaacctccacagagtccagaggtacagagattcacgatcttagaggagtaacttttgaaaacctttgagccagaagaggcctttgygtgtaagggtttgcagctcagagtggctggccttgcagggtcacacatgtagagctttgggctgacagcttcgcagcccagaagtacacctgtggcctccagggaacctctaggagtgtgaagaggcgagggtgtgttctgttctgggccatgattggtggaccccatcccggccaggatgagttatttttgttgatgggccctgtggtctctcctaaccttgctgggaatgtgacaggaaccaattctttggatttgggatgctctcctgggaaggatgggggagtgagtgggtgccccttccctgacgcagccatctgggacgtgggcagttctgtgagtgcttctgcatgtgcttcaggctgggaccccctggacagtgagacctatggagtgggccacatggctgcaaatctgtttccattgctgtgtgctccagtcctctcactctcaattaaccaacagatgtgatgagtcattggggtctcgtcagctaatgatctgagcagtaagtcgattgtatggctgattcctagagccacaggggtggatgggttctgacaggagcctcagtgctgagcgggttcggtaataaaggggatgtattggttcctgagtcagatccttggggcattctggcttcaggtgtaggtagactcaggcgacagtccaatagggcctggtctgtctgtctgtctgtctctctctctctctgtctctctctctctctctctccctcctctctccccccggccccctccctgcttccctggtctcttttacattggcttcattctcaggcccatgtggtgcaaggygagtcctcaccctcaatccttattctcagccaggcactgtggcgttccttaggtgtgtgatctcatttgatccgcattaacagccctgggagggtggtggttttagcattcctgtttctcatagaagggctaagtaacttgcctggggtcacacagctggtaggggcagagctgggattcagagctggttgggttggctccagggtcccccatccctcatgctccaggtccacagggacagggattccttctgttggcctctgatttgtcatcctgggccacatacctgtctctgaaccagtctctggggctggggaatgcagcgcctcattcccttctacatggcctgagtgtgggcagggtggatccccaaaaggatgctgcaggggcactgtttcccagaggcaggggagggatgtttggcagctgaggtgggagtggacgtgctccctgtttctgggcttcagtggctggccagagtgaggctgggggctgctctccctcagcttccagctctggacccagcttgcaaagacttggacgggggcctgagggttcgcacacagagtccagggctaggacgttgttcccaagaagggagtggagagtacctacccccacaagtctgagccccaggctggcctwccctgtgctgggcacctctgcttggggttccagaattctcggaggcagctgggtgggagtgctggtggraagctccggaagggaggctgctcggggcctccctgtggctgtggctgcatgggcagccccgaagcggcttcctggaccccaccttgtgcctcagttaaacctgaatctggcttattcccacggccagcccgacacaggcagattctgagagtcctggctgcgcccagcagccagctgggtgggtggacatactggagggctgatgtcctatttgtgggctggggtttttccgggccttgggaaatgctgcctgagttcctggagaaggaygacatctttcctgccccactgtcgctgtcgctgtgcagaaccttggtgttttgacactgatgtgttctggagctaaacaatctcgtgttatgtaaacacaattagcctgttgctgtttgaccctgtcctgcttggggagggttgagaaggtgtctttttgctggatcctgggaattctgagagcctggagcagctgtgaactagtggctgggggttgtcggagctggaggggagtgttggtctggggagggccactcctgtccaggacactccgctccgatatactaagccagaccctggccccccacagctgagcaggcctggtggaactgcggggaggacatgctggactatttccacccggaaggggagaggaaatgaacggtgagtggctggtggccacaaacccaggatgttccatatatcagggccccagttccgagggccccgggcaaaggggctgggctggaggttgggagaagtgcagggtgacaggccctggttagagtatgggtcccttatggttcctttctgaaacgagtggggcaggtgagggcaaggcctgctcagagccccttgccccgggcctgcttaactgcygtgggtgcctctgcttggtgttccagaattttcagaggcggctgcatgggagtgctggagggaagctcgggaagggaagccgttctgccctgccttggttgcggccgtgtggacagccctgaagtagcttcatgggcctttcggtgctgcacaaggtggcagaagctgggaccagcgctcagacccctgctttgccgctgagctgtgcggccctgcaccatggtctctatttgagggccctcagctcaaaggctctgggaaatgagtttgggacccattgcttctggtttagctggtggggctggtggacctgtcaggttggacaagcaattcttgtgccttagcctcccaagtagctggggttacaggcgcccaccaccacgcccggctaatttttgtgtgttttttttttttgagacggaatctcgctctgtcgcccaggttggagtgcggcagcgtgatctcggctcactacaagctccgcctcccgggttcacgccattctcctgcctcaaccttccgagtagctgggactacaggtgcccgccaccatgcccggctactttttytgtagttttagtagagacggggtttcactgtgttagccaggatggtctcgatctcctgacctcgtgatctgcctgtcttggcctcccaaagtgctgggattacaggcatgaaccaccgcacccggccattaatttttgcatttttagtagagacagggtttcaccatgttggtcaggctggtctcaaactcctgacctcaagtgatctgcctgccttggcctcccaaagtggtgggattatatgcatgagccacctggcccagcccacacttggctaattttcttttttttgagatgragttttgctcttgtcgcccaggctggagtgcattggcggcaatcttggctcactgcaacctctgcctcycaggttcaagtgattytcctgcctcagcctcctgagtagttgggattacaggcacctgccaccatgcctggctaatttttgtacttgtagtagagacagggtttcaccatgttggccaggctgttctctaacctctgacccaaagtgatccgcccaccttggccttccaaaatgctgggattacaggcrtgaatcactgtgcctggccgatttttcccattttcttgctgttgtaggtacagctgcattggrcatctttgtgaatataaatgtcttccttccctttctgattccgttacgtgtaggtaaaagtttttatcagttattgatgcataacaacccatcctaaaaactactggctttaagcaataagcattttttcatcccacagttctgtgggctttgctgcgtagctctggtcttgctaggaatcccttgcgtgtgtgyggtcagcttgcagtctggtaaggggtctctgccctggggcttgrcctttggctaaccgaaggcgctgggcatgacctggcctccttcttggctttcctcaggctgctgggcttgttcctgacactaacagtggatgtttccaaggcctctggaggcccgtttgtgtctctacagtttgttggccaaaacaagacccaaggccagctaacattcaaggggtaagaaaataaactttaccccttggcggaggtgtcaaagtcattksaaagggcctggatacagggagggtcaagccctgggaacatgtctgcacacagagtgtgtgatccgggtctgcgcgttggccggcagcccatagacctttcccaaattagtacctggcaggtgcccagctggtgctgggctgggtatggggaggggcggagaagtcgggttcataaggaacaactgtcatcattcagaaagcttttcgaagtgtccgctgtgtgcccagctctaccgacccaggtattgtcagtcctggttcttcaggaacttggcttttgcttacagagggaaggctctgtgggtgactgaccaagggactcggtgacgtcagtgtcctgtgtggtggtgggaagttttgttcctggattggggcctggtgttatctttgtggcaatcccccacctccatgatgaagttcatttttctcagctggaagaggaggttagaacattggagcccctacattctagaacattcgagcccctacattcttgaacattccaactgggagagcccttgggattttcagtggggaaaccagcggtgaatctgcagccaggactagctcctgcgctctctccttctccttgtgctgctgggtgcctgtgttgtttccagattgcatccagacccaggatttcctgttgttgttcttcgtgtgtgtttcttcattagaacaactcctgcatcctctgcagagctgtttacagrcatctattggcctccctccgtgccaggcctcgtggtgcatgtggccaagtgatggccaagatggacaaggtcttgtcatttggagctttagtctgtgagggctatagggagggtacagacatgtcaaccagtgagttacagggatgattttatctgggatcggaaaatgaagtgatgacagtgatatgaaggggtctggggactgtcctcacatagtcagagaagacctttcccaaggagagagctgtggctgctgctgacaggtcagaaaggagtcagtcgcagaaagctggggctgcggcatctcaggcaggggaagcgggtttagcaagtgcagaggccccaggggcacaggagggagccggagcttggtgtgttggtgagctgtggttggaggacgtggccggggcaaggcctgggaggacagggccgtgaggaagcaggcagggccaggtttctcagcgctttccaggccccagcatgcagtttgagattattttacaggaggtagaaggcaaaggctctcatcaaattaccccacaacatagtccgtgaaatactactcagccatgaaaaagaacacaaccccatcctttgcagcaacatggatgcagctggaggccattatcctaagcaaattaacgcaggaacagaaaaccaaatgtttcatgttcttacttatagatgggaactaaaccttgggtatatatggacacaaagatgggaagagtcaacactggggactactagagggggaaatgggagaggggggcaagggctgaaaaactacccattgggtactatgctcagtacctgggtgatgagatcattcatactccaaacctcagtgtcacacattatacttgtaacaaacctgcacatgtacccctgaatctaagataaaagttgaatttattaaaaaaaaaaaaaaaaaacctagtccgtgactctaggtgacccttttaaaagctttgggtggtgctgataagtgtgactgtgtcctggagcggcttcattacttcccatccctccagctgcctgccacagggcccagaagctggctttggaattggagggactgggtcaaacttgcttctgctcctgtctagcaagttagcgagcttctctgagcctgtttctttgtctgtaggataaaaaaagcacttcttaacttctgtgrttggtgtgtcagttgaaataattattaatggtataaagttccatagttcactgcctgctagatttatttacaawtactacaaataactcatcgtaggccccaatcagcggtagatggtattactgtggtggtggtggtggtatgtaggtggtgctgtggtctgggtttcagacaccatgcggggtgctggagcaccgagttcctcctgcaccccgggagcccagttggtgcggagacagagacaggaggtgaagygttagatgaactctgctcgaggaacagagcaagtttctctatctgggaagatggaagaaagctttccacaggtggtgacccttgagaggtatgtttgagggcgcagggagctcgytcrcggacaggtatggatggaaggtagtggagaaagcgggcaagcctgtgccaaggcgtgacgctgtggagccaggagtccttcaacacrgactctgggcatgtagggccggtgcagatgggtggctgtggggagcccctggaagcctgggctgagagcctctaggaagcagtgggctggctgtgggaggaacacccctgcctctccctgtgcctgcagtgggtcccgtccccacgctgtgactgccaggtgtggacacaygctcgtcaagtggtgaagaacgtggagccggtgggctcaccggcttggggcctggctgcctcactgggaagcttggtggccctgggaggtcattgagtgtccctaagcttccgccagggagatgatcgtagggctggtgtgaggggagatgaggagtctgtgtctagcacccagcacagggcatgcactgataaaatgatggcttcacccggctcccaggggccacgtccagctgacagctccttggtgacttagctgtatgggtggtgtgcagctggcactgcttgctggtctgggggagacatcctaggctggcctgtggaggacgttccctctcagcctcctctgagccatgggcataggtgagttttcagaaaagcccatacygacggtgattcagctctgcttcttgcttccttctgtcttattcttaagtcacccacagggcagccacctgccagtgtctgtcctccaatcccctgctccaaggaactgctctaggcagggaagagagaggaggaggaggccccgcatatcctcgggtagaacggaggaggaaactgaggctcctcacagaggttaactaacctctgctagaccacccaggtgtaagagctgggatgcccccagaccctcccttctcccgggagcggtggagccgaggcggtgggggcctggctggagcgccccaggagctgagagaagtttagtccacctggagcttggcaatcggggtgaggatccctttgaggccgggttgcacaggatcctataagccatcattgtacacgcttgggctttgccctgaaggctgggggagccatagcagttgtgtgaggttggctgctgggtggaagccaggggcttgtgggattggagggggaggctgctgygattgtccaggcagtggtggtctagatcgtgcagtggtggtggatatcaactcttcagagtccatccaggtctgaggactcattagcaacctcggctattcctcgactactcaggatgttgtctgtatggggccggtggcctcagcactcctggttcctcagcatcgccacgcmctctgtatccacggactcagaatctgtgttttaacaagacccccaagaggtgccagtacacacggcacattcatgtttgcaaacactggtttagggaacctgttgacctcagcgcagggctgaggggggaagaaaggactgaggtcaaggcctgacttcatgaggaaggggaggttggggagcgggggaagaggagatgatgtcggagcactcagacttctgactgggaggagggctacatcaccccacgccaggggcggcttgaggactagtgcagttataacacaaagggccgaaacggcctggccgctggggcagggcagagagctgggctccacagggcagcctgcacaccccatctctgcccttggaggccctagaaccctgtggaccctgtcctttgtcctttctgccgtgtccatgtaggtgtgggtcgtgtctgccccacaggttgggtatttgccgttgtgctgtcagcagatgggtgttgagcccatgcaggcctggacttggtcacagaacggcatcctgcttgttgagtagccatcctggtcatgaggggtcatgtggtaatgagtgtatggagagctgggggcgtcattgtgaagaccaagtgaagcagcagtcggatctgggacagaggttcctctagggaaagactattatggtctggggcaccctggaggcacgcgccstggctggagggtgggtgagtctgtggctggtgggttcggctgaggcaggggagtgcgctcttcagcccagccccctggcctgggccctgccgtgctggagtctcctggtgcctggaggctgagtcgaatgcagtggggctgggcagagggtgccctggctgtcgtggggtggaagcttggctgacccagtggacatcagccaggaccacattaggcccagctttgsctgggttccccacagctgtgcccaacggcatccctggcctccacctactggatgccagtactactctcgtcttccaagaatgtctgcaggtacttccagatgtcctctgggtggggggtaaaattgctccgttgagggccagtgctggctgagggttcttcatcattcccttctggtcccagcctggctgcactgccacctggcgagctctgtttccaggcagtgggtcaggcctgctttgggggctggcatgctgtcctccctcacccatgtcaaggcccgtgtrgccatgtgctgacatgtgcttgatgtgacctgggagtcagagcgcctggcttcctgctccaggcttccgtggtgccgtaaggacctcaggtctgggggtcaggaggcctggatggaaaatcctggcactctggtccttgtaggggaccctgagcctcgattttgcatctttggcgtggggctgtggtagcctttccatgggtgctggtggaggctgcgaatgccagtgtgcccaccctccccatgctgggcttagcgtgggtgcctggtgacagtgtgttaatctccccttgacttctctgtgacctcagataagtmcctctcagttctgggccttgcttataaaagggttcttgggctctcttctgtgtaaaaagtggggaatgaggtggagagcctgggggacaggggagtcatggggttggacaccgtgccagagcctgtggtgctttaaaatcaaggctcaaacccagggtcctgaagagggccgagcagcagctgaggtccgagtgcacccggcctgccagtgctgcccaggagtggcrcctcccgtcatccctcacgcccagcaaggacccagtgtgacaagagcatggagtctggacctggcagagctaggtttgcctccttgctcttctatgactagctgcatggctcctggagcctgtctgagcttcaggtgccacacctgaagactgaggttaaatgggaggcggggaggagctggtgacactgactggatgccactatgtgccagcctcattcattccaccctctggcagtgtcctgagttacatgcccagccaccgtgctattttccaggccggaaaaccgaggtgtagagcccagcactcggcgtaggaggcacacagcaagtgaagccatccttgttgacatgagctggttgctcttggcatttgagtctgaatatcaaaggccctgaagattaaaaagagagaatgaagaatgatgtgcctggtgccttcttgggaagagcccgaggccagctgtggaggggagcaagactggttctgggctgggcttcctggcctggtgctttcctgggcagctggaagtgcttctgtgggagctgtctggccctggcgccgttgttggcttcattattttttgcctgcaggggcctgagtattctgtactgacgggaaaacatttgttgggctgacgctgtaatcacaccacaagggacacttgaaattatatctgtatttgggaagctaattttaaagaactttttctcttcataattatatgcaatcagccagctagtgttattggggattctctttttccctcttcagctgagaggccatctgccttcctcttcctgcctttccttccagcacacggtgagccatctccctgggagagggaccactggcccttggctgcctgcaagccccagggaaacctttccatggtgattgcggaggaagggatgaggaggaagagcaggggaggatgatgggggcctctggcttggctacaggatgagtccgttttcaagactggaggcgcaggttggtgatggaaatgatggagtgtagcgtttcgatttggacattgaagcagccagggctcttgtgaatgcaagtggcagaaaatccaattcagatgagtttaagcaaaaagaaaaaaaaaatacatttcttggcccaggtaaccaaactggcacaggaatagtcttatccctcaggtccccagacattcctcctgtccctggagttttattcctcatcaggaggaatttagttccagaaaacgctggccaaaaaaagaaaagaaaagcccccgttgcccaccccctgcaaatggggctcattcctctctatcttgagctctgatcctgacaagtagggtttctccaggatggtggctagcacaccagtcagggatacgggctggacatttagggttggcacgaagtggactctgtggattgtccttcacacggkaggcattcaggtcaggagaatataccatgtgctggcccttcaggtctcgatctgaccaccctttccaacaccctgggttcctctgtgtccttcctcttggaccgccctctgagaggatggtgcgaggaagaggcttccgtgttgtgcatggtaggcagggatgggggcgttccaggggcggacagcatgggcaggtggtcagaagtgtgaaagaaccgacctgtggggcacggcaggaagcccggtgtgctaggaacagatggggcgagacttgctgggtgaggaggtgtgcacctgctgcagaggcccaagtggtgggggtgagggaagcccagggggtgagtctgggcaggggctggggggtgatgagccatgtttcagatgcagaaggtgcagagtgtgtgtgcagggacagcagggagaccgcctggtggcctgcaccgcagagctgtrtgtctcagggagtgggaagccctgcctgtgctggcctcagttcttccgctcttctggaattctgcatccttcttttgacatttctctctaatgcccagggtcctggctcttggctttggcttggtggcagctgtgaccccctgcatggggctctgagggattattccagctgtttggggactgtagccatggctcccagctgcagagcctgacaggcctggaggccggcaggaagaagatgggggctgtgcccgcctgccgagagctggctctgagactgactcttggcactggggtcctctgaggccccaggctcattctcacctcctccagagacccagctgacataccattctcatgagctgcagtcctgtgacccagctgatttctgtctcattggtggaaccctttagaggtggggtagggctcctaaaacattagccctactgccttccccacagattggcctctcttccctgcctgtgggcatctggcatctgcttgaatccttcttgtcacggggtgctcatcacctcttgactgccttcctatggaagccagcaacctcttcctatggttgagctgaaatctacttcataggaagggttccttctgcctggaaggtttkatattggacaggactgtcaaccgtgtggagaggggaggaacagggtgctggctcccccggcttctgggctggattgacccagggcgtgtctaccccacagcatcctgacatgccagaggctggaccttaggaagtgccttccgggcccttcactgcaggcctgctcaggggctgctcctcaggtcytggggcccctggggcaatggcatccatycttttggcctcctggggtcaaggttctgagggaggattagggcagcaggtggttgggtggagaggcagctctgtccagaacaaccctgttccagaaatcccagagcctcatccccaacagacccggtgggccccccaccatcacacaggtcccctttctccccaggaagtcacacagtgctgtgggatgaggagggtttcctgacagatttggggagagcgggcctgggtggggagtaagggagcctgggaattactggtatttggatgggtttagattgtggttctgcttcttacctgctgtgagtctttggtcaggatactgaactgctctgaatttccccacttgaaaagaggtgacaggccaggcgcggtggctcacatctgtaatcccagcactctgggaggccaaggcgggaggattgcttgagcctgggagtttgagaccagcaacctactgggcaacatagtgagaccctgtctctacaaaaaataaaaaaagaggcctggtgcagaggctcatgcctgtaatcctagcactttggggggccaaggcaggcagatcacttgatgttgggagttcgagaccagcctggtcaccatggcaaaaccccgtctctcctaaaaacacaaaaattaacagagtatggtggcgcacgactgtagtcccagctacttgggtggccaagtagctcctgcttgaacgcgggagaattgcttgaacccaggaggtcaaggctgcaatgagccgaaatcgtgtcactgcactctagcctgggtgacagagggagaccctgtctcaaaaaaaaaaaaaaaacaaaacaaaaccaaaaaagaaaagatgcaaccattgtacccacccagtggttgctgagatccagtgtgagggggacgaagtgcctggcactcacaaatcctgccccgccactgcctcgtctgtccctgtttctgcctgggacagggagagcaggcctgggtggggaacgagagagctcggggattactggtgttagcctctcatttatttgggtcgtgctcaggcccctggaatcctctctgaaactggagagtctctcgggtagccratgaagcgctgcctgttttagggtcaggtgcctgggcacctctgatggacctcaggatgagcccaagtgtcagtaattatcacccagctccccggtttgcagccaaggcttccaggcctggagcctttggtctccagcacccagttcccccacatcccttccctgggcttctttcccrccattcccatcagggacccctgyggccatgctgggctgtacccagtgccccttgggaatctgcgggtaccgtgcaaagctgtgctgtgctcctccccatcaactcctcattgactgttgaaggcccctacaaactcctgacaggtcctcattcattcctgcctgacacatgaatgcttccaggcgatgtctgagaatcctgggatggcagagctgtgggagccttggggttgtggtgggcaaagtaaggcccctgccactccccaccaaagacagcaggttctaatcctcagagcctgtgagtgtgctgccttacatggtaaaagggtatgacatgactacagatgggatttttaaatttttatttttcagagatgggggtctcactgtgtcacccaggctggagtgcagtggctattcacaggtctgatcataacgcactgcagcatcaaactcacggcctcaagtgatcctctcgccttagcctcccaagtagctgggattataggcatgtgccactgctctyggcttacagatgtgaaggagtgaggcatcttgaaatagaaaatgttcctgcattacctgggtgggcctggtgtaattacaaggaggcaggagggccagaggagatgtgacagtggaagcagaggttggggtgttgtggccacaagccaaggaatgtggacagcctttagaactagagaaagcggaggaatcgatttctccctggagcctccaaaaggaagcctgcctctgacctcagaaccctaagagaataatacatttgtgttgtttttagccactactgttgtgatttgttacagcagcaatgggaagtgaatacagttttctcctaccctgctcttcttagggcttgtgggtgaatctgtgactgagaagggagggactgggtcagggtcaaggtcaaggccagagcccatgtgacccgacaccttgggactttcctttgacctgccatcccgaaaatatctgaggggccagggagatactccagtaaggtgccttgtggtttaagttttctgagatggggtcagggctgactcatgcctgtggctggggggccccaggaaaccccagtgcccatgacctggtctttgcctttgcttctcctggtgcttagcaggccttctctagcgtgccctggcagcctccctctccctcccctccagggcctggctcacacagcagctctactgaaacttccctgtgcctcctgctgtcccccaggtgtttgtgctatttaagggcctgtggcacacccgccagagggcatggcatgtagcccactggtctgccctgtggcagctagcatctcggggcagggtttgcggtctggggtccccctctggtcccaggccagcccagtgcgtgacagagaagcccagcaaatgtttgaccaaaatcagaccaggaaactctcgctgcctgtggttggaggtgcagcagcagggcaaagacaactaaactttaagggcttgggatccagggaccaggagctgcccccagccctcaggccaggtaaggagtgttggcagcagaatttgggtgaagtctttcggtctcctctggaacacagcctttcaaagagtgtcagcatccaggacacaggctggggacacacacacttatgctgctattttaggagtgtggggtaccttgaggataggtgctagaacaattcaggctttcctgagcaggcttctccctccccsagtgagtccaagggagggaaatgtcacgggaatttctgcctcccttcctgcagtagcctaccttgctcattaggctgatactaaatgactttgcattcttgggattaagaagctgctgtgaagagaaccaactgaatcattagccctgaggctggctggctgacggaggagggggagtgggggtagcggggaggggaggaggtgctagaaccaagcctgccagcaccccccactacctccctctcccagcagccaactcccctgcttcccacaatttaggtcccatccctaattaggggaaagaaaaattaccgcacctgcaaggggatagtaaaagactcaaaaacaatttcaagtcgagaatttccacactaaaaagcggggatgtcgagagccattaagggaatagatttaacgtttgtgatcagcaagaagtcaggatgattcctgatctgaagtggtggccccttggatgtggcagaacactgccttgcgtgatctcctgccctcgcctcacttcctccttcctgaaaattgaactgaggaggggagtctcaaaggcacctcagttcctgtgctgctttcagcccctgcagctctgatgacctctccgggaggtgccaaaggtgggtcacccactctgtctctctcttgtgcctgttcactgggaaaagctgcttccaggcacccctggaagctgttctgggtctgagggagtgtactgactcaggctgctgtgcctgcactgaggggcgcccggactttggggccggcctgcctcccctgggtggggcacccggtcggggggagggtcttcaggtaaggtggttggtgactccccagtcaaaggaaagatgcccccactcaataaaaaagacacatggcagcttccagtttatctggttcttccctagagctgtccagacaattcaaatgtttgtactggctttaaaattctgttcgtatgttgtctttatatcgggccatttcagtttctggcactgttaataggaggaaaatccaaattaccaaacaatcagcaagtaamccaagatgccgcagggcaggcgggcaggggtgacacggggctggagcctggcccaggaacccggcagcactcggggagtgtttgcagagagcctgccaggcccagggtctgcagggggcacagggatgctgaaataaagagccatctttggcctcgaggggctcatggtctgatgctgagcatggagcaggcttcagtggaagccattattcctgcctcttgatgaggaaggcacttgagctgctcttggtgggtrggcaggagtttgccagctgaggaagggtgcctggcagggggatcagtttgtgcaaaggcagacttaggtcaagccttggcatttggagattggggtccctcctgggagggtttgagaggctgctgctgcctccccctcgtgtcttctgagctgcacctccaaatgcccatgtggcaggtgttttgctaagaatttggggctgtggacacagggcacaagctgtgtccctgaaagagtgcttgttagtcaggataggccaggttaggctgcagtgacaagtagtgtcgaaaggctggcggaaataggtttactcacaactcattcagcatgcactctggatccagagactctcgggggctgtggtctgccctgcagtggctcagtgtgtatcccacttcttaagttcagcactgtggaccttttgtgctggataattctttgttttagggggctgtcctctgcattacaggggccctttcctcactggattctagtagcactttcctcggtgtgacaatcaaaaagctcttcaggtgttgctaaatctccttgtgggggacacacagttgcccatagttgggaaccagcgctagctggaggtcctcttcatcagttgtttctttctggttcccagcctggcttcgtcgccactcagcccgcgttgtttccaggtggcgggtctggctggctctgctggtgggtggcagcctcatgtgcttccttgtttctgaggtcagggaggcctcggtgctggcagtggaatgctttttccaggaggggacatggtcacctctgttcacatctcattgcccaaggcaagtcctgtggccatgcctgactgggggcagggacaacacagtggcactgagtgtccaggagggaaattgccggctttgatggccaccattgatgttcaccaccgagcattagcctggtggggtcagtgcaatggagtccagcagcctttctctctgcccagtgctgggtgtgggcagcttggggcagtggggcctgaggagggtgggagccaaggcaggtttctccagaggagctgacctggggggtcaggtggtgatgtggggatggcatttgaggaagggaacagtgtggccatcaacacacatgggtgacggggcttagtcatctgtttaggagccccaagtcctggggagacatcctgggcttctgtggggtayggtgtgggccctgccctctgcaggcagggaaaggggaccataacttggggctttttccccagtgcctggtacctggaggtgccaaagggtcttgttatttggggtgcctgaaatcagtagttactgaactgtgccacacgttgcttggatgaggatgtgcctggcttcccacttccccgagttgttctccgtagaaccttcctcccttgcttcttcaccatttcatgtacttcacttgctgcagcgctcaggtccccaccctgccctggggagggcctcttgggtgggaaaggtcatatccttttaacggatatgaaagctgagaccccgagcggctcagcagcacatcccatgcctgctgctggtcatggtccctgagccttttgtgccctgctgtgctgtgtggcaggcctgctgctggatggggtctgtcatcccagagtgtcttgtgttaacctcctgacgccacacctggtactgtgctgcagtggcttggtggtggcgtggatgccgtggacgtgtctctgctcctcatcactcttttctacttctgccctgatcatctttattgttttcccttatcatcccctctccctcagtgctgggtcatccagagtaattttcatcatcttcagaagtggtaaccactgtcactcacagggtccctgctgctcagcggccagcgacagaaagctttagctggcttgagcagaaatctgcagctgaaggtctagagaggacgagccccactgcggccgggtctggccggggaatttgccctcctggagccctcttggccctttctcctggttggcctctggctcatctggattctcgccacatagaagcaatggtgtcctccagcatttccaggcagtgccatttgtactgcagacagtcccccaggacccgtccggtaaaggaccaggaccggcttggcttgggtcctgctcccatgctgctgctaagtgaggtgacaggtcatgtgcccacccctggagtgggcgtgccgcccccagtcatgtggactggaggaggcagttctggaagggtaggaaggcagggtggcagggcagagtgcaggtcacaagacccccatccctggcatgagccaggtactgtgccaggcctggactctgtttcccttaaagcccgtgtgggatgagttctaggattctcccattttacagataagaaaacagaggcacaaggtacaggggggtctggttccatgttctgctctcaggggctcacccacctcttccgctccygcctacgcccccgaattgtgttcatctaagcctctgaatgctgcgaagctcagtcctgggcttctaaccacttcctggcaccaccacggttgaaaagtggactgctgctgccttcttgcagtgttctctcgtctcctgggcctggcgcagggcctcagtctgctccttccagactgtgagcgtcacaactatttctggttcttaggtttcctttacccttttcccaagacctgcaagggctgccccccaccccacccctgctatgtcctcccctagcaaatcagatcctgcttccactggtcacagagaagcacatggagtcgctcttgtggacaagcagctgtccccatacccagctgctcctgagcaacacccggagtgcgatgaaccctgaatccttcccaggccctgccctaggcctcctggatcagaggcctcagggtgggcctcgaatgaggatttttgacacgctccagtggtggttctcaggttatctgccctggcatttgggacccactggcccataggtaaaggctgggccacagggtgacatcctgggcctctgaggcgtgccccacctttatcctctgtcctgcgtctcagcccccgccccctgagagggctttaagcttccagagccccagacaccctttggggagggcgcaggactcaccttactcctctctaagtactcttctcagcaccggtctgtagttacccttcagttgctctgccagatggcaaatgctgcctcctctttgaagccttcctttattgccagcctcctcctctgaaaggatcgaatcattttgtgagtattttcacttcctgaagggttcgtgctccttggacttctggggacaggcttccctgtgcaaagcggatcatccctttgttaataatccagcttttggaaaagcatgtttatacttagctattcctattttattaatattcatattaatatattgtatttatatattagtgtaatatttatcaatacaatgacagtttagagcctgtaaaattattcgcaggtgcaggttttgtgttttttttgagacggcatctcgctctgttgcccaggctggagtgcagtggcacgatcttggctcactgcaacccccgcctcctgggttaaagcaattctcctgcctcagcctcccaagtagctgggattacaggcacctgctgttatgcccagctaatttttatattcttatagagacgaggttttaccatgttggccaggctggtctcgaactcctgacctcaggtgatttgggaggcccacctcggcctcccaaagtgctgggattacaggcgtgagccaccatgcccggctgcaggtttttaatgaaacttaaaaattattaaattgtaggctgggtgcagtggctcagcctgtaatcccagcacttttgaggtcaggagttcaagaccagcctggccaacatggtgaaaccttgtctctactaaaaatacaaaaattggctggcatcatggcaaatgcctgtagtcccagctactcgggaggccgaagcaggagaattgcttgaacccaggaggcggaggttgcagtgagctgagatcatgccactgtactccagcctgggcgatagagccagactctgtctcaaaaaaaaaaaatgtaacttttattgttactttccctatagttttgagggtagcgtatatgttcattgtagaaaatctggaaaacacagggaagtatgaaggaaaaaccacagccccgtggccacagttaacactgcagcacacgcacctcagtctgttttccaggtatcggaatgtttccacgggcttagaacccatagcgagtgctgcagcctggtggtccccactgcaggcatcatttcagctcctctttgggacagcacttggaagcttttcatgatacatcctgagctctgctgtcttgtgtcctccattgatcgattgcttcgtgcttttatcaagcatctatttaagaaacaattaaaaaatatattttccagtttttgataacatgttataggcacatggcacaacattgaagcaatgtatgaggggacacagtgaaaaggaagtccctcggccaccccagctgcccttgcccttgaccaggggccctgccatgattgttttcctgtagcgccctcaggttcactctgtgtgtacacaagcacacatgcttgtcctggatgttgttcttaacacagataattatctacagcacacagggttttgcatcttacctgtttcacacagcaacgtcttggagataattcctcgtgggtgcatggaggccttctgtgttcttttttactgctgcatactattcctttgactgtgtgtggtttgttaatgtcccctcttgggggaagtttaatttgctgctagtgttttgctatcacatacagtttggtaattaacagggcagagccggaaacatattgcacacttgagcctgtctgtggggtgatgaggtgggatcatggagccagggttttcaggaggaacagtcacttgacaaccaatgctctgatttgtgttccctcctcctgtctcccatgtcccttccttctccctcttcccctttggcttcatcattcaatttctgaactttctggttatggcaggactttaggaacttgcttcttggggaatcgaggttgttggtgcctttgctctgcacgagtttcccagtgaaaaatgagccccgacaggttgttttattttcccgagaggctgtggtggtgcatgtgggattccaccaccagaggggatgcagttttccgctgccacctcctggtccttccattgcactgaggccctggaggctggagaccaggccttccagcttggtgccacccttgcccacggtggtgcacctggtggtgaacacgtgggtgtggggagagccctgttccgggccagctcctgcacttcctgagtctcccaggcctcggcctgctctgcaggtaatggggtaaccactgtcccaccctcatgaggctgcagaaggtattggtgagtggtgagcttcaaggggtgtgtagcatacgtgggtggccccctcttttctgccactgttgcaacttatcctttttttggagctctgagcgacagaggaactgctgtggctcctgggagatcaaccccacttaagattgcagccgatcttttctctagattacttttttgttgctttcttattttatgtgttccatctgttttcagtgagagactgtttttttaggactaagggagggagagctgcctgggatgatgtaaaatgtggactgattggaattgacctcagtaaagagaggagagtcacacgctgggataacccagatgccagcagggttgactcagagggaaaccgaggccctggcccagagcccagtggaagtctgcgctcctctgtcaccggcctttcccattgtgcggttcacagtctcggtgatttgggacttgagttttctgtcctggagcagggccgctggagtttgggctggctcctcaaggtcctctgctgtgtgtcctgggtcaggttcccgtcagtgacgcttccttcagttttctcgtccctgcggggggaggggcaggatgattgggaatgaggcaggggctgaggtgtccacaggtgctcagaaacggtgcaggttgtgagcgggtggttgggtgtagcacaggttcctcatgatgctatctgtcactgtgctgtgggctgtggtggcccagggctatgctgttgtgtatctcccctgtccctcatgaaaccgtggaagcagatggatattggccaccattcctacaggaactgcagacaagctaagagacactgagggtccctgaatgcctcaaccagggtggttctcaaactggattcctcggggcccaggtttctgttgaggtgtcgggggtttgagggaaggtgggctgggtgcttcccacagtgggacctggtcagctctccttggcctctgtcttcctgtctcatggagtggctcctttgtgaggttccgctcagtgccttgctatcagaaggtgttgaggaagccctcactgaatgagctgacaaacagatgtaggaattggtgggcggcgcctcagctgtgccatgaaacaagggagcaagggtgcccaaaggttcctgtggggcttgtgcccatctcctccctaagaccttgagcctctcaagggcccagactgtggaggttgcatttgttgtaccctccgagtgctgggcccaggagctgagctaaattgttacacatttacaccttcatctgccagcagccgttgaggagtgtctgtgtgccaggtgggcatcataattgggcacgggcacacatagctttaaagtttggcatagtccctgctccaaggagcttgggtgagtaaaccacacattcctgaccttgcctggctgcagccatctttgagcatctgctggaggcctttcttcccagcacaatgtgcacagtatgctgtcttgggtgcctcggtccctgcaggtcctggtggccctacaccagtgcttgtccctggctcrtagcaatcaataccccagaacaaagggccgagacagtggtagccttaagttcttccaggttaggaggcgtcctggagaggctatgctgagccgaatcctcaaggctggggtgggaggtgggcaccagggccagggaggagaaagccctgtgtgccagagctgcacaggtgggcacttcctgggcccacagtaagaaatgtgggatgggggaggctggacgtggtggctcgcgcctgtaatcccagcactttgggaggctgaggcaggcggatcacctgaggtcaggagtttgagaccagcctggccaacatggtgaaaccccatctctactaaaaatacaaaaattagccgggcgtggtggtgggtgcctgtagtcccagctacttgggaggctgaggcaggagaatcgcttgaacccgggaggcggaggttgtagtgagctgagatcgtaacattccactccagcctaggcaacagagtgagactctgtctcaaaaaaaaagaaatgggtcaggaagagaagggtaggagtcaacagaaagcctttgtgtgttctgggcaaaccccgacccaggccatgaggctcctaaaattgggtggcaagagtcaggttacgtggtggccgtgggactgcatgtgagcggggaagatgtagaggacatgagtgcagcttggaggctgttggcgaggccagggcaggcatcagtggagcattgggaaggcagcgggcaggactgtgtgggcctcccgtgtgtggcagtggatgggttggggcatgactggctgtggcaggtcctggggcgagacctgatggggaggacatggggacctatgggggttgagctcggcagggacggcaggtggtgaggatggtggtgaacttggtggcaggggcyttgggacgacccaggctggagctcggctgacagaggcccggcccaggagtggagggaggtggctggcrtggggcctccagaggactccagcaagtccctctgcagagccagccctctcagtgggaargtggtttgaggagtggctgggagtggaaggcatggctgttctgggacagtagcaggagaggcgcagctgccggctccctcctgaaaccctctcatggtcctgccctcagccggctgtcgggaaccttcggaaaggacgtgtccagcctgctggagtaacgcttgttttctttgtttttctccacaggaagcgagggatggaggttgtgcaggtgagtacagaccgcgtccccgtggttctttgggtagtggggcccttggtgcccacctctctgtctctccttctctcctccagcattgggcacggctttctctcttcttcaygtgcagcttgtttttagctcccctgtggatttgatgtggtttctgccctggcctgggcagactccgacaggggcttctcgggtttggagggttgctgtggctttgtcagtggggagagggttggtttgggagtcctgaggggggtgtgcatggcagtggtcaggttagggtgggtgtgggaagggtgagggggcagtaggcacccagctagatgtccagttgtcttgtgctctgtgtagcctcaccctgggtggacttggttcaggtgctcattaactagaaaaagaaggatggatggaagaagaaggaagaatggatggagggggaaggaaggatcttggagggaggggaaaggtggacagatggagggagaaggaaggatggagggagaaggaaggatggatggaggggaggaaggatagaaggatggatggagagaagagggaaggatggatggagggggaagaaggaaacatcaaaatactctcagactctatgtgaggggcaggctgtgttatttgcactaaaggctgtacctggcacctaatgggtacttggtaaacctgatggtggcctggccatgtcctctgttccccacgctgtccccgtggagggtgactgtggtctgtgcagctgggctggcatcccatctccttgtcttacgggcctcatctgcctgtagctgcagagaggggaactcaagctggggactagatcagggcagtggaggtgctggcccctgctagaatatctaaggggctttcaaaaagcccactggggagctcttccagcccacccctgttaacttcagctccaggccttccctcagcggtcataggagagcagcgtccccattcctgcaggttcagcattgcaggccccaggtttcccctgctcctgggaccagactggggctggttgacgggtggggctggtaaaggatcctcctgacctccctcctggtagtttgtgggttgaacttgtcactggaagactgagatttgttttggggtaaggaggtagtttctggaagcctctcagcagctctaggtttttgtccaggctcttcttggctctggagaattgcatgttctgcactagatttttcttttttctcttccttttttttttttttttttttttttttttttttttgagaaggagtctcgctctggagtggaggctggaatgcagtggagctatctcagctcactgcaacctctgcctcctgggttcaagtgattctcgtgcctcagcctcctgagtagctgggattagaggcgtgtgccaccacacccagctggtttttgtgtttttagtagagatggggtttcaccatgttcctcaggctgatcttgaactcccgacctcaggtgatccacccacctcggccttccaaaagtgctgggattacaggtgtgagccaccgcgcccaacctgcattgaatttttctgtgggctttaatttctccatcatcaagtgggggatactggaattcaggaatggcttaggggtgtgtgttcagggaccatttctgtttgattggttttggcagcctggaggatcctaaatctgtgagtgggtgggaacaggggttgatctgtagtgcctgccaggggtacaggcgtggaaagaggaggtgtggttattcatctcatcacggggttagatggtctctaaccattgcacctctaggatgcggtggcttctatttcccttttagccctctatgatggttcactgggaaatccacggatcctttacagatgctgctttacccacaataagcctgagactgacagctggggctcactgtgctcaggaaggccccgggttgccctgtggttccgcccagccacttgggagggtccatgggggaactgctgtgggagccattttcagaggaagtgagttcaggcrctccccagcaaacacactgcctgagagggcaagacagccttcccccatgcctgatcctgtccatacgcgacctcaaactgtcacacagtgggtgtcacccccaccgctcgaggagaggatgagagatggacaggggtcggcgggtttcatttatgtggcattctgggaagatttagactaaaatctttaatccgctcggtctgtgggaggaacaggagactggagccattgtgtcagaatgtccggggcagaagaagcattgcgaaatctttctagacatgtatgctgttcatttaggtggtggcttgggggaggaagtggtggctggggaccagaacgaagccaaactggacactttacacttcagcatctaaaaataaaacctaccacgatacctctctgttcacctcctcctggcatccctgcatttggagaacttttagattttaagacattgagaaagactctgcaaaaacaggaagccaagccacttggctggcttttcaaaatcagctgggcttctgtgcgcaggatctccaggctgctgggccctgggagctgggggtgtttgcagtcctctgggttcaggtgctggtgactgaagaggacacacgtccccttgctgccagccgtcttcctgtgtttcctgtgtctggtccctgaggggcgtctcccgttctgtgcagccacccagggatgatgtggtgttaagtacccttttgaggtggggaaactgaggctcagaatgctgtgctttctcttggggatttcagctggccgtggtggagttgggatttgagtgcaggtctgtctgtctcaaaagcctgtggcccatggttttctgctgaacggtctcctctgcatgttcataggttctccatttactaaatgcttctgttcctcttattacctggactttggctgctatctaaaaaaaaggatgttggggccaagggtcaggactcaagactgcaaaacgctggtgaccggaggtcggttggtcatgggagttgtttctcttcctgttatttaatggcaacagtaacagtccttttattgaggactccagtgtaccaggcatcatgggtttactttaaggaagcatttgtgtgtaaccttcccgaggtgggtgtgggagcatatttaagaaagtggattttgcagatctcagtgtcctcaggtgcctgtgctggaggctgaggagctcgggagcccttcttccctgccacccctgtgcctcttcacctcgttcctcctcccacctctgcagaggattgtgcactctgtgaggcgcagggccgcctggggtcaggttcctgtctgtgtgaccttgggccagttgcttaacgacgctgtgtctttctgctcatctgtaaaatggggataatcatggtgctggtcccctggcaccattgtgaggactgagttactttgggtgaagtaattggcactgggcctggcacactggaagctggctgtctgcaggagaactgtacactatccacaggcagacctgaccgagtgtgagacctcagggcataaaaccctcctggtggtcaagtacagtggccagtcattgtcatcctggggccagggaggtatttccagttccctgcttgcagcaaaattcaaagagtacctgatggtgtcgtcagctgatagcacattaagaatgacctttgttttgggtggctgaggtgggtggattgcttgagctcatgagtttgagatctgcctgggcaacatggcaaaacctcgtctgagggttcccccccaaccacaaatacaaaaaattagttgggtgtggtggtgtatgaccgcttggggctgaggtgggaggatcacttgaacccaggaggtcgaggctgcagtgaactgagatcgtgccactgcacttcagcctgggtgacaaagtaagacactgtctcaaaaaaaaaaaaaaaaagaatratatttgataagagatgactagattactgtaattcttggcaaataattataaaggaatccaaagaatttgctgtggtaaatctctttccattctattttttaaatttgaataagtggtttctgttctcacatctgtaaaaattaaaaaatggagatgaaattgataaaccctgtcttattctagcaacaggcaatattcatctgagaattcatgaaataatttttcaaaaaattcccattcattgtatagatgtatttttaataagatttatttattaaattttacttatttaattttttttttttttgagatggagtctcgctcttgtcgcccaggctggagtgcagaggcatgatcttggcccactgcaacctccgcctcccaggttcaagcgattttcctgcctcagcctcccaagtagctgaggttacaggtgcctgccaccatgcccagctaatttttttttttttttttttttaagtagagatggggtttcaccagttgaccaggctggtcttgaactgctgacctcaggtgatctgcccacctcggcctcccaaagtgctgggattacaggcgtgaaccactgcgcctggcctaattaagtttatttttaaaggttatttcttatacaattttgcaatatatttctgtcttattgatcaattgtatacttatagtaattgttataataattcagtccaggagaaaacttctgacagagctttatgatcacaggaaatcacaggaaattaaaaaaaattaaaacattgatttttgtattttttggccctatagtatataataggataatcagtataaggctttcaagcataaaatacactgtgatagtataaacatctctgagggagatcagagtttgtggaggaaaaaaggaacactgttaaatttccaatggttaaagaagagcttgattatgtaatttaaaaatggatgatggcgaatctctaatcgccgtggtatttagataccattggatccatttaaaagagaaacattamcagttttatttttaaatgttaatatttacagtatgttggaaattacatcctctacaagtatttagacttatgatgagaaatttttcatatcaacttaaaaatgtgcaaatagatatgtagttttaaacatttattttgtgggggtttggtttgaagtccactgcttcagaacattaccctgtttacttctcagaaccaggcctgaggcaaatccttcctcggagagggacagcacgaggccttgctctcaggctgtccagaggccctgatggggctgggctggactgggctgactctggggcccagaactgtgctccgagacttgcttggcagtggacttgtctgcagacctggtctgttgggccacgtgatgatgatcatgaaagacacagcactgtctgctcagggctgctcaggcaggaaaggaagttgcaggggagccaggacccaggtagctcagaagaagaggatgtcctactttgtgtttagagcagggagttgggctgcaggacaagggaagagtgtagtaagggtcgtgggaccagatgctctctacctcctgtcttgagaggctacttgtcatgatggtgatggtggcaagtgcctgtttcctcagccccgtgctctgtagtatggtaatgggaatgctggacgcacgggccaccctgactccaccatttcagtgttgagttggtctcactgagtgctgagctgagggcccctcatagccaggccgtgcagatgggacgcagtaacatgcagcagtttccccgacacttgctatggataggccccaggtgctgggggctcacacaggcccaagccaggccccttcaactctctgtgatgtctgcagacagtggccaaggtaggcagggacaccagacaggcacagaggagggccctcacgcagcctggtaaatcaggaaggctccctggaagacgagtctggttagtggcaatragcccatctacccaacagatcctaactgagaggcaaggcctgacagagctcaacccagttcctaggtccttgtgcttccttctaaaacacctagttgctaaaatgaccaagtgccaagcacggcactatgattacttcccccgtacacaggagccttggtcgtctgtgrtctggggagtggggctggggctctcctgtgggccaggcagaaggcctgcatcagccttgctaggtgctgtcacctgggggcaccttccactccgatccaatctgtggggaaggctcaggaggagcggtttccccatccagggactcactgcctctttctggaatagtcctgaatttggtggaggaagaccctgaaagaaagacccacctgctgccgggccccctccagcctggacgtccttagggaagcatgttttgcagcctgacctctgccctggcctgttctctgggctgcctttccccagttactgtaaaagatcggggagaaggtgactgctggcatgaggggactcgaggtttgactttaaagtgcgaatgagcaagctgtaagtgtgagaagtgcagcagccagttagagattcactgtcctccatccacattccttgagaattcagacactatgaaacccagtctctggtgcggcggctgtttctcaagcaggcaaggaagtaagtwagttctcccggcttgcgaatgagtgaatggtgggcatacgtctttctgtccgtgttttctccagagctggtgctggctggcttgctggtgacctttgtatatgtgtttttaccccttcctgcaccagactttcagggaaggaggttgggtgggtgaccatcaaaccaccaagaaaaggcaagtctgagaaagagwcactaagacccaagggaaggtccatgtgcctggggccgaggcagaactgggtgctgggcctctggaggcgaaggaactgtggggatgcccactggcagggaaaccgtggggatgcccaagcccaggggcagggcaggcctgtctgagctgtgggggagtggtgaggacgcaaggctgggcatgtaaggaggagtgggccatcaggggatggaggccatacctcctgacatggaataaactgggcgtaggggctggcaggaggcgaggtgttagaatggccttacagacaaggagcatggccagggccacacacagcagctggggaagggggtcctttggctgccaatggcttggaaaggctacagccccaggcttgagggggctagtgagagaccaggctggagagagtagcggtgccaggtgagttgttcatggggtgctgtgtcgggggcatggaggggcttctgcaggcgaaagctgggtgctccaacctgaggctatgggggaagagccatggggaggatacatggagggtgattagacagggctgcactggaaagcagacagcagggttttctgagaggggctgtggctgcagcctagtgaggggtgatgtgctctccaggggctcctgcagtgacagagggcagcaggagacagatggcagggtgtggtacctgggtagatgtgggaggtgagagggggaggatcagtccccagactcctcccttgtttctggccggagtgcctgggcatgggggtgcaggaggagcagccgccagggagggaaagcccatgccagcactggcgctttccgataggtgtgctgagtgcaggcagcggaggcctgtgttggtagctgctctcggaattcagagccagaggggactcaygtggttgcgtggtgtgcatctctggaaggattataggtgctaaattctccatctcagcattaaaaatgtacttgttatttaggttatatttttacatggtaccaacatttttttaaaaggtatgctgaacacagtgtcaaatgatcaatccacagcggggttccctctgccacccatactctccagcgtaccccagctggctgaccccggtgctcttgatggattttatttccaggtcactggggcataggtaggggtggacacctgtgaacatccttccttctgtcgattttctctgccgtgtgctgtggagccaagcgtaaagggctttgggaataacaatcgctgtggggttctgacgtctttggagctgggacagcccatggtagacttgcggtccacccatatcctgggcagtggctttctgaagttcacgtgagcctgactctgacctctccccagaccccatcatctccaaggaggaccgccacgggcttggggggctggctctgcacacagtgtttccatgtggtcatttgaggccagtaatggacacagattgctcttggctgtgcctcacttccctgtggggtccagagacctgggtttgagtttctgagtctgtttcctggctgtggatcttttccttcctctttaaagggatgacagcgcacaggattgaagacacctaagagatgctgaaggaatattaattgatttttactcatctgttgttatgattaatggtggcatttcagtggggaaaatacagctacagatgaaactgggctgttgagaaagatacattgtttcagtgtggagaatatagtattttttttttttttttgcctcccctctgtatcacttttgggtttctaacaattgtggattccagcttactccttccttttttaaaagatagattttatggtttttttaaaaaatttgaaatgcaggtatttttttccccctaaacattgacaattattttcattctccatcatttactatttgcttaggctatgtagataacaaataagacaaagttatgtgaaagcatgatccccatagtgttttttaataatgatgatacatgaggtgctgggaagggttatataaatgaggtctgctcatagcagttctccaatgtggccattaaaaaaaaatcacatttttcacattttggaagacagcgtggggaaatgctcgtgagttgctttgagtactgtcgtcatactctgagtggtttcatttctatccgttttattttggttcctgagctttttaggtttgctgttagaaatagaagctgtcaccgtgttgcagtcttgtgcagcttccgaagcctgtggcactcagttctagggtgattctttctccagcctttgatgcactgagtcaatttgagcaaatcctttaaaaaaaaaaaaaagttcccacatcccatgtcaagacaacagagctctgccagggcaggtggggctccctgtgctccagggtgcctgggtgccttcttgcaggcaggcttccagaaccccaggccctcctcaccacaccacgcagggttgggactggatctccctggtacctgccacccttgcttggctgtcaaatgtcaagaattccgtggcctcagtggagcgtgccaggtaagcattttacgtaaaagcaaagaaaagagatggaatgaagtacacaggggaaataggaagggatggaaygggggttttagaaagggccagaagcaagattctgctcttaaagtagctgactgtcctggcattctggggtgaaggtatccatagcattgctactcagagtgtgatcctagggaatctgggtgcagatggagaaactcggatgcaaacactggattcctcagcagtcggttcccgtttggcctggtgcagggctgagactctgaggaggaggcatcttgacctgagggccctggactgtgctccttgtccagctgggcgcagaaccatcgtagtcaaagccaggaatggagatgcattgcctcaggtcagttccaaagaccaggaagcgtccctgagtatttcagttgagtaaggacctggcatctccctcttcagccccttccctgctctcatatttttattcatgcttttagaactgctaaatgtcaggtgggtgcagtggctcacacctgtaatcccagcactttgggaggccgaggcgggtggatcatgaggtcaggagatcgagaccatcctggctaacacggtgaaaccctgtctctactaaaaatacaaaaaattagctgggcgtggtggcaggtgcctgtagtcccagctactcaggaggctgaggcaggagaatggcgcgaacgcgggaggcggagcttgcagtgagccgagatcgcgccactgaactctagcctgtgacagagcaagactccgtctcaaaaaaaaaaaaaaaaagaattgctaaatgtcaccttggcagtgacacctaccctgctttcccagcagacgcctctgccccctacacacacacacacacacacatacacacacacacatgcacgcgcacacacgcacgcacaccaagctgagctgcctgttggtgtgtcctcctgaggctgggacttgctggtctctgaggagcacgtggtctggccctgatgtgcgctgtgtctactgggtgagtgaattaaggactgaggtattgtgctacacaggatgtggccaggcctcgagggtctgtgcttgctaaaaataactctagattattcttttgctcattaagtaatatgtacttgtggaaatcttgggaagtcaagataggctcacaratgaaaacccagagataattattgaagcaatttttacataaaatatgctcctttttctatatgatgtgcattcaggttaggcttttctgtgtccctagttttgccacttgcatttgggggaacagttgagcatttgcctgtgccatttaaacaccttggaaattgctgttagagtggctgcaccagcttcccaccatccctatgtcccagcatctagaaccatttctctgctccagagtctcaagttctaggttatttctggtttgctgttactaacagtcctgccctgggtgtctctggacctaaatctttggggacctaagtcacatctcaggctgtttcattgggttatggtctagaagtgrcttcaggattttgttgctaaagaagaaggggagaatgggggacaggttgggctgcagctagtcagctgtgtccagcacacttgggccctggacttagaactggacaggttacttgccccctctaagcctcagtttattcttctgtaaaatggaaataataatggacccagtctcatagagttccaggagtgaggtcatgcagataaggaacagcacagaacctgtttacctagtttgtcctcagaaggagctgtttgtgattatttactggtgccacctccaccaccatcattgtcatcctcagtggcccagggaagcgtgagtctgaatgaggtgtgttgtgtagttaaatgatgcgatgggtagatgagccaaaatgaaaggatctcttctgtttgatttattttcatgagtaaaaaagccagaaatgtctgtagcataagttatgtctgtttggtttggctaaagcagggctgaccagggatgagtctcctgctgtgagtgagtgaggtcccagcttgtcctctggggttagagcagattttgctctggctggggtgcatttgggggcatgggctgatttatgttttccttctttctggatctccccaggtctagccatgatggggtgaaggcatcacccccagggagtgctgacccctgaccctagccccatgaccccctcccgtgctagttcattatgggcaggggaggtcccagggattccccgcacactcatcgtgacttttccaaaagctgtgtaaatccagagttgtaacttggctctgtctttctccttccccttgatccaccctcagctcaagaactcccctgggaagcacagtggctcccgtctttgcctcaagttctctgatgttctgcacaaatggtaggcagagacagcyctttcagggacctgattgccctggtgtctagttctcctttcacaggcctgttttccagctcgactgtcaatctgagtctttctctttttgagctttatgcaatggccttagagtataccctataaggagatcccggcttgctggtgcccggccctgcagctgtgtcccagaaacttggcggtggtgcatggggctcactcagcacttctacagaagccgcctggggtggctcccagggttccggtgggaatggggtacagaggcctgagagggggctttgatcaggtgtcctgggggaacatttagagctcctggattctctgcaggaaggccaccagcagccaggcatgatggcctgtgtctgtaatcccaacactttgagaggccaaggcaggagaattgcttgaagcctggagttcaagaccagcctgggcgacatagtgagaccccatctctacgaaaattttaatttttattttttgagatggagtctcgctctgtcgcccaggctggagtgcagtggcgcgacctcggctcactgcaagctctgcctcccacgttcacgccattcttctgcctcagcctcccaagtagctgggactacaggtgcccgccaccacgcccggctaattttttgtatttttggtagagacagggtttcaccatgttagccaggatggtctcaatctcctgacctcgtgatccacccaccttggcctcccaaagtgctgggattacaggtgtgagccaccatgcccggccaattttttttttttaaaggtcaccagccctgttgtctgggcagtaagcacctagtaggattgcttcagagttctagaatgcgcatgtaaaaattccaaagtgcgtttggcgtctgggctgggcttctatgagcagcccaggcagcagcagtgagaactcctgtgtgtgcctcgtctactgagtgccagggttagtgccccacttgccaggtgagaggactgaggctcacacaggtgggcttgtcacagcctagcatgtgagctgtggagctgggattggattctagaggtgtgatggcatagccagtgcctcttctgctccgaagactgcctgcctggtgagagtccagtgactcctccctagttccagctccatccctccaaggctgtgcagtcctgggtagtggcacaacctctctgaggcccatctaccagatggtgatgagatggatgattgagacgaggggagggcaagtgagaaggccttctaaaactcaggccctcgtaggagaagcgtgggtagcctgaggtcagggacagggcttagtgtgctgtgtggggctgtggggagtgggaagctcactggttttctggctcctgagatgactcgaggggtcttgtgaagctcacacccctgtctcactgggcaggagtttggcctccactgtgggtctctgccatctcaggtgggtgggggaccaggggtccctgggcaggagggtgtgggtcctggcttggaggcagaccttggctcactcccttccttgcccaggcagtatttttgccgcaggccctgccaagtagaaataagttatttacagtgttttgacaggatcatcggcagccgggatgggcaaggatgcctttgggactgagctaatggccaaggagtggggcttggagaagggtctggcgtgggagagagatgggagatgggggtggggtgggrgcgcacatttactgaacttgttaaatcttgacaaatgccaggcctggccctcccttaagccagggctttggggcctggtgagggcaggacttgatgagttttcctgtcgaccaaatattccgccggatcgctcaggaccctcggttatttttgctgtctgagccctcagtgccttcctttgtccakcagggacaaggacccctgcccacccagtatatcttcttggggagaagatgaaacgccttggtgtatggtaggccaggccctggccttgactgtgagcctggcagcccctgcagcccctcacactgggccaccattgacctgctttacgacttcaaatagcacagacctgccgtgggaccagggcctcctgctagtgcctgacctctgtcctgcatgatgttctgaccctccagaagcaggtttgaaagtgcctttcaggaaggtctggagagcctcctgtgtagcttgtgggaacaaaatgtgttactccctagccgaaggataaccagcacactaaaatgtgaataaagtgtgactttattcatgtcctttgagcataaaaatggcacacacactgatgcattaaaaaaacttttttttttaattaaactttttttagagatggggttttgcyctgtcactcaggctggagtgtagtggtgcgatcatagcttgctgcagctttgaactcctgggctcaagcaatcctcccacctcagccttcttagtagctgggaccatggtgtgcaccaacatctttgatgcagttttttttttgagatggaatctcgctctgtcgcccaggctggagtgcaatggctcgatcttggctcgctgcaacctccgcctcccaggttcaagcgattttcctgtctcagaccccagagtaactgagattacaggcacgcgccaccatgcctggctaatttttgtatttttagtagtgatggggtttcaccgtgttggccagggtggtcttgaactcctgacctcaagtgatctgcccgcctcggcttctaaaagtgttgggattacaggcgcgagccaccagccttgacrtagttgtaaacaaarttgtggttctgttgtaatctgttcccacaaacacacttagcattctcttagagcttccccctttgttaaatgtctacttaggcttgctttttaaatgactgcataatattatctgattgtaactgaagttctttgattcccttggttgatgctgaccatggttctggtctgtcacctttataaatagtattgtgataaacatccrcttttgatactgtttgggcaagcctgtgatgattatttctttgggttacataagtaagttgtatatattgtttttgtagtctgtaggaggaatatgtacttcttggtgaaataaacaaacccctgcattttggggaattacagaaagggaaggtcttgtgggagtttgtgcttctagatttgaatgctgtgttatcacctgtgcaccaggcacgcatacagcaactcatttctctctcatgtgccctccctcccctcctttctcactcctgccccagacccactctctctgcccatgaggctgggggctgtrgcctagccgcagctgtgcccatggacttttctccccttgcaattgttcctcaccccagggagaggaggaaggagtggtgggctctggaggaggtgggtggtccccgggtggcctctggtcttgcttcttcccagcaccgagggtgcttcagcctccttgcctggaaaaaggggttgtcgtaacaccaacctctaaggttaagaagggtaattgagatacagtgtcaaagtacttatcacacagcctggccccagatctgtgttgaggaatctgcagctagtggtggagggttaggagtcatttggggaattgcagtccggaaagttaatttctgaagagtatcaaacaccagcttgcatgttaagttgtcttttggagtgatccctccagtgattccctagtggtatggagccagtccagatttggagtggaacttttgttgtgggtgtgggtcactgttccagggaaccccagctacctgaccttgaaccaaaatccttgtcattgtggagcctgtgtccccctctgccttggacttttttacttttatcttcctagttctcataatagctctgtgagatgggatctatttattattctccctattttgcagatgaggaaactgaggctcagatctgtcacctgcttctgtgatatttctagtcacagagctccaagcaccaatcactctgggtctttgaactcagatctgctgttgcctatggcctaggctctttctactctgactcttccatcccctgccccttccccagtgctaaccagacctctctggttcctcataaaaacctcccgtggccttcctgaattttccaaggctaccacacaatcagccccctaataccttgcaagcatgggccttttgcagcagagcagggtcccctccattcctgagcttgtttcactgtccccatgctgatactcgcctgttccagactgtgtaccctcagcctggcctctctcctggtcagggtgcatgcctggcccacgtagcctggtggttctgtgctcgtctctgtggctcaaatttgctccctgtcttctgaccctgtatgtgtggtgacccagaacgtgttcctcttcatattagccagggagcttgcaggaagcagagctcaccctcagtggttcaaagagagccttgaaagcaggggctgtttgttgagctgtgggcagggttaagggagcagcgggggctggtgaggcacctagagcctggcagcagagaggagctgttctgcttcttgggccgcaggtaaggtgaagaaagtgtcgcagaagctctgtgatggtagtcatagcaagccacagccactgcccaggcatgtcactgaagcagggagagagaggggactaaataccccacccccctcctcctgccctctggtctcctgccagtgacccctcttggccaagtgcaactggaagccctggatcttgaatgctgcgttctacggcagtcagcctcccaggctcagagccaggcagtgtggatgggggtgagcagggagtgaccagcaccccccacccctgcctcatgacctgcaccccctccacccctgcctcgtgacttgcaccccctccactcctgcttcgggaccctcaccccctccacccctgcctcgggacccccaccccctccacccctgcctcrtgaccagcaccccctccacccctgcctcgtgacccgcaccccctccacccctgcctcgtgacccgcaccccctccacccctgcctcgtgacccgcaccccctccacccctgcctcgtgaccgtgacccacaccctctccacccctgcctcgtgacccgcaccccctccacccctgcctcgtgacccgcaccccctccacccctgccttgtgacctgcaccccctccacccctgcctcatgaccagcaccctccccacccctgccttgtgaccagcacctgcgcccaccttgagacccgcaccccctccacccctgcctcgtgacctgcactccctccgtccctgcctcgggatcagcacccgcccccgcctcgagacccataccacctccacccctgtctcgtgacccacacccccctccacccctgccttgtgacccgcaccccctcccccctgcttaggacccgcaccccctccacccctgcttcgtcacccatactccctccacccctgcctcatgaccagcacccatccccgcctcgagacccacacaccctccacccctgcctcgagacccacacccccctccacccctgcctcatgatctgcaccccctccacccctgcctcgtgacccacaccccctccacccttgccttgtgacctgcaccccctccacccctgcctcacgacctgcaccccctccacccccctcgtgaccagcacccgcccctgcctcgagacccgcaccccctccacccctgcttcatgatccgcaccccctccaccccgcctcgtgacccgcaccccctccacccctgccttatgatccgcaccccctccacccctgcctcgtgacccgcaccccctccaccccgcctcgtgacctgcaccccctccacccctgcctcacgacctgcaccccctccaccccgccttgtgacccgtaccccctccaccccaccttgtgaccagcacccgcccccgcctcaagacccgcaccccctccaccctccctcgtaacccgcaccccgttcacccttgcctcatgatccgcaccccctccacccctgcctcgtgacctgcaccccctccaccccacctcataacccgcaccccctccacccctgcctcacgacctgcaccccctccacccctgcctcgtgacccgcaccccctccaccctgcctcgtgaccagcacccacccccgccttgtaacccgcaccgcttccaccccgcctcgtgactcacaccccctccaccccgcmtcgtgacccgcaccccctccaccmtgcctcgtgacccgcaccccctccaccccgcctcgtgacccgcaccccctcaacccctgcctcgtgacccgcaccccctccacccctgtgttgcgacctacaccccctccacccctgccttatgaccctgtggacctcaaggcagagcagcaatgtgtcccgtggcctctgtgagagcggacccagttcttctgtccctacccagagtcccgcatggccactctggcttcgaccttccagactggccctcccagatgcccctgtggccatcaccccatggctcatttctgtcatcaatttatgattgatcctttaagggagctgatgggcttgcaggcccagggccctaacaggggctcagcccttcattccttctgttgctgggtgctcacccaggccccagtggcaggtcccctgctgccctctagggactctaagatgaccaagtctttgacctcttctgcgtcagtagctcagggagacagacaaccatggggccgcctgggaagatcgggccagggagctggggagggctctcgccgagctgatgggtttctcccacctgtcagtaggtagccccttgagagacagcatgtggtgatgccagaatcgtgggtcatgatcctttttctctccatcaaggtgcctagcgccaccaagcatggtgagaatgaccaggagggtgcctggtgggtgagccctgagtcgtgtggcccccatgggagagcatgaagccacggctgcctgtgctgcaggctggggccgcaggagactggggtccctgctggttctgcctctcctccctgcatggcctcggccgggctctgcttctttctctgtctkacagctgataggatctcatgggtcccgtttcactctcaccttctgtaaatccctgattcttcagaaaacggggctagaaaatctcccaggtgtactcgcacrtctgtttcctttcttagcctttcatcttgaagtcagcttggtgaggttgccctgttcatactgcagaatccagggatctgaggcctctcgccccctgggcagcaagtgagtaggagtgagcaagtgtgtgtgagtgagtgaatgtgtgagtgagtgtgcatgtgggagaatttgtcgatctgcttgaagcaggctctttgggtgctgtttcagcaggacagatttcgagagaacacagctagctctccacgttggacctcgcctgggtgcagtgtttctgtgtatagcaaatgcacacatggctgcctgtgtatgcrtggtggatttggagtctgggtgatgggtttgcacgctgcctctgaccttgaccagccttgtgaccctggggagtcactgtgctctgggcaagtcgcctgtgaggctcataatcctgacagcattactcatcctcggcctatggtctcccgggtggcatttgggagcacccagagggtgagccaggcgctttctaagctgtaaaagtgccctgtgatgtgagcagttatgtgatgtgctctcccagcagcacccagttttggaggctcaggaagcattcccagcagggcctgtttttagccttgaaacatcatgcttgaaaaatgcttgcatggggtttatttaactttaagtggggcaaattctgaaatgggttgtttattgtccaagttgaatttttaatttctcataaattccccacaaattgctatagtacatctttatttgttgaatctgtcagagttgtttatggcactgaagcctgggctccccctgtttgtggactgttgccatggcaayaccaggctctggaggaggggcactgctctgaggtggtatagaaggttctggaatgggctggtggtgtgaagtagagctgtggctgctgcactgagacccagccgtgggtggactgagctgcttaagaccctggttcctcttcaacatcactgcacccctcttggtccctcttcccttgggggtgcactgctgaggtctcctaattctgcttccctaagcccttgctgctcccagtgtggtctgggaaccagtggcagctgcactgatggggcgcccatgaaaaatgcagactcccttgcccccagacctgctgagtcagtctgcagttcaccaagctttcaggcaccttctcagcatgggtaagctgcagaagccctcacatgccacactgcccttgggtgaccccagaggccttggcctggcggttcttggtgtttgccaccgtcctccctgtgatctttctgactccttccccgacagttccctctgcttggccaggagtgggctttgcctctcaaccctgctgcacccaggccactctcctgctttgcacacaccagtctctactcacacagtcaccccagccttctctatctggggaactctggacatcttggaagaggcaactcttgagacacctcctctgtgaagccctccctcctttccccagaccgggtgatgttcagtttcactggagctctcctgtggcctaaacacctcacctgccccagcctcatcaggctgcctgattcacctccctagccgtgacctcactgggtgccccggctgctcctcccgtctgctgggtgctcagaccccagccagcgctcaggaaggtctgtggagtcattgccactccagtcagctggcttcacaaggctgagacttgagtctggacttcttccaagagcctgtactctctgcccggggagtggtagggaccgctgggcaccttcagtttctacctgaggcctgactggcagttggggctaggaccggataaggatgggtccttggactttggaaaggcgctgtgggagggaggcatgggaggggacagctgagaggagtcccgagctcatgcgcaggtgagtgcagaagttcaggtggcatttgtatgtcccttgagtatctgttctgggccaggcagcaccgaggctcgggagagtcccagtaaacaaaccccaaatccctctgccttcgtggagcacttgtgtctaggttgagagactgaaaacagaaagaagtgtgggtggcgagtgaggtgggggagggggactgggagaaaaatgaaggagagtaaggggctgagggctggtgtgggatttgggaacatggcttggttaaagctgaggagatgctgaccctttggccctgcaaatcctccatggcatgtacccaagagaaaggagggctgtgtccaccaaaagacacgtgtagaatgaatgttcccagcagcagcattcctgatggcctcaaagaggagacagcacgcatgcccattggctgtagaatgggtacgtacatgacctgtgttatcatctggccatggagttgtatcgaatacagcagtgagaatgaaccatggatgagtcccataggcatgaaacgtggccaaagatgccaggtgcagaggcgtattcagtgtctgattccatttacatgaagatcttgaccaggccaagctactctctggggacaggaggcaggctggcggtcacctttggggacaaggtgccgggtgggaatgtgaggagcctgctggtgtcttgcaactgtcctctcctcagtcttcctcttgggtgccagtttgtgaaatattcaagctgttcacttatggcatgtccttcctttcttatgttatacttcagtgaaaggcttataaaagaaagaaacagaaggggaaaaaagccatgagaggcagagagagtgctgttttctgtaatatatgcccttagattctctagaacattggttctcaagccaccgtacatatcaggacatggccaccgcccctcctgaagctctccttgccaggagtgatgcaggctccgaggatgaaccacctggtgagaagccagtagccccagcggcatctttcttgctcttcactggactggagcctctctgtaatcaagggagtacatgttctgtaccccctggcccagtgtctagttagaatagacagtgagcatttacagattgaatggttttttgtttttttcccaatggttttagcttgtctttgggaatatagggtctgtttctgggcatggagaaacagggttccctcctgtgctttaagtctaacctccaagccagagaggtggtactggcaggagataagaccacccgttgtctggatgctgttttccatgcagcagacatgggctccagtttctgtcaatcagtttattaaaacctgcgtttattacttgtttgccctgtgccaggcactgggctgtgtcttagtccagccccacagtaccctgtttacagatgacgtcaaagcagctacacgtgggtgactggctcggttcacttgctagaagtggggactctacctctaagwggggtgaatcccaggctagcacttgacccactgacagggtggaggggatgtggggaaagaagatgttcagtcagggttggatgcatgaagtgctgggtgggctgccaggaagtgcttctaagcctttgctcttcgcttccttccccgaccccatctctccctacttcagtctgacttccctccatctagaatcttcccagatgactccacaactgggtagttttacctgctgtttctgaagcctggctgtcccgtctacctcccaaacatcagcccaggctccagagactactggaatcacagtcacctgggagattgatttttaatagactctattttagagcagttttgggttcacagcaaaattgagaggaaggtgcagagacttcccgtatctgccctaccctgacacacatgcagccccccttactgtcaacatcccacgctagcctggaacatttgctacaatcagtgaacctccctgggtgcatcaggatcacctgaagtccccagtgtgcatagggctcactcttggtgttgcacattctgtgggtttggacacatgcatagtgacctgcatctaccattaccataccatacagagcagcttcactaccgtgaaagtcctctgcaccgcctgttctttttaaagcacttctaaaaagaagtgctgatggggtggcatcaattatatccagatctctggggcagctcttgagcactggctgtcatgaggcccccaggacaacaggcagccgggagaggggcgggtggggaaccactggattgaagtaatggttctcaaactggagtgtgcactggaacccccagggagcacatcttcaaacaggtggctggccccattcccagggtctctgaaccagtaggtctgagggggctgagaatccacatctgtaacaggtatccaggtgatgttgaccctgcttgtgagcccctctgtctgagaaccactggtttttttttattattattttttattttatttttattttttattatactttaagttttagggtacatgtgcacaacatgcaggtttgttacatatgtatacatgtgccatgttggtgtgctgcacccattaactcgtcatttaacattaggtatatctcctaatgctatccctcccccttcccccctccccccaccccacaataggtcctggtgtgtgatgttccccttcctgtgtccatgtggagaaccactggttttaaacagtggtgacgaaaggtgtggttgggccagatgtgcctgctcagaaagccaccagagcgctttccaagtctttggggcatctgggagattgtgcccggcccctttcccagttctgagtgagggactgaaccctgggatgggagatgtagggctstttcctgtaccaccagccccttggggacctgggtttggagggagggtggtggtgcgggcaggtattatattgaatatagagtgagccagaaggccggtgaggcttgggggcgaacttccagcccactgagtcactctcaggccgtctctggccccactgaaggatctcccgtccccctaccccactgggggttcctttggccctcacagaaggacagataaggcccccagggtaagaacaacccagaccaggcctccctgggtcagagagtcagccagggcctggtatcgagacttagaccttggagagcttgggattatgggagaatcaggctgttcttcagacaacaggccgccctagatgcctggcgtctgttgtaataaaagacctttagtggaaactaagtctgttgcctttggcctcctaggagcccagcaataaaatcagtgtaaatagagctaacatttgggagtggtttataaagcacttgaaaaaaatccctcatataaacccaaagacagtcctacaagctgcagggacaattaattatcctaccttttggatatggaaattgaagttgagaaaggttaaataacttgcccatggtcacagatcttttaaatggcagagctgggatttggcctggggactctgccacccaaatctctgtgctttctgctgtcttattccccttccaccacgtggcccctccaggcagagatgaaggcgctcccctggtgcaagctccagctacaaaagggtgaagatggtggtgccctcagagtggaatgtgctggaatttctcacaacagagttgttcttgaaataggtacttattcttggcatttcttagccaaaaactgcagaggtgagtaccccatagccataacagtggcagggattagggagtgagttagcgttacaatggaagggcttccgcccaatctgctgtcttccattccccatgctgagacatttggaggcacagggtggtttccggtctcattgaattggctttcacgcttggctatgaggcacccctaggggttccttgaaggggtacctgcttttcaagggggatgagttgctcaccactcccttcacctgagcagctctttcttttttttttttttcttttgagacagagtttcatccatcacccaggctggagtgcagtggcatgatctggactcactgcaatctccgcctcccaggctcaagcgattcccctgcctcagccacctgaatagctgggattacaggcatgcgccaccaagcctgcctggtttttgtatttttaggagagacagggtttcactatgttgcccaggctggtctcaaactcctgagttcaagcgatccgcccgccttggccttccaaagtgcagggattacaggtgtgagccacctttcccagccactctctcttgatctgtgtttgatctggggtctgcatgttagatttcatttcaggaaagacatttgaggtcagagagagtttgaaaaccatggtgtctggggcagaatcctgggatattcagctcccccatgcctgggaaattgaggcatgtgtatgtgcagagagctgtgggcctgccaggtgcgtgatgactgttggctgtcaggtcctgggggtggagtgtggccatcaccgtttgattggttccttgtccgtcaggtgtccttctgagtgcccaggcaggccgggccctgtgctgagcactgggcacatagctgagagcaaaactgccacatcccggtccttaaggagcttccagtttagtgggaagacagaatctgtcttggatggactttgagtctcttccagcaccrcaaggcgtgtttattaaagagctgggcattggactcgcctgcacaggtacctctgccagctctgcttgctgatgggccagtgacactcacttcctcccccacacgtgtgggcctacccgatgctggcgactggaggtctcggtaggtcagccatggggtcactgaggtcccgtgacttggctccctgggtctctaaccattcctcacctgaccccatctctccagaattactcttgtggacccccctcacatccagggcttggatttgtcacctttctgggtggagagaataaagggaggaaacacgaactgaggtggggtgcaggagccaaggcaggccctcaaagtgtgcatcgatgccttcaaaagccagctgcagtattcggccacctgcgatccctgggtgcccgccatcagcccttgctcctctctcttgccttggataggacagaagttgacacttgggggctcttggagaaccatttggagcacgtggaactcaagagtgaatcacttattttttgctgtgtggcagcagggcctccctagacaggacatattcgggggcttgcagccaggtaggggagtggaagtacctcctctcaccccacacacgggaattggagatgaggcagccgatcctgcctgcttgagtctcagctgtcattttccaggctggcagcaccagcaggagaacccgtgtgtccgccgggctttctttaaaatgcaccgagtgcaacccagtcctccttgtgtaaactttctccaactggccagatggtttgcttctatttaaggcrgtgagagtatttcctacggcctgctgccccctggcctttgttttgccccgggaaggccattcctcgmaagggaagctgagcaggagttgcacttcccagcagcagggattgtcggcgcccacccccatggcaggcctagaacctttgccaagtgcctctgcctggagggaccgtgtttgtaacttgactccctctgtcccttccaaatctgcttgtgctgtgttttcttagatggtcatgaaggtctccccccatctcccaccccagctgccagcccggtgcctctgtccctccacatccacatcttttctgtttccaggttctgttgatttttccctctggatatttccttacccaccccccacccccgtccttctgttctgtgaccccggtcagtctcccagtcccccttacccattattgccaagcctctggctggcatccccagctctgggctctcccaccctcagtccagcccccacctggcagaatgatctttcatcgagaatatctgagtcactccactgatctaacctttcctggcctttcattgtctttaggttaaagtctaagccctggagaatggtttatgaggcccttcccagtttggtcctgccagccaggcagcctcaccccctgccattcccaactcagacaccagcaacacctgcgcactctctccctgcctctgcacttgctggtccgacctactccagccagatgtcacttgctggcagaagcattcctggcttcccctctgtcccctcacctcctctgagccgactgtgtttacctgtgggctcctcgcaggcactcaccttggtacttagcacagagccctgcatgcaggaggccttccacacaggattcttgtgtattgctgactttccccccaggtctacctagaagccacagaaggggttttgtagggcttttaaagggcaaatggaatctgttattctttagtatcattaatatctgcaaagtttccttctcagcagatcttcacttctcattgtctacactgtcccttttcctctgggtggcagtgatgattggcctgagcctgttatgagatgcttcattcccagcctcccttgcagtgggggtgcccatgttatgtgcacttctaaccagtaagacatgactggagagagtgtttcttttttttgagacagagtcttgccctgtcgtccaggctggagtgcagtggtgtgacctcggctcactgcaacctctggctcctgggttcaagcagttcttgtgcctcagtctcctgagtagctgggattacaggtgtgtgccaccatatctgggtaacttttgtatttttagtagagatggggtttcatggtgttggccaggctggtctcgaactcctgagcttaagcaatccacccaccttggcctcccaaagtgctgggattacaggcgtgagccaccgcgcccagctgggaaagagtgtttctyctctttcaaagggttggctatttcgccctggccccttcttccccgcttccagatattttgtgggagtatcaggagctttggcagctgtcttgtgagcgtgaggcgacaggcaygyggacaaaggtctaccatggcgagcatggcagaatagaaacttgaaaggagtatgggttcttgctgatgtcaacctgttgaaacaccctggagactccactccctcctaacgttccgtccttatgattaaagccatttttagtcaccacttaaaaccagacacatcttcactcatgattctgagcttgttggaattgttttttgttatacgaaaaccaaatgcacccttgacgtaaagactggccatcattgaaacaaagctttgaaggccgaaggcgcttgccaaagagaaggatgccagtgctttgagtgttactaccatcgatgtcagaaatgtaggtgcccaaaaggatgaccgttgggcaccctgttcatttggacatgttatgtcagaaaacaaatcataccatgttcaccatgttatgagaaaatgtaaagcctcttcaggttgtaagtagcagctgtcaatatgaaagaaaaatcttaaggaaatgtcaataaatagaatttattggcctgaatgtctcagaaggtccagagataggtctggcaggtttcaggccattaagaactcacatgtattgtcatcagaaatatttcttcacttttcatgctccttgtgaaagtcattttgggtgggcttgtgccaagtcatgtgaaactggttgcctgcagcttcatccccttggcttaacagccctgcaggaagcagatgtcgggctggctggtgctggctggctctggttggcctggcttgggtcacatacatatcatatttgcctgctaggaatgccataacaggtcactgcaaactgcgtggcttaggagaacagaaattcactctcagttctggaggctaggagttggactcaggatgtcagcagggcactgctccgtctgaagccccgaagggaggagccttccttgcctctgccagcttctcatagtcccaggcacgccttggcttgtgggagcatcgctgtagtctctgcctccatccccacttggccgtcctgcctgggtgtctgtgtcttcacctggctttctccttttcctataaggacactagtcatattgaatcagggccaaccctgatgacctcatcttaatttgattatatctgcaaagaccctgttttcaagtaagatcatgttcataggtaccagaggttaggacttcagcttatcttgttgggggacaaagttcaacccatgacacctgtccttgggctggatgacatgatactctagctggccaggactgtatcacttgcccaccccaaagtgagtgtgggtcaaccccctggagttacgtggcttaaacgtcggggaggaaggttcttcaagggaactaagttgagggcagtccacagatggaaacttggcaaaggcagtggtggtaatggttcaccagcagcccggcttggcctgagggccccagctttccagtccggagtggtccattggtctgattcttctctcccagttcggtcccctctttcctgacttccattctttaactctgcaggagggggcgcttagtttagttggaggtgaatggagagggaagggagacccaaagcagggaggcccttgtgatttccctaccagccgcctgctctgggctggagcatgggcctcagatagcctaggtgctgggctgcatgtgcggccttgtgggagttccaccgagcagagcttctgatgggggttcgcagcctgggtgggctagctagtgacygagctttgatggtaatgaaccatcgtttgctgcttttattcattcactagtttttcatctgctgtgggagaaggctgtgggagtgtgcagtccgaaagaaatggaaaaacaccagtctcctgtttctgccctgtgctttccagttgaccactcatttggagatgtttctgtttgcttgtgttccccccgccgcscccccccgcccccggctgctgggccatccctgcttacctagcctttttctgaaggtcttgaagcccagagcacttaggaaagtctgagcactaaattgcgtcctgcccaatcaccatatcctgtgtgtatgtcttatctcctttatgacaggaacatggttcatagttgcctttatctggagcacatggggccatgtgggaaaggaagcttgagccaggccaaccctgtgcagaccctgctgtccccaccgtggggccccgggctagcgctgtttctctgagcctcagtttctacctcctcagaatagaaaatgggagtagcactaatggttgagatttctctcagccaagtgtctgtgagtgggtttgtgcatgcctgggacctgagcaatggccacaagaaagtcctgtttggarcttgtggtcagcctgggcgatgaggtcaagatgccctgagagtcaggagggaggggtgcggcttgactgccccagaccacactgggaggtttgcagaagaaaagagcgtggggtggggatggggtcaaaaaggactctgtgtgtgcctggtgagggcttgaggcccggctcacagaccactggtggacccgtcccgccagagcagtgaccgcttgggaggcagtgagctgtgagtgtggaaaggaagtcggaggcaacgtgggtcctcatttgggggcactggggagcgattgaaggtttttaggtagttgcagaggacagtttcagggaaggtattctggcagttctggcccagggtggattgggttgtgtccaggctagaaactggatcctgaaattagttctgaaagaataaaaaaaaaagtctgaattagagagtatagcttaattttaattactggtccttgttaattagttctctgattgcatgtaagccaaggtctctaattggattttcttagatagggtttcgctgtgttgcccaggctggagtacagtggctatttcacagatgcaatcatagcgcacttcagccttgaactcctgggctccagtgatcctcctctcacctcctcctcctgagtagctgggactacaggcacgtgccatctaattggtttttaagtgctgtcagtacgtttcagggagactctccacccactttgcgctaatcttcccccatccwggtgatttgctgtagagtctttgttatggggcaggggcagcatagcctacttccagcctctcagtctgcggcagtgctcttcagggtcaccaggggagttgaattaaaaggccactctgacctggcctctgtggtttcctggcyggctgcatggaccagccctcaagcgctgcgggaggcagagctgctgactggcagggacaggggcctgaggtcttgcccagaggggtaactggcctctgcttatttgtgagaggtgaggcttggaggtttggtttgatcttgatgccctgtgcctgcaagggcaaggaaccagtgcctggtgacttggaactaaggcacagacttccatttcaggctcaaaagcagcatggcactgggctgcaaagtcagggatctggttctttaaggtagatcttacaggagggagaccttaaatgcccctttcttcctgatctgacagatcctagagccctggggcctgccctggccaggagtcctggtgctaaaccctgtcaggttggtggggaaagggcatttaaggcccttaccctgttaagatatatcctaaagaaccacaaccctgacttgcggcccacgctagtccgtcacggtgtcgggtttttcttgcttcttcctcttcctcctttgctagccttggtgcttgcggtggcccttctggccaggccatagacagaggccacacccttcttccctctctgccgtgttgctgtccgctgggccactgtcccacctcctctgagatctacagccccacagggttgggtgatggttgtcgccacattggtcagttctgcatctgggtcagtcccaggggcttgcatggctggctgtcagtcctttacctggggggccctgtggctcatccgtggccctcgagttccagagtttccatctgctgccaggccgagtgcagcatcctcaccagcttcacagccaagcagagggatgccagtgttcggcctaggcttcggtttaatttttatgctagactttctcagtaatcgccagcacaaacttattcatggtcccttccttgtgtctggatttcagctttcctatctctgcggagggggttggaccagattacacgtgggtgactcagatatacctgggcctscatgcaatctgtttggcccacacaggaattttacattctttcctttgaatttgttgccagtgtttaagctggttgccccttaggccccaccattctctgttgtcccacaccaycagcctcatggtttacatttgccccatgggcgcttcagtttgtgaccctccatttgctcctaggaccccctcctcacctcccccccaacccctcccacctgaattcctcagtaccctctggctctgtcttcccagggtgatgggacagaagrggagggaggctagagcctagccatccacaagccgggttccagaatggttggatttgagaaatctggtgaaggggaaaagatttttcatttgcccagaactcagggtagtggacttggggcagtaaaggtctcaggaacagagttgaagccagaactgtaggaagatgtgtattggggccttcaggtgggcggcaggagaggaagggtggggctgtggtctgggaagggcctcctgcaggatgccagcctgccaccaatgaggggaaggagaacggtggcctgggcatgacgtgcgcttggaacagattcctggtgacaccacccccagccttggggcttaaagattgtggtgtaatccaagcttgttttaatcaagccacagataagaatgagccaggctgaggctggctacggcctgagtgcacattcctgcctggtgcactttgttcttcatgtaggtggggctgggcggggcagggaggctgccctgctgccttggacccaggatggcatttcccctgcttgacagggacacttggaatttcctgttggaagtagccccaaaggaaagagtgcctgatgggttgagccttggatgtgttcggtgctttctgcagtgactccacagagcactgggcttttgcagtctctactgtgctgtcttcggctttcccactggtatttcctgccctcagaaatccacctgccccacatctcttttctccccttctgtctgtgcacataaactggggtggatttcaatccgatctccttagctgtgtgatcttgggcaagttattttgcttctctgagccccagcttctggttctgtgtgtgctgtgaaaccacctgtggcccacgtggccaatcctgggtcaatatttttttaaccaatgacaagaagtttctaagggttttccccaaagtgtgggcctcggtggggagctggcagtagctggatgagaaagagtttggacttcaagtcaatttgtagagttaagattgaaacttttttttttgagacagtctcgctctgtcaccaggctggggtgcagtggtgcgatcttggctcactacaacctccgcctcctgggttcaagctattctcttgcctcagcctcccgagtagctgcgattgcaggtgcacgccaccatgcctgggtaattcttgagtttttagtagagatggggtttcaccatgttgctcaggttggtcttgaactcctgacctcaagtgatctgcccaccttggcctcccaaagtgctgggattacaggtgtgagccaccgcagccagccatgattgaaactttaatttccttctccttgtccgaggcccttctccctttctttgcccaccagtttctccctctgagcgctgcagccaccccacaagccccagtgccctgtcaggcccatcaggacatgcaggtggggcactggcctgagttttggatctttgcttcaaagccgtgttaagtccagctctgccttgtcccagttcccagccctgtcgctgttaggggtatccgatcagcaccctcaaaactagagagatcgcagcctcaaacaaatccttttggcaaatggctgcatgttaggagggttttggtgacccaaacatgtgccaggcatgttccaaaacccccagcatcaaggcccactcagggattagggtcgaagctgcttggctggggagagagggactgtttttgttcttagccactttctgttcacatatggctatcattcactgaatgaacgtttactagaacagcagggtggcggagtagagaaaacgtgtttccagtttgctgtacctgtgtcagaatcttggatttgttactgtgagattcagggcacttgagtcatttgttctctagaaggttaatttcctcaacttataaaataacttgatttgtacctcctgcagtgggtgttgtgaggactgggtgagaggaagtctgtgaggacccagcatgacacctgcacatggcagctgtgtggtaggcggtcactgctgttgtcatttagtaggtggcccttaggattagacaccgcgggggacacaggctgggtgagatagggtccttgctaccaggaacatatggttaacagggggctgcaggatagatttgctgtgttttgggagttcctagcatctgaaccccctctgagtttacatctgaggattctcttccatatgtatcttggaggccagacaggaaaggccaggaactcttgtcacctgtagtgctgggtgcgagcacaggactggggcctgccagccagacccaccccctggtgctgggattcaggaagcaggacagggagcattcgtcatggtggctcagtggcagaggcaggtgccagatgggatgctgagccctgtgtgcccgggtgtgggctgggcaggggccttgcctgcctgcctgcctgccacagggcctactttcactgtgcttctctgggtgaacagcctccctggcagaggcccggtttctgagcgtggctctcccagcttcctgtgttttctgacctgcacagtggccttttagtgaggtcccttgctgctcaggtcagccccaggaaggttctggtgctcacatcccagaacctgctggtctctgggcctcagagtaactcatactgagaggagggaaggatgcccaggcaatactgtgcagagacagggttgccacttctggccgcagggaggagtcagagaagacttcttggaggagggggcatttgaaaggtactttgtaggacagagggcctggagggaggttcagatcctggccgggcagtggaagcctggcccttgccttatagcctctttgaaatgtaaatgatgctagtgcctgtgggatagggcctttgtgaggagtaaatggttgaggacagcgcctggctaatcactgatcaaaatagccccctcctgacaggggattaggttcatggctgtcgtatatacgagaccaaccatctccccccacactctgtattgatggggagtggtagagttacacttctgctctgagctcagtgcatagacatcctatcttgttgaatgtgcacgacacctcgagatgtaggcaggatccttccttttttacaggggagaagayggggccttggtgaggtgaagtagttcccagggccttccatccaggtgatggrgccaggaccttgcttctagttctcctgcctcccaagcttggctgtttcctacagctgcatacggccccacccagagggaggcagtcaccagagaaagagaatggcagtgacccagagggggcacagagctacttcctgctcagggagtgctgggcagcctcctgcggsggggagaggggggcattgaatgggcccttcagagaaggctgggagctcaccaggtcctgaggaagaggagggactgcgtgcaggaagcctcaaggcacgagccagcttagcatttgggggaactccaagtatttggtgtatacagtgtctgcagggtgcctgggcaggggtgttgggccaagcggtgtggcaggggaccatgtgtgctctggccaggggcctkgacctcattctgttggtggtgagggcctctgcaggtggggagtggcaaagtggaccaagaccgcctctcctccactatctcccctccctacccctgctctgtccttataccccaggccacagtgaaggacattgggccgaggccctgctttcataggaggaagcaaagctctgcttcatgtagctgaagcccaggctccccattgtccaccctgacacagaccctctgagtcctcagttttctggtctgtaagtggctatgaagtctgtcttgcttctcctcccagagaaatcatgagcataaagagcctgccagacgtgtggatatgcggttttaaagattaaggcagtttaaccaaaaagaacaaaacattggctgaattaatagaagtggcactgggcgttcttcccgtcagcctgagttggaggtggggtgcctcccagcaggggctggcaggagcacccgtgtgcgctctgaccccatccagagggtttctgggtgccctgcacagcgggacaccctctggaggaggccctgtggggaggacagagggccagtaagaacactcagtggccttggagaagcaaaggtgtcatttgtcccctcccaaccaccctgtacttcctgtactgaaactgacagcaagggagactttggcagggagaactcccagtttagctcctcaagtgtttttgaggctgaataccagcctgacagcttgctggcctgctgcagggtgtggggctgagacggcctcagcgacttatcacagcgaccctgtgaggtgtaggtgcgtcctggtcccccattcagtggtcacagaagcacagtggggtttaagtgaccagtcagatctgcgagcagcggattcaagattccagagtctggggatctgacaccaagcaccttgggctggtaaagatacaaagtctccagcaggcacagggtggaagaggaggtttctgtttttaatttttttttgtagacaaggggtcttgctgtgttgcccaggctgrtcttgaactcctaggctcaagtgattctcctgccttggcctcccaaagtgctgagattacaggtgtgagtcaccatgcctagcaaaaaaagaggaggcgtcttgttgacatggattgagagaaggttgagtagctgagaaggagagagaacagcctctgtagaacaaggaggtggggggtgtttctgggtatggtgagcatggagcaaataggagagggagcccaaagcatgctggggccagagcctgcccaaaaggcctgtgcccagaactctgggcatcgtttagtaggaaaggggaagtcagtggtgggctcttgagtttggcagcrcccccgtgagagctgggcgtatgcaggcggacgctgtagccatggcagcaaggtcggcggtggtagcaaagggaacttaactcccaacttgggacatcttttggggctcagttcagagaaaaactgagcaagaaataggtcacaggttttaggaacggtattagagtatcttattttctggcatgtccaggaaatgccattttccactggatgcattttttagatagttgcttggcacttatgtctttgtcttcagaagaatggttttccggttttaaacacatatctggctgggtgcggtggctcacgcctgtaatcccagcactttgggaggccgaaacgggtggatcacttgaggtcaggagttccagaccagcctggccaacatggtgaaacccatctctactaaaaatacaaaaattagccgggtgtggtggcacatgcctgtaatcccagctacatgggaggctgaggcaggagaatcgcttgaacccaggaggtggaggttgcagtgagccgagattgcaccattgcactccagcctgggcgacaaagtgagactctgtctcaaaaaacaaacaaacaaacaaaaacccacatatatcccacttttctttcccttccaaaagagagtatatggatataatttaatcatttttcctgtgttatgtataattgtacaattagaaacaaccaaacattaaaaggtagggaattgattaaataaattatgcttgatttaccttttaatgataatgctttagaagaatatgcaatgttggctggacgtggtggctcacacctataatcccagtactttgggaggctgaggtgggcagatcacgtgaggtcaggagtttgagaccagcctggctgacacggcaaaaccacgtctctacaaaaaatacaaaagttagctgggtgtgattgctcacacctgtagtcccagctacttgggaggctgaacctgggaggcagaggttgcagtgagctgagactgtgccattgcactctagcctgggcaacagagcaaggctccatctcaaaaaaaaaaaaagaatatgtcatgtcacaggaatatattccttatagtttgttaattaaaaagtaggatccagatgtttgtgtagtataatttcagttttagcaaagataaatattaaaaacttggaggagtacgttatgtaatacaaatgttacaggctatctctgagattaagttaaaatttttcgatccctgagtaaataactggagatataaacatctcttacaatggacattaatttgatcagagaaaaaagacagtttttttgaaaagctgtattactttatagacacagctggtatctttattctgcctgagtctcaccatctccactgcaggaggcagctgggtcatgttaagggttcctagagccccaggtggcactcttctgtcttccttgtctttaacatccggaccacaccttgtcaggaagctgagtttgaatctcagccccgggctcgccagtaggagttcttgagtcctgggcctggccttggactcccgttgtgaagtgggagccagccttgcaggtggctgctcaggtgagcatgtaaggtgcatctaggtggctggggcctggggctacatcctgaagcttacctgcgccttcagccagtggctgctgtttattccagcagtgaaacccaaccgtcacattccttgaaatacctttaataactcttaccaaattttgaattttcagtgagtttgaccttgaccatctgtttgaaagaaaggcagacacacacccacacacacccatggtgaaatgcaggcaggatctgacgtcctaggctgagaaatgctggtctcctcttttcctatcaacactgccctgttgaccatgcaaggggcatggagatgccattgtcccggggtcagagggttggcagggagaattgctgtggytccggggcttcctgtgtaggccccagggattgggactggcctggctcagagcaggagccacccagggagcaggggaacagccttccagggcctccctggtccagctgcctgggcctgcrggctcttctgaggacagagccctgataagtgagggtcagtgcccaagaaaaaaggagcattgttagggggtgggggccgggggaacagccagggcattgtcgccgagccgggaggctctgtgtgttccgtggctttcccagctctctgacagtcacaagcactgaggtttggggcttccaccccttgacagcaggtaggtccctttttggcagctgtcagcatctctcagcccttctctgctctgctctggggggatttttcttggcatttccaagttctgggggctgcatcctcccctgcggtattgagatgagtgggagagaatgcggtrcgggttgttggtaacgatcccagagcccagagaataggggcagtgttcctgggggagagccctcacccggcccctggggtgctgagcctggtragtcatgaggggtgtgggccacagaacgccggggagagtggctgggggttagggggtgtggagaggctgccaccagcaaacagcaagagccgtgggggtcaaatggggcacgtgctcccaccagcctctcggaggaggtcacgtgtttgtcattgttggctgtgtctgacgtgcgggaaagcagccgtgaatactgaggagcctgtcacatttgttctctcagcatctttggtttatcttaaacctcagtgagatgtttgcagttcttctcacgctgtcacagagcatgaccttgtggcctcaaccggatgccctttagacattgcagtccactgcaccatgtggacctcctggggcagggctggttgctataggagcggcccttcccagtaggacggggacagtgtccctccggttgtggcctctgctccccgcagctcttgaagttaccgaccttgggctcctgggaccttgggctcctggggaggggcaggtctcactgacgccaccattgctttcgtagccctttcttggaaagggtggccttgggcttggcgagtgctcctcccacctgtttccaaactctgaggatgctcctcaggaattagaacaattcaaattagtcatcacgtgccggagtcaggctgggaagaggcagccacttggcaccacatacatccacctgggcctgccacccttagcccaggccttggacctctctggtctcctggctaggccctgggcccagctggtttctggtgggaggtgacaggcccagtaactgaagcaggaggctctggtccagaccgacctgggtgggttraaacctgcctctgccacctcctggtacccaggagggtgaggcagctgttcacggtgctgtcgggcaccaggccctggacagccatggttgttcccattctgggcctcatgcagygcctggtagaccactgcctcccactcaccagtgtcacagcagccagacaggtttctgcggcctgagccccctccctccctccctcccgtcctgtttcctaggcagcatggcctctttggccatttgttgacctcccattccccttggcttctcagtgcagaatttccatagcacatcagtctgcactggtgatttggggctctctggtgtacatgtgcagatatacacacccatgggagatgagggaggcattccactgtccttcaaggctcagcttacctgccatctcctttgagtcrgcttttgactgcccagcgtgaatacctgtgcctgcctttgtgtgctcactgcactcttttgggtcattctggaagagcctccattttattttgcctcactggcccaactgccaaccatgtctgcccttgaggccatccctgctgccctggtgcagcatgaagtccacagcgagtgcctggtctctatttgttgaatgaatgtctgcaacgtaatgtgaccaaggtcccacagatcagcatcctagtgagctgagagctcaggtgagctcatctgtgtgtttcagagggggtggtgggcagaggacagcaggctgttgtcctgaagcccctagaacctagcggagaagaggcaggacccaaaagaaggaggtgtgttcaccctgtaggacttgctttgtaggtgcaggtgcccagaggccaggcccgtcagtgctacctggggtggggctggagaagggaaggcctgccaggccccataggtgatgggagggccaggacctcaggttggagggaaccactgaatcctcggccctgtggtgcaggcccacacagggcatagcccctgggcactggcactgcccactgcccactgcccgtgtgtgctggggccatgccagccttctccgctgctaaactggcttcttcaccctccctcagkgggcacagctgccgcttccatctcagtgtctgcttctcccttgcttggtgggtcattatgtgcccacttagccataggctttcactgagtccccaccttcatgcaggatgtgggaggtcccrggggcccccaggcagctcaggctggcctgccctctagtggggagcagagcagacagatctcccagcccagkgggggccagctgtggtggagcccgcctccccattctattcttggagaggaaaagcacagaaatacaggagtgaaggcacagactgggcagaggggccggagtcgccctctgaggaggcctgtagggcccccagaagagttttctgggtcagaatcaagagactcaggagcctttttgcattttgtgagcccagtcactttgcctctggtcagggtaggttttccagagcatcttcctgctccgacagggggtgggggagtgttgggggtgggtggtttgccatgggaacccccggctgctgcaggtgctgtgtggctgaagccacctcccagttcagtgtgctgggggcaggatgtgggggagggcacctgggaggaaggtgtcggggcagggcttaccagggacccatggggaagtattagacggcttttggggctacactttggatagggagctgggggctcccagcatcagagcccactctttctcccccattcctgagtttggaaaaaggctgccagctggtgcctcacccctgcccctcaccagaagaggtcctgtgcttgccccctgccccatcctcagtccccagtcccacagctgctgtgcagtcctgcttctctttctgtctcctcccctgcatcattcctgccctagctctagacctctccacctagctacccctgtgctgcccgagagccctcctgtgccccaccacacacccacatgcacaggcacgcacattcacacactccgttctcttccaggagaaaccctccctggttcctgaggccctggggaccagtgggtgtgtgtctgtctctctctagcgcctctttctcctctctgcctttccttagacacgtacctcttacctcctgtctggcctggcttcctccatgaagtgctgtttggttttctcagcaggagcctcccagccccaaggctcccactgttcctctaccagtcctgtcctggggccctcactcctgggtggtcactgttgactgattactcatcagtggtccctctctagaccctggttctgatgtctgtgctcagcagggctggcccagaggaggtggtggggaatgttggggggcattggctgttgtggggctttgaggaagcctccttccttctctggttaggaagttattgcagcagatccagcttttcttattctccttttcacaaggctcacaggtcacatggctgctgcctcagagtccctgaggcactgctgtgccaatgcacagttggtttatcttaacatcacccaccccaggaaacctcccttgaccctgtccctaggcctggctgagatgaccttcggtcctactctcacctgtaggattgcaggaataacaaatgacacttaatcacaggcctctgagcaaaaactgggacccaacaaatttgagtgtgctgatttcatttgtagaccctgggaaaaccgatgcttatacctttcccaagccctggcagggcattggcacagatctgctttcaccctgagtctctctaggtgtctctgtgtccatgccttctcagcagctcacaactgctgcccagggagatgaagcccaccagctcctttgctaaagggctcaccccctagagaaaagggctggctttgcagggtgcacgatccgatccgtgctggcctttgtcacccgattccctgagcagctgctcagagctgtggagtacgctgcagtctgcagagtgcgatggccccttcgtgagtcccagcaactcaccagggtcacagccagagctgggtggacatrtgccttctagatgaggctaatcggaagatattcaagggcatcaagctgccccgcccagcatggtgtgtatgtggtccctgggggacttcctcccattgagggtggggcaggtcagatgtgggtcagtaaatttctgtgacctggcagcattctctggaattctcccaagtgagtatgcaagggtttcagtgtcagcttcttcctctctgcaaatctctgtgcaagtgaacatattaaagtatctgagaagtcctgcaggaaagcttctgctgctgcttagcttgacgcaaccgagtctttgcaaatgattttgagtactgaacttccccttttcatgtgatgtttaaaaggttgttaatgctttattattattattattattwtttgagatggagtctcgctctgtcgcccagcctggagtgcagtggcgtaatctcggctcactgcaacctccgcctcctgggttcaagtgattctcctgcctcagccttccgagtagctgggattgcaggcatgcaccaccatgcccagctaatttttgcacttttagtagagatggggtttcactgtgttgcccaggctggttgcaaactcctgaccccaagtgatccgcccgccccagcctcctaaagtgctgggatgacaggcgtgagccactgcacccggctgctttgttactattatatcaaataccagtttggaaaaytscctcaaggaatgctctcttcggattggaaagcaatgaatatagaaagagtacagcttcagggcttaaataataatctatgcaggctttgtaggagtttgagtcagagtttccctccttattgttaaaaaggatgcatagaaartttttttgacttggagaattctttgccacttgtggccggggctgccagttgccattctagggggaacatggagataaagcraacattgaaatatgttttttattgtcagcaaaaataaacatcccaggccggaagccagggtgtggaagggaggagtctggggacatgaagtcggaatcccacttggggatgggcacttattctcttaccaccacctcttggagccagaccaggaggccttaggggggtctatggccctcattaaagcccaggcccccagcttccagacaagggaaatgatggctcgaggtcccacagcaagtcagtgccaggctcctgacccctggcccgctgctgtcttcgaagcatcatggtttctgaaaatcttacctaagtcccttgttccatgaggccataaaaatggcaactgccatgtatgaagcgcttacagcctgtaccaggcaaggtgctgacacctcacctgtgttaacttccacagcggtctctccaaagggactgaggcatctaactccctcactcatggccttttgccagcttcccccactctgaggacactgactccaatcgtgcccccacctctttgtcccccgtcccctgcacccacgctggcctcctctgctcgggacccctgcacttgccttcttcttagttcagaacattcttccccaggtctctcctgggccttcttcttgcccaggccttccttagagaggccttggattcatttgccagtgctgctgtcacaaagggccacaaactgggcagcttaaatagcagaaatgcacccctcccagttccggaggtgagaagtctgagatcccaagtggggctccttccgaggcagcggggcctgttccagccatctctccctgctgggggtggattgccagccatctttggcgttcccgggaatgtagaagtaccgccctcatctctgccttcatctcctcacgatgttcctcctttgtgcgggtctgtgtctaaatttcccctttttataggagcaccagtcatcgtggactagggacctacctgctctggaatgacctcatcttaacaaaggtcatctgcaaagaccccatttcctaaccaggtcaygttctgaggtactaggggttaggacttcaacataccgttttttggggacacagtttagcctgtaccaggccttctctgacgagtgcccccctttcctatcatgccctctgcacttcattgatgttgcagccctcggtggtgcctccagtcgcttcctttgcttgtttgttgtctgtctcccacactaggctgtgagtatgagcactgaggacagggacctggcggtcatcttcacgtygcatcttcagagcttgagcaatgctaggcacaaacttactctgttcacttaattactcaatgaatgagtgcatgaatgaatgaatgaatgaatgaawgaaagaaaagaaaacaagtcctgttgtctttcccatgcatcactcacacaaactgaggctttgagaaaaccagaggagagtaaagaacaggcttttgtgtgtgattcatgaagcagtaacggtttctcttttatttacattttggataaagggcagaagcaagaagggtggctgtgactgcattcttgatgttttcagcatttgtcaagtgggacgtgtcacctcattttatttttgcacattccccagtcagctctactgagtgtaaatgcggggtgccgctctcacaccctcagttcccatgttggcagttggaagggagtgcagcctgcattgcgcgctaacttcgtgcttgccatctgggagggaagttgggatccaggtggtgcagtcctggatctgaaatcctctgtgggaagtgcagagagacagggtagctgggtttctggaagggggtagcagcctttgaattcatctggctgagagctcagatagaaatccatccctcgccacagctttgggacagtcagatgtggtgcaccgaagacaatctgctggggactgtcagtggcttcctttgttacccttgccttgtccactctcttgggcctgggagggtcagtgtctgtgactgtttgatccttactatgcttggctgtagaggaaggggcctgcaagatgctcatggcctgcttgggaggacaagagtcatgcccaggaagccgtgccagtgaccaagggtggtggctcatctcctgccttgtgtgcttgttgtcagagctgtggcatcttcagccctcaaagattgtggcctgccggcttggctaaaagcacagctgcctggagcctctgtgccttttgggcttcctggggcccatgtctcctctctgcaaggtgcaccctggggctgaagctcgggtggctcgggtgtccttgcctgctctgttgcccagagacggctttatttttcttaccctgctaggcccagggcatgtgtggcttattcctggggctgcttgggacatcgtggaattctttaacctgaagattctcacctctcccaccataccctccagagtccaacacagacacaactaagctcagggtccccaagggtccagaccccaggtggaggtgaggggcgggcagtgtgaggtgttggctctagggaagggagtggtaagaaaacatgggcctgccgcttactctcagtgaccttccacgagttccctcatctcatcatgtccttttttcggagcaaagcagggataacatgtccttggagggtggttatggaaatgcccaatgcccaatatatactgtatggataggtgaatggcatgaatccctccagctttggggaatcaattcagtccatgttggctggtttctagaacaactgggcatgatgccaggccacacaggggccacggggaggaataggacatagtccctgtcctcagggagggggcacaggctaaggagaactctctgcaactcatcagccacgtaagctcagtcagcttgagcgtctctgttctccctgagtaggcaccactgcgaggaggcagtgaagtgttctcaatgggagggaggagccacagccccatcatcgtgcctgggacgctgaggcttagaaatgccgaagctgaacctgaaggcggttactgtttggcgttagaggtgggagatccaatgggaactgtgattgctgaggttccggagggtctgagagctgacatccgcttggggaggtgcctgcagggggcctgctctgggccaggcttggtgctaaggcttcaccaacactgtctcgtggaatgctgatggcagctgtcatcggctgtattgtaccagtgaggaaacagtgtctcaagggggttgaagatcactgactgaaggcccaggtctgcccacagctgcctccacccctccattgcttccagtatctgggacttgagttccaaagccatccttggcgtgggcacacagtgagcagtgcctggggagagattgtcctggctggagagctcgtcaacaggctgagcgaaggtgttagaacaggctgccctgtacctctgggggttggtttccggctcatgtcacagtccagtggagaccagcggcctctccaagcagtgactcaagaatctgtgttcactccatcaggttattctgtcatccaagtctttttcgtcagccacatgaatggggtctagggaaggcacgctgttcatcatacacttgaactagcttggcctggaagcacccactacgtctgctcccattctgttggccaggacgcgtcctgtggctcctgtgcgtgtgcaagggaaccagggcatgttgggcgtgtggctgtgggagagcagcctccgggtttctggcgggagccagcaggtgcatggacccacagtgccggtttcccacagaggtcctctcagtgcagaaagccaaggaccagcccctttttttcccactgctctctgggtgacttggaaagtactgaagcctcagggcagaggttggagagaggagagccaggattccttgggcactgagagcagggaagggttttcagtgagccccttgtgctcagccaaagcagctgggtcaggtggccctgggtgagactgaggttgtcacgtgtgccatttggtgggaatgggggcaccagttggacagcagcagaaatcatttctgttttctgttgatgactgtcttgcttactcagtgactagtgcaygggctctgagatctgcagaggagtcctgaggcacgtgtacacagttgtccacgtgcgtgcacatgttgtagaygtgtccctgtgttggaacatctggagtgtggttctccagttgtctagcccagagtctgcctccctggccccctcccagctccttcatcattagctgtgtggatgaaggcgagttgccttggtgtccccatctgtacaatgggaataataattggctctgcctcatggggtcattgagatgattaagtgagatagttcatgtgaagtgcgtagagttgggctgggtgcacagaggtgctcgatggatgttagttattggctggatttgaatctaagcctgtctgactctcagactccaaacgtgtgctcttcctagagactgctcagttggtaatttacaaactttcagtaagtaaataagacatttcactggttttaaatttctgggagcacatgatgagcagtctccctttcaccctgatcccacaagccccctggtcctctcccctgtggtggctgccactctgaccagtttctagtgcacatcccaagatactctgtgcatatccagtaagatctcacttaacgtcttcgataggttcttgaggactgtgcctttaaatgaaatatataatgaaaccaatttttttctcactgttataaaaaagtgacgttgaaggaattgatgttatttaaggacctgctgtacaattcagttgatactgcactttccaagaacctatccccaatgttcagtgaagacttactgtacaagcacatgttgattttgtgtaacccttttttcccctccccatacatattctagcatggtatactcagtgatcggccccttcttggagatctttccaygtcaccacagaaagcactccccgttctcttctgtggcagcatggtcttccaccrtatggatcttcataagtgattcagtcccttcttgttggacttttatttagttactaatttttggcgattacaaacagtgcagcaatgtgtgtgagtgcatatgtgggtgagttcaccctgtgagatcagctcctggaagtgagactcctggacgagaaaggttatgcatttatattgtgatggatattaccaacttgctgccgtcgagacggttgaatctgcatccccccagccctggccgatacagtctgttatccgtctctctgactttcaccaatctggtacataaaacatggttatcataatgtagttgtaatttgcatttgttgtatgaatgaggttgagtattttctaatttttatatgttggaagccttttgtagttaattttctgtacttaacattcaaacatatcttttgttcatgttttctgttgtgttaggttttctttttaaaaaaatcagtttgtaggatcttaatatatttgagagagattagtcatttgtgatataagctgcaaatataatacgtggtgttcctggctaagaggattcatgatcaaaccatgggttttccttaaattgatacataaatataagtaattctccatccaagtcctattctttttttctttttttttagacagggcctcactctgtcacccaggctggagtgcagtggcgcaatccgtgcttaagccaccctcctgcctcaacctcctgagtagctgggatgacaggcgtgggcgtggtgtgcaccaccagcccggctaattttttatatttttagagatggggtctcactctgtcatccagcctggtctcaaactcctggactcaggcgatccacctgcctcaaccttccaacaatcccatgctgggattacaggcatgagccaccacacccagctccaagtcctgttcttaaggatgtgtaggaaaaataaatgagcatgactggtcaggaaaattgtgaaaaagggaggacctagatcttattggtattaagcttatcatgaagcaattgtaattaaaacaatgtgggaaaaagaaaaccaaacgaaatcattgtgatattggtgaaagacaagttaatgaagagtccaaaaaatgtgagaattatgaaaatattggcatttgcaaacagtgggtaaaagatgggtaagtaaatgttgttgagacactggagtgctcatccggaggaaaacatacacagatgcacacctcagtctttcactgaaacaactcccggtggatttaagatttaatgataaaaacttaaaatgtaaaaatagttgagaaaaccgtgggctgatttaaaaaacagtctagggagcaaagatcaaaagatgaaaatatttatacatttgaattacagaaaagtcaagattttctgcctggcaaaaccaccacaactaaagtagaaagacagcaacgtgggcggcgctaggcaggccttaccactgtctgcttgcccccacagcctccattcctgctcttgatttccgggttggggtgccagtgccaggcccttcatcttggagaactctgcaaagctgacagtggtgtgctgtgtcggtggccggcaggatggaaagaccctgattccagccctggacaggttctcgcttcctgacccaggtggctctcaggagatggcgttgtggttgaaaacttgaggcctgccagctaggatttcagaattgtcctgttctcctggaactggggcaagtctgggttgttgacgctgtgcttgtgggtgcttccctgcctctggccccctcagattgtatctcggaccacatgatagctccccccagcctcaatccctgcacatcaggaaaggacgtctagccagctgtgttgtcggcccactccccttcctgatgaaggcagaaggctcaggagcctgtgtcccggagccacagggacctgggggtgttgggggagatttgctggttatacagcctcagttcggttgttttgcctcttgacttccttgcttcatgtgtaaaatggtgacagtggcctctgcctcctaaggacatggagattatgtgctaaggagattaggtctgtcatttgctcactgcagcacctggaatataagggtcccggtagttctggtggaggtgattatcagaatcatgctggtggaaagccaaagaaggccagaaaggcctccgctgaggccagagaacatccagcctcatgtgaggaagaaagtcctatttgctgacacctgtacagcatggtcagctctagtcacagagggaggtaatcgatggctggccctggctgtgtgctcatcgcgactataggaaggatatttctttaccctcactccacaggcraggaagcaggcttggggaggggagggatgtgcccttccccaggctgcacagctggaggctcagcccctgccctctaacccctgggcatccttctgcctggggagggagcacctctgtgcttgaggtggcttgggaagaagagcactggccagccatggaggagtgctgtgggcaagaggattccgcgagttccttcctccaggcctggcaacaggaggttcatgtgtgggatcctctccgctctccccgcaacacacacagggcggtcaggctttgttacgtggcttctgactccccaccttgtggatccagacctgccagcccttttatgctccctttttttctttttctgctagcctgtgattcgtactttccccccaggacaggactagattggtgcctggcaacagaggggaggggttagctcctatcagctctgactctggcctctcaggtgccactgtgaacaataacacagatgaagcagccccttggccaagatgcacgggatcgagggactcatctggcaggttgaggggactgctaggggtgagctttcctaggatgctggggaatagccacgtcgtgatgtggctctatcaaggctcctgccttttgctcctaagggctctgacaagttatcttccccttacaggataaatccccattcctctctcatccaaatactaataaactacaatgtgaaaaaaatcatagctaaatcctgttctcaaccttgcagttacctgtcggggcctgtttgccttaatctgcttttctccccttccctttcccttcccttccatccttcctttgtttcaacaaatgaaaaagaaaagcttggggtagggggaccagctattttatgaggacagatttggttgtgctgtattaaccaacagcctcagaatcttagctgaaaaccgtgggttattccgcactcatgccacatgtccacagggccagctgggggctctgtccatcttattcactcagagatctaaaactgagcagccccatctggaaggttgctggtcctgcaccagaggggagagagggctctggagaccttactcctgcagttacatgctctgcccaggaaacggcatgttctgttttcactcacagctcattggccagawcgagtcacatgatcacccatttaccagggaatcaggaagtgcagtcctgccttgtgtccagaaaaggggctgataggccgtgtgcggtggctcacacctgtaatcccagcattttgggaggccaaggcgggcagatcacatgagatcaggagttcaagaccagcctggccaaacatggtgaaacccagcacatctctacaaaacaaacaaacaaacaagcaaaaacagaaaaggggctgctatacccacagtccttttattttcatattctgggttttcttatcagccttttccacagtaaatgttggttcatgtggttgtaattcaagcacctactcttatctctatcaagacctcttcattgtcatctcagttactgtttttttctttgtttttgtttttttgtttttgttgttttttaagagatatggccaggcacagtggctcacgcctgtaatcccagcactttgggaggctgaggcaggtgaatcacttgagtttaggagttcaagaccagcctgcccaacatctggtagagatgagtagtgaaacccatctctactaaaaatacaaaaattagctgggtgtggtggtgcacgcttgtaatcccagctacttgggaagctaggcaggagaatcacttggacccgggaggcagaggttgcactgagtggagatcatgccactgtactccagcctcgacggtagaccgagactgtctcaaaaaaaaaaaaaaaaagatgtggtcttgccatgttggccagggtggattcaaactcctgggctcaaatgatcctcccacctcagccccatgagtagctgggattacaagtgtgccccactgtgcccagccacaccatctcagtggctcttgactagccctttgtggtggcatgcccagcattagccagcaccccgttttcacacatgctctctgtgtcttttctcttgtcaatatgttgtcagtgactctccctaggccagaagtggccttcacttgttgatcatttccttaggccagcatcctgggagtgggtgtgcttatcctttgcctgctcttggacctggccttccagcacccagtgttgggaacgcagaacaggactggcccatcctgagaactcagggtcagtcctattcttaaggagctgtgcttgctgaatgggtgtagcttttctgggtctaatgtcagctcgtaaattcccagaactttggctctgcaaggtagcaccatcctcaggccatttagttgtcttgaccctttatcttctagggagaaaagttacccactcttatgccttcacgagtttgccgtttcttcccattatccgagtaattggaaaccagttactcagaaatcagggaattgggtcagagagcattttcaacagcttccctccccagcctggggcagaggctgctagggtgaccagtaccatccttgtcccagcctgctggtcttggtggcagccccaaatgacctttagctcttgacctctctggagcacctttgagaatgagagttgttcttgccagggaaaagactccatctcctcttctccagtcttcctttggaatcaaacccactgaaaacacaccactggcatggagtcctctgaggccaagctcgtttctttttctttttcttttctttttttttttgagacagggtctcattctgtcgcccaagctggagtgcagtggcatcatctcggctcactgcaacctccgcctcccgggttcaagcaattctcccacctcagcctcccaagtagctgggactacaggtgcacaccaccacacctggctaatttttgtattgtttggtagagacagggtttcaccatgttggccaggctggtcttaaactcctgacctcaagtgatcggcccacctggcctcccaaagtgctgggattacaggcacgagccactatgtccggccccaacatccttctggaagtctgtccatgaggttcccagatctgactttcccttctggagagacctgcttctgcttggcaaggcctttgaactttggcaatggcagttctgtcccagattctcagatccatggagagggcagaggaataagtcagacttcagccctctcaccctttattggggccattttgtctcaagcttggttgggacaaaacttttcggaagtttccactggtcagtaataataagaatagtaagtatagggaaatacaatagctgacatttattgagtgtcactggctaggtactgctaagagtgagtgtgaagttgtgagactgtgacatgttatttaaccaccctgtgcctctcatgagtccccgtctcagactattgtgagaattgagcaactcagtgcatgtgaagtgcttagagtagagcctggcaccgagcaagtgtgcaagagctgggtgctagtgctgggatcgcgaggcttcttgctttaaagacaaggaaactgaggttcctagagggcggtggccacacagccctccccattatctgagtaattggaaaccagttactgagaaattgaggaattgggtcagaaagattatatgataccgtgggggaagagcagcccccagcgcaggagcaggagacagtggattaaagaatcagcatcataactggggttacggtgcaatcctggagcgacgtgcaaagggttctggggctgtgggcaacacaagggagccactaattcttcctgtttgggctgaggtgagttgagaaatgtgaaagaggattgaacttttgctctgggactcataacaatcctgtgaggtgcagggaagggtgagtagcatcctcattttatgactggggaaactgaggtaccacacagctcagtgacctgctcttgttcagaagcagtggattggagatgggtttctaggcctgtctgcctggcccacccctccccagttccagatcctgggagagacagggatagtgtcagggcctagctcagcttggttaccaggctgggtacgattgggttaatcattttggaagtcaaagaggactctggggccactggggtttgcaggcctttgtgccgtctcccagccctgcccccacctctagtaagtctctgccttcgtccctgagggaaacagtggccccttgttttctctgagttctgaactccaagcgccacacagagcaggatccagcatgggccctgcgagatggcatgacttggaaacggagtgcccacagacctcaggccccggcgggcagcctttcattgagacacccttgctcctgctgggagggacaaaccagaccccgtcctctgaggagaacaagaagtccctgggaatgttcttttttctgggggcagagtgtggtcagaaaagcagaatgacaaccttgaaatgagttcctgtccccatcgcatctgggagacctgcctctgtggtgtccttccccccgggcatccccctgcacagtgtccttttctccgtggcctccccagtctcaggagctgggccctttctcctgtgggggccgcacccaagggcccatctcttttctagctagtggagggagaccgcagcctgtttgcagtgtgttcaggggacagaccccttcagggcagttgtggcatgtcaggcacctgaggaagagccactagagctgccagcagccctgctggtacccagcacagacgccacagcgagaggcggccgcacccgagagcagcccaggcctgatgtgtgtcccaagctgctgttctcacagaagggttttactggcatgaaaatgcttggaaaatacacaaaggagggtggcccgtttccagagctcagctgtttaccttcagtggagcgccggggatgcggagagcttattttccaaacagctgcggttgtcaggtctacgggcctcaggctgatgccaggggaggacaccaagggcgtcccctctgctcacctccttccccagcgccaagggaaccccacagtttctcccaggcagggaaacctggagggctgtctggagatgtgggtgctggtgggcatgggggttctgtgggcccggatgcgtcgctcctgtggcccggctccccctgcgctcgtagctgtcttggcctctcgtttgtggtgcctgacccaccgaagccacaggctgtagtggaaatgggttggtgtttggctctgtctgagagcccagtgttctctgcccatggcctctctaccttccttcagagtctgctttttctgggaagaggtattgggtggagtgtaatttggaatctgtgaagagagccatcaaagctcttgcagtttcttgtttctatcaaaggggaaactgaggccccaggggatggtgagcccaggtcagcgggctgctcatggagactgacacatgggcattgctgcacagcctccatcctggccgcttcacctgcatggccttgcttggtcattttccttcctgggccgttggtgtcctggtctttgcagcagggagcgtcttccccggcccctgggcttgccgtgaggatgagccggcgccaagtctcaggagatattgggaagtgtctttcccttccccttcctcacccaagagccccagagatgggcagcttctcagctagcctggttttggttttattttrtgttgttttgtacacaggcctgtcaccatggggagggaacagcattccttagtagtttcttattgtgaggtctaaaggatattttttttttctatataggggaaatcccttaacatctttcctggcaaacagtaagaaagaggagttaaagacaccagcagacaagagctgctgcgttccgggggtgcaacggagaggagtttagtaagggaccatcacagggtgtgggcaggcccgagagccagcacaggacaaagttccccggtgctaacaagccctgagagctgtcaccacccctaggcctgaggggactaggggaccaaaaatgtacctggagccataggggaggcggtagtgttgagagaggggctgccctgctccatgggggctgtgactgctgccagaaatatggcagggggtgggggcgtgaggatgctgcaaatacattccctccctctctccttcttgcccatcttctgctgtgcctccagttggcccgacttggccagaggacaaggcagccaggtgattgtggcctgagaggacagctgcctagggcacagagcaggcgtggggagcggggttgcaggggcaggcagcggggaatggagtgagaagcgcagccttagatctgagtttgtgtccccacttcaccgccttcctgctgtgagaccctaggcaggttttaaaagtctccgtcctccacttttctcattcgtaaaatcacttctcatagtggttgttaaatacaatgaaagaaatgcacgcaagctttgagcgtggtgcccactgccagtgaccatttgtagttgtcattatgatgtctttcgtaacatttttaaaacagtcagccttgaatcctggagggaaacccacttgggggtggggatgagagcaggggtggggcttgtggccttctctggcctctgctaaggccagattgggggtcagccaggtgccgggctggcgccgctgcctccgaggcactggccttgcaggtggtggtggccgcgtgccgggagggagacatgtggcgggtcaggaagcgggggtcaggctgccctggcttttggcaggtgctcctgtcttggggtcaggtgacgctgactgttggccagaggctctggctctcttggggcctgatcttcccaacctcaggcacttgcaaaaataaacaccttccctggcatagcaggagagcagtatggaacagattgcaggcagccctacgcgccttcgcttctcccgatgagcccagatttcagtgtgaagtgcaagtggctggtcgctcaaagcggcaatttctagattcctgaggaccacagctttgctaaggctttttatagattagcagaagcagtatccacttagatctaagttctgatctggctgtgcgatgttagtcatttacataaccccttggaaccctagttttcctagggcagatggggtgtgttgagaaaagcctttctctgtaaagccatttctcagcatcacttgcctggcctgttgacactattgccctgattcctcttatgtgtcttctgcatcctgggtagcatggggcttggggaacagaagttacaaacgtggggtgtgcccttgaggagttagcaggagagaagagttgtggggtcttggagggtttgtcctgcttgtcctgtctgtattttccatgtcagccctcctcctgccccatctccagagtgctacagggaggctcgagkgtcctctggtgatatgccccagggtggacaagaggatgggggcagtggactcaggtgctgaagttgttgcttttktctgtgttccctgcctcacagctgaaccttagccggccgatcgaggagcagggccccctggacgtcatcatccacaagctgactgacgtcatccttgaagccgaccagaatgatagccagtccctggagctggtgcacaggttccaggtgagtgaggaccatgcagcccttggctgtggcattttcaggaggaggaggggaggccctggaatggccgtgtgtgtatttagggcggtagcagctctctggaggtatagtctggagaaatggctctgccactggcaagacatgggctcgtgsgcaggtacttctgtgcggcgtcagtgtcctcgggtgtagcgtgggractgaaccagggcatggttgggccgtctccaccccctggctgtgtagacacggtttactgatgaggcatcgctgagttccagtgtggcctccacgtcctcagcacaggcatgygcaaccctttcccctggctcaggtaggcacaagggatggaacccttctgctgcacttggtaaaggggacccccgagggcctttgaactgagtcctgccttggtggagaaccctgcctctgcccattactttgacctgggtactcacctttgagcatggcctgaggtatcttgctgagtcccttggctgcttccctctccccacaccacttccccagcggcctcccaggtcctgatcgcacagtgacctgcccactgccytggggttctcatgctggctactgacttgtcctgtgttctctctgttgtggacaagaacgtgattctgtcctctagaaagcggctcagaggtcatgaaaaacaaagttgtattgtcagtgaaagtgcrgtcaagatggtagctgttttcaggygtgcctagtgggatggggatgcctgagatggggtttctagcgtgtgacaggcgcagatttggtgccctgcttttcttcaccaggacraagggaatcttacccgcctcctagtcacccggtgctgccgtcctgcygacactgttctctccccgtgtgttcggggtcagccgccttggccccccttgcttccttggggytctcaccccgttccttggccaactccctgctgcacattcctgcttcccaccaggaagtggccccggacacagaggcagcctgctcctggcatcccctgcttgggggcagggcatgtcccacgttgtgccctccagggcgtctgccctgccagtggccccaagtccattccacttgctgaacactgtctccttgatcggactggagactgtgggaaaaacatggtcgggctcctctgtgacctcgtggagcctcagtttccttatttgtaaaatgggtgctaggaataagaaaagctcagaccatgttgggaggagtgtgctggggttcgaggggaacaagacagaggagatgtgtgccctggtgatgtgctgcttcctgagtccctgccctgtgccagggctgggctgatcagcactcacccatgtgctacatttgatccccacagccctcagtgcagactcaccagccttgttgataagcaggaagtggaggcgtggaagcatgtgcagcttgtccacagggacccagcagagccgggggtcagtcttgactttctcaggtgagccgctgctcatcctgagggcttgctcttctgttcctctctgcctccaacctacacaactgtcctggggtgtggtcccagctgatcccaagtcatacagcgactttcctctcccctgagccatttgctcctgcctcacccccgtctccttcggaaggcccctgagtgcccagttcatgtgcctgtggtgcccttggggcttattctctggaggagcacagccatgcctgggctgccacgcagacctttggggcagggatggtgcatctcttgctgagtccatctgggggacgatggccttccagatgcctgattaccgttacctcagaaagcactgcagagcagttaccgcttaccaagccctgctcgaaagcgcttcatggcggttgacccacttgctcccatgagctgtaaggttcaatgattcccgtcctgtggaggaagaagcagctgcaggacaactagaaagtggtccaggtgggatttgagcctgcgctagcttgctctcctcacctgtcgtgtggcctctccagagatggatgaggcggaggacttgggagtcaaactgtcttcaaggcagatccttgttccaaaacttaggaaccgcgtgcctccccacagcctcagttccttcctccttgggtgggcaggttgctgggaggagtaaatgcctgtgggtgtaaagtgcccattgtagctgagtgccacttcatcacacccacacggttgctcttcctagagaccacatctcccagctagcctgggcccggagttctggaacatctgctcccaagctcttatccctcttgcccacttcccagacacacacacagcccacagcccaggcaagtgatgtccaaacagtgaatgagagtgcccgctgtgttccttttctgggcagaaaacaatattaacagggagcgtgtgtggagggcagcatggggccttgtggcttaaggctgtcaggcagccacaggtgcatttctcaggcagtgtcttgtctgggtcttgggggatggttgccgtgacctcaccataacctcccagcactgatatttctgggataaattttcatcaccgtctgtgcttcagtaagaggccggatatctgataaggtgggaagtttcctcctttgtgaggagaacaatcctttggagaaaagggtgcggggctgcactttccagaggccccaggagagaggaggcaggcagggttggcacagagaatgactgagaggcactgggatgggggctggggaagaggcttccttctaccaccggtcactgggctgtcagcattgatcgtccccttccctctgccataagatgcaagttcagagccagaccacatagacccagggaggcggacacttgacctcagtcgtgccctttgttttcagatttttgttttaaattttattctctagacattaacaaggaggcatgagtgtggkttgaggactgggagggatagggatgctataggcagaggcaggggaagcagcacccagagctggggtcctcccattttgttgtgagcagggaaaccgaggcaagatgctttgccccagcagggactcagcttgaagggccttctccacagtccatactcaggtcctgggagggaggaggaagtggtttggggctgtgtgggtggagaaaaatgaatttctgagatgttcctcagggccccagagcactgcactgggctgcctctgtgaaagttccggtccccagggagggaagaaattcccagagccaggaggccgtgcctgcttctggctgccctggtgggcaggtggaggctgtgggccagaggcttactgcagaacattaaagctgcttgtcacagaaccttcatcactgccccagagttttggattttttttgtttttgtttgtttgttttttgtgtgtttttgattggcttctaaatggcttggcttggagactcaattgggatgattcagttgtttttctgctccaaggttcatgtggagccagcagcctgttgcccctgaggctctgcctgaggtttggttctcagtgtgcagaaccaggcaggggcccccagggcctgcccacgtgggcaagtggggccggcatgccgagagggtccctgcctcaggctcggggacactaggggcctcctggcctggtgagtggctttcccaggggggcaacacgagccttctcctcgctgtggcgcccagagccacctgacaggtgtgggtgcagggtgggaagggaggggcccaccgtcctcttctgctgccccttctagccctggaattgcccctgaaggggtgctgtgattgtgatccatgggccatgtggggctgcctcgggggaccttcctggggttctccctgaataagcttaggactaagaaggaagtttcagtctcaactgctgcctttgccctgtctttatcagctggaaggacggtaattgtccctcagatgtcccctgaattcccggtctgcacacagactgctaggagagtgtcctctgcggcagcactgctgggtgccctgcccgcgagctcctggccaggaggagaggccagcaggcagacccagaactgacctcacggcccctaaagtgatgagttaggaaaaacacaggtctgatcacagcacagcttggcttaaaacatcccatgctttcttattgctgtgacactgaaggccatgattgccagcttgacccatggggcctcggtgatctgccccacccgctccttccctggccccctcagcagctgcccaggctctgatgtgtgtccacctcagcgcctttgcacaagctgttccgtcagctcagtgccccttcccaagaaatgtcctccctcgtgagctgattaatgacacatctctcgtcccaggccctgccaactttgcacttttccttcatgcccttcggaagttcgtaattctttatcagtggctattgtctgtcccttcactgcggcagggattgtgtctgctcccagcagctggtgttcccattgccgcctgcagtgcctaagtgtttgggtggcggcgcatgcccagtgctggkcatgcgctggggcggcctttcatggggtgccctgatggccttgcggagggaggacgtggctctgctgggctgcttggagcggggagggaggaggccaggagcgttaatgaggcagatggcgctgcctgatgggcatgtgcggcgatgtctccaggtgtcagcgaggttggagagggagcagcaaggccggagcttgagggctttttcatgccaggctgtgcagcttggactctatcctgcagggagggtggggcggggatggcggtgatatgatcagatataattggcaagagagaggccctgctwggaaggggagattgccagtgcaagatgaactctgagcagctgaggacactgtttactctttggagcccaggtgcgtccaagttgaagaaggagctcatggccccaggctcagtgttgtgcccatcctcagccccaggtgcccctgcatgtggtcctgagcatcccctccctccgctgccatgaaggctggcstctgagcagcttgagccttgcccagcctacacaggacaaagttgcactcacctcctgkctcctctcagtgtgtaatcatctaaagtggatctgggaaggaagctcctgccccgaaggatgccggaagagaatgcacacttggccacactggttcttctcatgttgtccctggaaggaaaccatgtgtagccttcagtagtgcctccccgaccccaccatcctcctgaggggacaggaagtgagtagggctgggagctggtgggagggggtgatgtttggggccctccctgctagtccgccaarcgaggccaggcttcgccacagggatagacagctcccctcacccagcacaggcttagctgggcttgcaccacgtggtcacggagggttaactacagctttgcagcctgaaatgacagccgtcatggcagagggatgagaaggcagtgaggcttatgctggctctcagtgtctgccctgtggtgacacggactcatccatctcactggacctccctacaggcaagggaacccaatactgcatagttcctttttcttcttaaaaacaattaaaataccttgtagggttattgttagcattaaactaattaaaatttgcgattcccctagtgcctggcatggtgtgaatggtgcacgtgtgtgtaagggtcagtcagccacgcttactgtgaatgcctggcatggtgtgagtggtgcacgtgtgtgtaagggtcagtcagccacgcttactgtgaatgcctggcatggtgtgagtggtgcacgtgtgtgtaagggtcagtcagccacgcttactgtgagtgcctggggtgtgatgatgcgtacgagccactcagtacaggcccggygcctagtgaaccatcagtcacygtggcttatgtcaatattattattacagtgacagtaggactactctgtcagccttatctgtggccccagctgacttgagagctctcagtcctaattggagtcagtgaggcagtgattatgaaagtgtccccaaacgggagatgcattctgtgctagggcagtggaaatgcctaaaaggcagggccaggtgggggtcagagggactcaagtgctgttcctagccccacccttcacctgctggcccacctgggcctcggtccccttgcctaccgcatagggaaggtgcaggatggcacagaacaccttcagagctgttgcgtctgcctccaaaggactacccaaggccgcggttcacgtttgccmcaaatgtgatttcacagctgcattgaatcaaaccctgttggcccctgatgtttattgagcagtcgccagcacagggatggagaggaagtagaagaaacaaaggtttttgttgttctaggtgttcgagtccgacttggaagataacatctaaacctatcagaggataaataacaccgtagaatctaagtgggcttgtgtcggctttgcctttgtgcctgctgaccagtggggtcagagtaagaaccatgggccccgggaaggggtttgtgttgtcaccagggagccatgggagggctccctattttctaagaatgtaccacgtgacccattctgccacgggcgttctcatctcttatgtctttggtccccatctcagtccctgagataatggaattatttccccatttttcaggaggagacaactgcggcccggggaagttaagtcacttgcccagggtcaggtagaaagtggcaaggtcaggatcatagctcggaggggctttggtgacagctgatggcactgtgggtggtgtgagggttggygatttcagggccaccttggcaggaggtcatcgtctgggattgcctctgacacagctggtgccgtgtgacgatgagactgctggccagcagatgctacgggaggcagagttggacgcatctggcagccctggtcccagagaaacagatcatgtcctgttctggggttgctgtgaggtcagcctctcgatgactgctgccctgggtcataggcgactcctcctgtggtggagacagccacacaatctgtccattgtgcaccaatgccaggccaggaatcgccctttctgcttcggggagggtgggaccattctgtgccgttagcccgttgcagttgcttccccttgtggaaagcaagcctggtccccaggaagacatgtggccctcttaccaaccaggaacagagctagactttgtgcagcccagttgggacaggggcaggagagggcaccccaaagcctgcgctctgagccagcatgtgggctgcagcccctctgcttgtgtgtggacggtcagggtttttcagctcaaggtctgggggcatgttgagttttagaaatatcaatgtttatcaataatacattttccccaaagttttagaaataacttttatgcacattatttctgggtttcttaacctcaacatgattgacatcttgggctggataattctgcactgctaggggctatcccaggcaatacagggtgcttagttgccttcccggctgctcattaccagatgccaacagcactccccaccctgcccctcatgacaaccaaaaatgtctccagatgttccctggtggagggagcccatgccacccctggtcgagcgtcactgcattttgtaagagatgggtccagcagctctgagagctcaggtgggccagtcaagttgtttctgatttttgtgtggacactgaggccccactgggtgcagtttctgggttttagtgtttggaatcacacaccaagaggactaacatcttgtcacttcttttcttcagtaatattagtacctgcggcagaaaggacaccctgttttctgtttcctcctggtttgtgtgagtggcatgacttcccaacgtgtttctgtgctgcctgtgcaggctgtgtgcccgtgataaagcccactgtgtctgcctttgtcttcatgtaataaatcccattgccacctcaccagccaagagcacagccggccgggtaaaccacgcgctgggcctctgctgacctcggccctctgggatggacagagtgaggcatgaggatatcctctgagcccctccctataggtccctgccccaggcctcccacgcctcctggcagccagccctggatctggccctggcccctacccgtttgtctctccactgatctgtgagatcattcatcagtaactattatgttcattcagcaagtcttagtgagaacttactgtctgccagagttctcctaaaagacattacagatgcaacaatgaataagacctggtggacgcagcccctgccctgctggagctgtatctgagtgtgagtgcatcggatgatgggaacaaaacataggtaaatagaggacaaggtaacacagccccagtgatggcgagtactaggaagaaacacaccgaggcctgggagaacagggaggtccttgttactgatcctctgaagagctgacattgagttgaggcctaaagggcaggacactcaggaggggagcaggcaagggagcagcacctgaccaggcccttcagtgaaacaggatggaggcataaggacccgcagtagctgggtgcagctggagcacggtggatagggctgtctgcagtgggctggcaggagccaggctgagcctgggcctggtggcctcctgggagcgctgggtagctctttgaggacacaaaatatcgtgccagctcccctctttgatggccccaagttgagccacagacaacgtgccattttctagtccccaagctctctgaggaggaaggggccctgcccattgcagcagtcagaggtcagggaggagctcctggggcggcaggacgactcccacttctgagcatgcccgcagccactgaagaggatggctgacatgtggaacagaggccagtgtcatccacggggtagatgtcgtagccaggtcacccctggcagcaggatctgtctctcttattgtgcacctagagcctgtaccagaaactagaagactcgggtggctggatgcagaggtgaggagcccaggggtcctctggcctcagtgacccagttggcctaggtcagcagcaccaccgcaaactgtgccctgattctggatgactgttctctccctgcagacactagtttgtaagccctgctggctgtgagtcacatttgcaaacccagcaatgcatcacacggacaaggcaggggagcccatgggctgccaggaggcattggcttattctgggaactgaaagtcagactcggccgggcgactgtgggccagggtggggtgggtggggctccagcaggcatgtcacctttggccttgatgtagggaagctgctcttctgtgtattattgtatacaggggaggggcagctgcataggcccacctgagcaggtgcgtgggaatgcatgtaggggttcagacaggtgcttagggggcgtggggctgctgctgaggtgggtggaacccagctccgtgtgaccttgggcaggcagcccctttcttgccctcctgttgttcagctggtagctgtgacagtgggccagatgaccgaccccttccagctccatctgcgtggaaatcccagctgtcccttcatcctgcgggatccttccctggtcgcctagaggacctgactagtgtgatggtgctgtgacacagcatgtggcatttgtcaggggaatagctctggctgggcaccttgcctgcctcccgctgacagaaggtggagaaagctcataaaagtttggtgtgaaatctggggacagaggggaggtattgttttcagtggcaggcctggaaaaagggggagtttgctgtctccaaataatagtgttctctttccttccagccctctcctctgtagcagtcagggttattttttggcctgaacaccattgttttgcatgggtcttcctgctggctcttgaacaacagtttccccccagagagcctgtggtttctcccagccgtggctcacaccacatgccaggcggctaagtgaggagcatgacactgtaatgcctcagtagcccccatgggaggatgacccgaagtgaccattgtgggtagcacccaccttcaggatgggtgtgcctgtgacctgcaggccacaggagacacagtggggtctgcatgcagaatcacattcagggtgccccatttgcgtgctcgggcccctgccctgctccgccccacacagccccttttaatgccttcccccaatctgaaatggagaatcatgtacagttcattcaccctggaggctggagcctggttgctttgaatcccttattctatattcattctgttcaccagggaggggatgggttgttgttggcgtctgctccagggaagcttccccagcccttcccagggctccagcgtttcccctaccccttgttgggcctgggacaccgagtttgaccagcttgcacatggactgtgagtctgatggatcctaagtgtggcttgccctgcgcaccactgctcggctctcagcagtcctgaacgagctggcacatgcatttggaacaagtttgtgaacagagtccctctgctgcycagccagccgcttcccatcttggggggcagccatcagttccagtggcctggagcctttccagggggttctgtgggactgaacagagacagtcttcctcgctgcacagcccctgtacaatggggctgtacggtatgccctggaagtgatctcatcttagtcttttgcaggcagcctcattctaactgctgcatgttaaacggcctccctgtcctttttaccaagccagctctctactggtgtatacctagggcatttctgatcatgttttagaaacatgctgtagtgaatagcctagtacatgtatttttgggtgcacaggtgaggaattctgtaggataaacacctaggaatcgggatgctgagtttgcgcattctgcattttggctgttgtccggtttctctctgcagaagcagtaccagttacactgccaccaaccaaggactggtccctttccaccaccttaggaagcgtctctaatcagtttaccttggcatggagtcacagagtgttggagggtgccaggatcctggcagtctcctcctcttgcctgttggttttgctgctgggagctccaggccctgggaagggtggtgtcatgctgcctcacttggcttgcccggaccctgaatctgggccatcttgcccctgtctggtgctgtgttctcaaacttcacttttctcttccgcactccatgtctgaccaccccagcctgagctcatgggtttaaatattggctcacaggagctgatagacctagaggcagattgcatcagagttttctttttgccagctctaccaaatcacagagatcactgtataaaagatgaaggcagcccatcagttcttcctgaacagtgaggtccagcacacatacccctaaggccagcaccacatctgacacaccaccaagaccgcatccatccccagctccatcctgtggccttgcaggctgctggactggtcactccataacccatagctgtccttgtcacttcccagctcaggaccctgttgctttagggtcaagtccaaactcctcagctggtccgtctcctgctctctaccttgtcctcacttttcatgttgagactgcygtccgccccagccctgycaggcccccagcaggcccgtgaatgtgctggactccctcaccccagacctctgcttttgctgtcccctctgcttggagtaccctttctcccctggcccatgcctgtggccctttgtggttgacatcaccaacctcagcaggctcctccccagcccccaaccctgtgccccccgcacccacactyctctgctcctttattgctggtcagccccacgcctctcctttgctcagccacatggccgccacttaggagcctctgggagggtggggagaatgtggctgctctatagctgaataggtgacatccatcaccacacacgcacgcacacacacacactcatatgctctcacactcattctcacacacacacacatatgctctcacactcatacacacacacgcactcactcacaagctcccacatacacgtgcttctcagaggctgtcactctttctgctctcgtactgtctgggaggcctcaggctgagtgctcagacgtgggagatttctctggaatacaaatgagggttgcttaagacccaagtgtctgctgatgggggagctcaactctcccaaggagccgttttagaaaagttaggaaagaaggagtgaggaaatgscctcaacacactaggactgaatccaggcaaaacagagaccgcagggaaccgcagcctcagaggacagctttgcttgggctggtggtcggtgcctgtcgccaatgcacagctgtccactgcccaccagggtgtgcctcctgctggcctccctccctcacctgtggtgggcatggatctcgctggcttgcaggcgactgggatgcgtgcagtgaccatgccgtgggtgtgctctgaggacagcaggccctggctcctgcgtttgaatgtctctgggcctgggaggcatctggctccgttcaggggcctaacagctctgtttttggtttgttcgtcacatcacagaatcaaataatctagaacttaagrggcagaaaggatgttataaatgaattattctagcccacacatcttacagatgggaaactgagatacagataacttaagtgactttcagaaacacacataaagtgaatggcagttctaggacttgtaacccaagtttcttgactctgcatttgtttcaacttgcacagtgccccaggacccacgcgytcgggttaagttagccaggtgtagctgggctgcaaaagattatctgacagtgatgggcaggcagaagccttggctgactgtcaggactgttacataggttgcacgctgcccagcccagtggtaggctttgtgaatggcaccctgggtagctaggcttggtggtcctgtcccagcgtacagtggatgctgctgcaacctccttttggctcttgagagcccacctccaaggtttacctgcatgcatctccaactccaaccctatgccagcctggccacctggcacattctgttgcacctaggcctagtgtggatttcccaggactatctgtggcatgtggttttctgtaagctgtaatcaacaggcaggtgttctgggaggtgccaggaagacttcttctgggggatgttcggctggccttggttgatgacaagttaatcaacaggggttggtttcacggttgcagtggtctgccaagagggttcattacttgtccttcccagaaagcattgcttggcctggccccaccccctccccatgtgacctgacctcccagggagaggctttgctttctgcagaaccacactttctgccttcgaaagtacaactgctcttgacactgttatgtctgttagtcctccccctgcaggggccactccattcagcagctgccttgggagccctcctgtgcataagtgcagtgctggccctgacacgctcttccccctgcgccacgcggaccctcctcacagaggccctgtggactgtggccttcagttatgtcatgtatttactgtcctaaggggtgtgtgtcttcatttgctttcatytgtcttgctccagggctgggaagagatgcagagcctctggtccagctgtggctttgagagaacaaacaaccagtgaggaccatgggttgggaggaacagtggaaakggagctgcagtctcagctctgccactctcccttgcgaccttggcctcgctaccactgcctttcccctttccaaaaagatgggggctggatgaagggtccatctgggttttgctagttctgaccatctttgcctttccctctgggaaaggaaatcgcaaactggatctactattttttttcttggatgctctacctcatgcagaccccaaatggaacacacccggcctccctggactgtcargctggtggcctcgccttggggtagtgaacatgagaaaggcttccctttttcctgaaatgccccagagcaaccctggccctagttagagttgagatgcttttcatttcgccaggccttccatgccttgggtctttgactggagggctctggagccagaggccctgggttcagactccatcttggccactgctcgcagggagagccctggccacctactaggtgctttgagccctactttgttttcttttttcttcttattttattttgagacagggtctcactgtaatgccccggctgagtgcaatgtcgtgattactgctcactggagccccgaccttcctggctcaagtgattctcccacctcagcctcctgagtaggtgcgcaccaccatgcctggctaatttttaattttttgtagagacagggtcttgctatgttgcccaggctggtcttgaactctcagactcaagcagtccacttgccttggcctcacagaatgctggaattacagacgtgagccaccacacctggccaggcctagtttctttgattgtcaaatgaggctgctaacgggatctacatagggttgttttgagggggaaacatgtccattcctgcaaggtgtataggtctgtgacccgtgcgtggtgagcatgtttataactcaccctggaatcttggcaggacccccgtcaagatgccaaggcttcaggaaccagagacttccagggtttcacccggcgctgggtacggaggagctggtggaaaggccaggccttgtggccctcagctgggcctggctgtgctctcaggaggagccaggggagtgaaattgtgctgagtgagcccagggtcgcttcctttcccatgaaagcccctgtgartacttttaacagccataaggaagtaatttcagttcttctgtcaagggtagaatcactggtgttagtggggtagctgagtgttaactgaacacacaggccctgatgcagtggatcctagagtcggctgggaagtttcctctgggtgtggcacgctgggttcgccttggtgctgacacctrtctccttctggagccaggtggtgatcaggattctagaatcctgttgggttcagtacaggaggctgttgtcatccccagctgatgctgctgtggccatgggggaggtgacggaattgtgccccctctgatgcttgatctattccacgtggaaagctggagtcccgagaagcaaactccaggcaggcccacgctgactttcaggcctgtgcttgccgttttttgtttgtttgtttgtttgtttgtttttcctgagacagattcttgctctgtcacccaggctggagtgcagtggcacaatctcagctcatgcaacctctgcctcccaggtacaagcgattctcctgcctcagcctcctgagtagctgggattacaggcgcccaccaccatgcccggctaatttttgtgtttttaatagagacggggtttcaccatgttggccaggctggtctctaactggctggttttgaactcctgaccttgtgatactcccgcgtcagcctcccaaagtggtgggattacaggcgtgagccaccgtgcccagcctttttttttttttttttttttttagttggagtctcactttatctctcaggctggagtgaagtggagtggtgcaatctcagctcattgcaacctctgcctcccaagttcaagtgattctcctgcctcagcctcctgagtagctgggattacaggtgtgcaccaccatgcacggcaatttttgtatttttgcggggggttttgctatgttggccagtctggtttcaaactcctgacctcaggtgatccacctgcctcagcctcccaaagtgctgggattacaggckcaagccaccgcgagccacagtgatatgtcgagttcactaacgtttagctttcaggtgctccctagcctttctggagatgcacaacagttcagtcacagagcctgtttctgtaggtgaccaggtgcactgcagtggcctggcgtttgacactggaatggctgattttgaatcctggcaaagccccccagctggttgtgtttgaccttgagccagtcacrttgcctctcagaaacttggtttctttatttataaaatgggaataaaaacagagacgttttgctctgtaaaccatggggctgctctgagaatcaaatgcaatattttgtgtcactgcccttgttgaaccagaaaagtgctacacttgtatactgtggtggatcattatgactatgatttaaaacatccatgcctgaggagccaaatcctggggtcttttgtattttcatttcaatttatacacccaagagaagtgaaaacgtatgttgacacaaaaatttatacacgtatgttcacagcggcattgctcctaacagccaaaaagtggaaacaacccaaattccttccaatgatgaatggataaacaaaatacactacaccatgccgtgaagtactatttcatcttaaagaagaacraagcactgccgcacgctgcaacatggatgcattttaaaacacgatgtgagcaaaaggagcctgtcatgaaggaccacacatcacatggcttcgcttgaaggaaatgcccagaataggcagatctacccagacagaaagtagatgtgtggttgccagaggctgggacttggggctgagagtgaaagggaatgggatttccttcggatgggatgaaaacgttctaaaattgagctgatcgttgcacaaccctgttaatattccaaaagcccttgctttggggtaaattgcatcgtatgtgaatgatatctcaatcaggctgtttttaataaaaatcctatgaggtaggaacaagtacaatctccatttacaggtgaggcccgggcttacaatgaggaaggcccagttaactgggcctggcggcctccagctccctggcatgcagtcccttcatgccatcagccctcactctacagagaagggagctgaggcccagcaaggaggaggggtttccaggctctgtgtggggtcttttcctcccttccagcctccccacccactggaggagagatttcctaagcagcgtgtggagcaggaccttcccagccctgccatggtacccgctcggcgctcaggccatgcagcccagtgggcagaatttcagcccctgggtcctgagtgaaggaaggagcaagctgttaggacgggcagggccggagcccgggactttgtctctgaccaaaacctctcagagtctcagggtcctgagaaaaatggggagaaaccctgccaccctctctgtgctgtgggggacccgcaaatacgggaaggtgctgcgagacctgccaggacttgccttgtgcgcagccgtccctgctggcttaggggtcagtccgggcccctgggcctctgccaggcrggtcacgcacaggctctcctcagagcacaggcctagggcagatgggggctggaactcacagaggtttccagtttccatgatgtccactttatctgtttctttttctgtcttgtgcttttggggtcacatttaagaaactgttgtttaatccaaggtcacgaagatttatgaccgtgttttcttctaaaagttttatagtttgggcttttacccaatagcgtttttatattgaaagaagcagtgtgcatatagcaagtcccaggtaagtggccactgcctttatttttaaatgattactgatgatgatcatttttatttattattattatccttactataattaatctctcgttgtctttcccatctgggtagctggctcttatttcttcttgaaagatagtattggtgtttgaatccatttctggcacacttaggggtgcagggtagaaggggaagatctgattacctgcctcccatttccccccaaactttgtgttatgggaaattaaaaatatttgagaagagagaatgccgcaacgtgctcccaggtgccacctcccagcctcatgcgtcagcagctgcagccactctcatttcatccgtccctcacctacttctgtccctgcccccaacccggattgttttgaaacacatcccagattcctatttaatctgtgagtcctttttgagttgcatctctgaaaaacgaatcccttggaaggtcgctgcctggagcctgggctgccggtggggttgggaggttgtgttgcaccccaggcatcagcaggagggtgggcatgggccagaaccacagcccccttccatgggcacagctggctcctctggggtcggctgcacagggcaaggcagggtgagcccagaaaccttgcgtcaggtttagccctaggagcccaggtgttgcagggtaatgagaatcctttcatttttgtgtctacaaactccttttgcatccatgatctccatgatgcccacagcagctgcctccggtaggctttattcagaatggaccttacccaggatgagtctcagagggttaactccagacacagaatcaatgtcagaggcagaatctggactcaggactctgacagcattttccattagaaggagcaaatccctgtgtctcactccctgctcatttcctgccygtgaggatcgaggaggaaagagtatctctgacgttcatctcattctgctcagattctcagtggcagcttagcaaagggccagttgtctctgttggcatcattccatgggcttggggcctctgaaaaccctgagagagcttgcgctgtaggtgggcaccgtgacgctctgccccaggtgtgttccagccctcatcctggcaggggctgaatgtttctgcctagagccaggctgcccttgttagctccaggatcccactcttggtgtcctttagctggcaggccctgcgagggaacatgtgcttacaatttgccatggagacggygctgcccttcttcctctgagtggtgataaaatggtacggaagctcacccacccagcagattggtaattctaagagacttgtgaaaaatacacgaggccctcagtataataggtaagctggaaagcttggcacaaagtccgcttgtggatagtgaggtgactggaaaaattctttgccctctctgttcccatcccagaagagatcgtgtttaggaagaattcttctgttaatgctgatgctttcatccccagtcaaaagctagttgacgcctgcttgtcagatgttttcccctttggtttcatgtagccgctttccctcatgagtttggcttaacttcatgtcttaatgaatctgagttctctctttaaaggtcactgtcctaacgcataaacatggaatcagaatcgccctcatttattcagagctgagcggagacttttcttgggacttcgaggggaggaaggagcacatctgtgttctaagtggcctcggttgctgagggagaattgggtcatcccatccacgtgctcggctgttggcccccttttggaaggaaggcagcgaatgcgtgggtggccctcccgttacctggaatgcctctagctggtggtccatcccgttctagaatggctcccctgtgcagccttcaagtttacctttacaaatacactctccattttctcagtctgtttacacccttggaaccagaggccatctttacagagaccctaagggcatctggagtattcttcatgtcacagatgaggagactgagactctgagaagccaagtgacttgcccaaaggtgactctgagaggtgacgacatcgggcgcctgggtttcttgactctaggtcacatagccttcccactacaccaggctgcttcctggtgtgtttaggggaagggagtgaggacagccaagtgcctttagctcataaccgaggacatgaacttgctagccaggactatagatctggcggggtgaagcggagaaggcttttgatcatctgagtatctgctgcaccccacataatgccctgagcactgtcagtgatgtgaagtctcttgagtggatgacctttttttttttttaaatttaagttctagggtacatgtgcacaacgtgcaggtttgttacctatgtatacatgtgccatgttggtgtgctgcatccgttaactcgtcatttacattaggtatatctcccagtgctatccctccccctccccccaccccgcgacaggccccggtgtgtgatattccccaccctgtgtccaagtgttctcattgttcaattcccacctatgagtgagaacatgcagtgtttggttttctgtcctcgcaatagtttgctcagagtgatggtttctagctgagtggatgaccttttaatgttgacatttatttttctttattttttttggagacagggtcttactctattgccaaggctggagtgcagtggcaccattgtgcattgctgcagcctcaatctcctgggcctgagtgatcctcccacctcagcctcccaaggagctgggactaggggcttgtgccactgcacccagctattaatgttgggctgtgaatatgatttcatacatatgtgtgagtctcggcggggagggcctcatgcatgacctgctctcttggaagcatggactgcatttaaaagaacaagctctgatgacggaatggtgccaagaggggtagttgcccatggagagctcccaaatgagacgagggatcaggtgtaggtgcttgggtgaggctgagactgtcaggagagaggcactgggtgtggctgcttggccccagggcagctctagataaaaccttccttaaggagactcctcggttagtccccaggctccatgtgggcggcagacttgggctctcccgcatcagtgcctggttcactgtctacaggcagtgggttggtggccaaatggcttgctgacggctggagggttctgccccgcatctaggtcctcgcacttatgtgcagggagaggatggctaaggggtgaggagagtcacaggcgtgaggactggaatgcgaggcctcccctaggttacgccggccaccactgaggccagaggaagtctttaaacattcagacagaaaggagcccagggccagatactctgccgcgaaatccaaggagaggctgatttcagagcagaagtgggaatatgagtctctggtttttgtgttaaaagtggcttttggcttaacaagtggtcactaggaccaaaataagttcacttaagaaaaataattccaaatggctctttctctctgtccataaggctcactaggaaggcagcactggggtgtgtttccccagcctgtgcaggcctcactgacgggctgtggagtgggtgagcagagggcaggggggctggctgggcggaggaatcacgctggcatgtctgctgcccccggctctcacaaccaagtatcacaaacagggaggcttttaacgctgcaggaatctcccagcccagggggccaacagctccagtcagggcgtcagcagtggctccctccggaggccctgagggcgaagcttccctgcccctctcccggctcccagtggtggtggtggtgggcaccttccaccctccttggcttgtaggtgtgtcactgcagttgtctgtctccacacggcctcctccctgcgtctgtgttcagatttctytcctaagaaatccagccaggggattcaggcccacccatatggtgtggtccacccatatggagtcctaactctgttccatccacaaagaccctgtttccttataaataaggccacgttcacaaatgctgaagggttaagacttgagaggacacaattcaacccgcagcagctggttgaggccttcttcaggccagctttttccctgagacccccacatcacaccagcattccagttttgtccttagaatcatggaggttgggagcaagggtgggctccttcgctatgtcagctcgggttggtctggcccacctgggtggcgtggggttctgcccattattttattgagttctgttctggacagcagtgtcttccccccatgtaagttagggttattcccctaagaagatagtaagttccttagagactggtttttgtcacggtttctcttgcatttccttcgtgcctaccccaaagctagtaggtacagaagtggagtacttgaggagtgttgggtggctggtgcccaccctgtggcgtgtttctctccaccacaccttcccgcagaccctctgatgactcctggcctcatcccactctcccgcccctgcctcagagtccttatcagtgcggggcatggggccgccactcccagaggagccagtgcctggagtggatctgcttccgggtgaggttttatctggagtcaggcggsctgccctgagcctggttgcagtttcctctctgtcttctgtgtggtgctctatttctgagtttggcctagtcaagcctctctctcagatctccaggtgactgctcgaaatgtcccagtgctggaatgcaccaccctccaccaaagctagggctggaggataggacaggaacggatggacgtgcagagggcgcgaggggtgagttgctacctggccctacccctgctctaaccagagcagcatgcttccctttcaggagtacatcgatgcccaccctgagaccatcgtcctggacccgctccctgccatcagaaccctgcttgaccgctccaagtcctatgagctcatccggaagattgaggcctacatggaaggtagggacacgtgtggcaccacatccgtggcaggcagccacctttgtggtcacaaagtggccacggcctgaggtgtggagacagaggggtcttgtctttttaagcactttggggcaggaagcatttgaattccatggtgcagtcattctggggaggtcctttcattctcctgtgaccagcagtgaggaaacaaaagcctcagggtgctcttgcggaagggggctctgagggttttgttttgctgtgttgaacccatgggtgacattgaagtgtcccggtaacacagtggctggagagcaggagtgtgtgtagacagctcagtggcaggcaagcaagtggagttacgtaactgcgcggaggacacaaacagaaactgaaggcctttaatcaaacacgtggagatgtaatgtggctgctggacctcatgggtccactctgttctggagggcaggggcctccctcttcactgcggcgcctcccctgccagctgcaggctcctgtccctgagggctcaccctgacgcctccccaccccttgggcaggcagagccagagaactcaaggccacattctcaaggtgtttatgtgagaaagactttgtggagagattcatgttaacagtaacctcctagttcactgcttagtccaagtgtgccctgctgagagctcttgtttaattttaaggaaaagtgcttggcctgggccctccggctttgtgaggatttatcctggggtcaaggaggcagcccctgctccctgccctacagaccatgattgaggcctaacctggctgccttgaaccctgacctggatggtgacttggccttgggcataatttcctgtgatggtgaccggtgggaccagtgggtaccatttggctcacagctccagaggcagaccatctgcatgggagtctgagaccaccatttattggctatgtgttgtgttcctgcctttgggttaggccttctccttgtattctcccttttggtactcttagaagtgggcatgataagccttcccattttacagatgaatcccagaggctctgagaggttagcagacatgccacgtcacgcagcattcaggtggctgggccagcatccagccaggtctgtctgactcaggctccccggcccctattcctgagcttgactttcatgtccatggccagagggccctggatctagaagaacctgaaatgggtaccactgaggaccctggcctggagagtaggtgagtcctcggttccctctctgaggaatgtgccctgcagaagagctggctgctggatttggctgtcctggaagggctcccgaggcctctttccctgaatgcctgacacaccgctgggtgcagagaatgggggtgtcatgctggtgccccatgtaggcaggctttcttagcacatgccagcagcctttatttgctaggcctggagtgattggcctctgctgtgcacttcatctccctttgcactgtcttcctggatccatccagaatcccagatgggaagaaagagctgtatgttccctcctggggtcaccttcatctcagtctgccatgggtgaaggtttggtmaaatttgggaaagggaatcagcctctttccagaaggtgtgcttgttggacactgcctgtgtgaagagcaggaggctgtattagaacatgagaaggcccagctagcagaagaaggtggcagaccagcagccacatctcatgtcccggacaagtccattcgaagagtgatgggtttgggtgggattcgaggaggtgccgctgaagggccttttggagccaaaagcacaggctctggcatgtgggttcctgtctgggctcttgttagccacgtggtctcggacaaakcagtcakttgagttctgctggtgttctggaagatatgggtgatacctggttcagccacggggtcaggggtcaggatacctgggatgatgtctgcagagcacttagcatgggaccggcccactgggtcacccgggaacagcagctgctccagctgttcccaccacgatggcaggaccccagcatcctaattgagtcttcacatccatcttagatttttaggagtagaagcccagggctggggatcaagggtgagcctgggctcagggtgggtgtgtgcacggtgtgttcaaggagcaggaacccggtgatgaggtggaccgtaggaagtcacatgstgagaggaaggcccaggaggtacctctgttgcccgctcgcctggcttggaattgggcctctcctggaggcagttaggaatcaggtcaggaattttaagcagggtgtgtcctagttcactgggagattagaaagtttaggagctacccataaggggagagctgtgggtgttccaggagagggccccgtcctcaacaggtccagggagagctgttgaccaaaccctaacgcatgcttggttctagatcagcaggaagtgtagggtgggtgggccatraatgttgcacgctgggttttccttatcgtgcacgccgagcctgggcttgtattcttccaggagggcggtcagaggctgggacttcctggagccctttcctgacccccagtggctgtccattcaccagcatcgctgggtgggtccctgctgcatgcccccaccagctgcagaggcagagagccttcctgggaagcacaccctgggcccccctcctcaactgcctgctgttcctggaggcactcagccctttcaggcgtactgtaaatggccataattacccttgaagttccctcagataatcacagcaatccagtgacacgcttttgtgctgggagaaggagcttggtgagacttcctccggttgtcaccccccctgccccggttgtcaccccccctgccccggcagtaagactgctctgttttcagagactctggacagctgcagggaaaacagagctggtgggggacgggtgggtgcttcgggactgctaggatcctcattgatgagcagtgggagggagacgaccagagcccctgctttgcggtgggggtgggcagttgggacatggcacaaggggaggctctcccaggaatagcaggcagagcccttggataagggtctgtgctcaggtgggccgtctgtctccctgcagagcatcagccgtggagggcctctcccaccccagctctgcatccaggagacagatgaggcctgctgctgggagctcccagcatcgctgtctccgggcagcctgtgtgaggtcactgccttctcagttccacattcccagagctcattcttgtctcattcagagcctggaggggaagcagggtcatttctctgcctcggctctggcagcttcaaacccacccacttcgtatcaattagcattcaagttgctttaacagcagacctaaaatcatggtggcttaaatgcgacagaacttccttyctctctgatgtaaaagcccagaggaaggccatccagcacgggcacaggggctgggaccctggctccttctagctccttattcttctgtggtctgcccatctggtcctgggtgatggctgtatttccagccctcacatccaagatctagacattaggatggagaggaagatcaagaaaaaggaagcaaatgagaagaaggcctagttctcttttaaggaggggttctgaaagcaatccagtgacaygtttttgtgctgggagaagggactttggccagaattagtcacatcctaagctgcaagggagtcaggaaattgagtccttgttctgagcagccacatgcccagctacaattcgggttttatcaccatggaagaagggctagaacgagttttaggggagcattagcagtcttscaagacatgggtccctgcctgaggacccaactttcccatggcagaacaaccttggaatttctcctctggctgggggtttggcctcggcctgtgacctcagcagcagtcccctctttgtagcaaccagcatcctggaggcttgcagaatgacccaccccagcatgccagggccctacctttccctcatagatgactgcttctgggaggcagccatgcctatacccatacccatgtccctccccacacccgcaccccctaggcagaggcacaggcagcgttgagcctggattcaattcaaaccaagcacttaattcttcctagaaattaagcattccctggtgcaggcctcggggagggagggaggaggccgcagtaacaaacattgaatttgcaggctctttctcccatcagcagcccactctgccacccagggccagggtccagagatggaagccccaaagccaaggcatggctgtgctaccctagggtgagcgattctgggcacggctctagctggctcccaaactggctgagaaggcaccatgtatgagaaggcacctgggccgtaattgcatggcgtgggtttgtgtccctgtcttcagggacagcaggtctcagaccattgggcaacaggctggagagatccttgaaagccctgactgctttggggtgatgggtggctctcctgttcttcttctcttagaagttcccatgtgtctgctctgggggtgacagatggcctgtttgggatcccaggcctccctggggatggggggtgcatacygcagattgaatgcttctgcctgtggttttacgggaatttaattagggctcatcttagaggccatttgaaacctgggttgaaattgagtagtctggatacaaagcaaagagaaagtaacattccttagagcctggagaaataattccccaaaaagcttttgccttgggggtgggtgtttgtgattggtggggagctgctcccagaggcaggaactggctctcaaccctcggggagctgcagaggggtggggacttggagtcaaggcctcagaccctgcccattgccaccgccacccctccaaccctccgccaattgtgtggcctctctgagctgtgcgtctgtcagcgcttaggcaggtgcttagtgtgccaggcactgggttaaatactttacagacagtacctaatttaatccacttaatgaccctatgaggaaggttctgatttcatctccgatttagaggtgaggatactgaggggctttgatcttaagttacttgaggtcacagagctagtggggcagatttgggatcagaatccacacagtgtgggtctgctcttagccagtggttcccaagccctgtccctcacccctgtgtgtaccccttccacacccccagttcccctgtggctgatggagagggaccgaggcaaagataggtagggwtggggctctgcgcctgcaggtgagtcctgcctaggctcacctggtgctggtggcatggccatcatccctgggggtgccctctggggtccaggaaatgatacttgagggcagccacacatcatggcaggaaagaaggaccttgtcrctgataaggcttccaatcttagcccctcggggggctgggccagtcactctcccctgagttgttcactcatctgggaagtgggtcgccagtgcctcggacgtgctgagtgggcgtctcagctggtggccccaccccagatcgggcagagcgaccccttggtgtgcacctgcccatgcctcccccagtgtcagcctgcccagaccacagggctgaggtgaggggacagcgtgccccatcgaagggtctggaatgagggaggacagggtgccagggaggtagggtctctcaggggmggtgcttggtttgtggttccctttcttggacttcagggatgtgtgggagcaccactgtttttgttttcacatcggctgttgtctgccacccaggctgagaccygccctttcagtgcaggggaggctccgcagagcaggattgtgcttgtggctcccctgccctggggcggctaagcgccagctgcagaccaggccgggtaggtgcgttgccggcatgaggcggcagctgggaccaaggctagccctggtctgagtctgcgtgagctgccgtcctggcgtctgccgtgtggaagccagtgccctcccccagtccgggagtcatggggtgaggaagaaatggtgccccagagcatgtggaaccaggtctggcctgcaagggtggctcctcctgtccttgaagctgctccttccctcagctgtagcgttccccctttacagatggggggtgtggaaccttagagaggttatggtaacttagttgaggtttcagagctggtgcatcttcaagctgagctccatgttgatgccaaagctcaccctgttcccttacaacaaacatctattttacagctgattctcagaatccctcccatctccctgcccttggctgacccttctgtgggttctgctcctgtcctctggagccaggggccacctgtgcagccatccagacattcacattctaagacaagaccctgtcagcccccaggacctgggaatctcggaagcatcagtcctgctggccgggctctcagttgaggcagcagaggccagggatgttcagggcaggacagggcctcagggagcacgcccccacrttcacactgccccgtcccctttcctgcacccccacagccaaagccagctccacatcaggcccacaggcctactcgcagccctttctgtgccatctcctcttccctggcctagctgcagcaggggtccctggagagtagtgagagcttccccactctccctccagcagcctcacccctttgtcccaccaggactggggtatgtgcctggaggacagtggcccgggagcctggatcagcttttcctggagaggttgtcaggtccaggcctcctaagggcactggcagagatgaaacagatgctggattctctgccaagctcctcatttccacagctgtgggcactgtggacagggcagcagcccctggcatcctgatggtaggcttgcagtgacccccatgagaacagaccctgccaggcatttgctgccctctgtccctcctgcccagggcactggtctggaggctcccaggagagactcaaaggagtggactgagctctcatggcgactggctggcaccctgcaggagagatgcaccttcatctagggaagaatgttcctgtctgttcactcagagcttaaccttgctgagcctttaagaccatggcagggacccgctccccagcaaaacaagaaggcccctccacccacagcccaccaacccctccagcgccctccagctcagtggcttctggacgagataccccacttggtccaggtgggcctgccccaggccttcctgcagagctttctgaaaacctctgtcccctctcaacccacaggcacccctcctctaggaggtactctcccaatgacatcagctggctccgatcacttttctagggcactgctgctgatcctaggccagttggtgaacagactgtttgtctttgggactctggctctcacccaaaattcctttcccctggctgtgttgactaactccctccagactccactcccaggctttcttccccctactcacactgagtctcctggctcccctgggatataagcagggtacatgggtactcaaaacctccttgttggtcagattggtcagaaggtatccaacagcagccatttacactttagtgtgaatttatagctcacttagtgtttttccagctgaaagagatcttgagttctggaagccctacaaaaactgctcttctccacatcctcaacaatgagaatagaggcccagagtggttgcatggctgacccaggaccactcagcacctttccgactctcagtccagtgctgtctccatgggacccacatctctgcaggggtcttttcagaagcagcrccatagtgaatctaaagtcagactgcctgggttcagatcctctcctaaacacccagctgtgtgcatttaggcaggttatttaactgcattgagccccagctttcctatctgtaaaatggggagggaggtaatgttggtggcaccttcctcataggttgttgtaaggattcctcaatagatgggagctctcctggcagacagtgcattgtgagtttcagaccacaccctgtgtgctgtgaccctgtgagtcctgtgtttctcaacttgcatttagtgctaaaggcagcagcccctggcgccctgatggtaggcttgcagtgacccccatgagaccagaccctgccaggcatttgctcccctctgtccattctgcccaaacgcccagccccgtgtttgcaaatgtgtacctgggtttatttccccaaacaagagtgtcttcagggtgaccaatcatgtaacacaagcgggcttttaaaaatctctttattggctactagatgatgtattgtagatttattataataaagttcacattgcacaggtttgtttagtgtaatttttatttttaagaaattttgacagagttgcaaagatagtacacagagttcccatataccctttgcacagcttcctccagtgttaacatcctatctgaccataattatctaaaccaggaagttcacattgataactattcaataattgaaagacctaaatgaattcgaatttccccagttgtcccactaatacccattttttagtccaggatccaatctggttgtcgctctctgtggtctcctgccatctgggatggagcctcaggttttgaccttgacactttggaaccttgactgtttattttgtggagtgtctctcaattcaggtttatctggtgttttcgtgactgggtcaaggtcatacattttcagcaggaacaccacccagcagtgccagtccctccctagtgcgtcatatcaggaggtgcatgaggacaacgatgtcttctgtctgctcagcagcagttatttggttaaagtccaccaggcttttccactctaaatttctattttttcctttgtagttggcaagaaccttctaagaggattctttgcagactgtctctcatatgtttgcccttctcttgtagcatccgtggatgggtgttgccattgttactgtggtatttaccgaacagtcatcatacagaattatargaactgtgtcccaaccaccccagttgccctagaagtgacaggatccccttgcagctttgcagacatccacagggcaccaggtggcaccttgtggagtgtcagcataatctcacgtgtgaacaaagggaaaggcaaaataaggaaaagagaaaagtgtcagatatgttggagaatcaggattacatgtttctttgctgcaggacttctcagagccttagtaatgtgttaatatgaatctttagtctgggggcagtgttgaatttcattaccgattgtaagatgcactgatacttcatattctataaaaaagaaaaaaatcctaagtaagttgtgaaatatcaattatgagacacatctcaatttcagagatggaaaatatgaaaaacatgccatagaatcagtgaagttctgcagaatttagccttttccatccagttawctatagagtcccctcctctctttgaggcttctcttgagagactgttgcactcaacacactcaggaattccctgactgggtgccttctggccgccctcacttccggccctgcacaggtctgttcttgagttccctgtattagtgtgtggggccctcattgctggtgcttctcgaatctgtttaactccagcctcacttccctgaggcagccactgttcatagtttggaacttatctttctagacccttcctattcatacatgtagagatacatgtgcacttttagtattattttttcattacagtaggctctagtgcaatgtgtacatttagaaacagggtcattttacacgtgtcctgatacagctctttgtccccactgaacatgtgtcttgcttcgcttctttccatgttagcccatgaagatgagggggatcaggtctgccccttttgctggcagcataatatttccatacatgaatgaatgaatcctaatttatgttgggcccataaggtcattccagtcttgtttggattttttttttttaaacaaactgggctgcagtaaacagctccctgcatatttctgcataattaatccctagaagtgggatttctcagccaaagattataaacattcctcactttggcagatctcactggattgcccttcaaaaagtttgagcaaatttcactcctgatggtgccagtctgcctggggaagccgtacccacctcgattgatgtgtgtttgtcgttattggcacaattgagtatcccatcatggattcactggctccatttgcttgtcttctatgaatgaatctttgcctgttgtttgcctattttttagttgagttgttgggcttgttgattaattagatccctttttgtatgaagaaaattgtcccattgttaaaaattgtggacgggttcatgaatgtaagcgtcatctttgctctgggtccaagctaagatgttttgcttttagaataggtactaccagaaagagccctccaaacattttaaaaatgtcttgaaagtaaaaaaggctgccatgttttgggagcgggagctggagctgagcagggacagtgagcgtctgcctgggtccagaaggggctgtaaatcagtgggagcagctgccacagagtctacccacgtttccagctactgccgccagactcagacatcgggcgcagaaatgcctgtctctgtctgagccagtgtctggctcctcttctcctgggctttggacattgtggttgcaaacagctctctggtcacataagatgaaatgagtcactagctaagtcaggtgggaggaaacctgctcttcccctgcccgtggcttgctgtattggactgtaactttgcacctgtggcatttgttgtcttctcttctcgtcctccagtgttttctctccacagcttgcctgtcaccaggtagctaagtgaggatctagctgctagcagggaggttgcacctgtggtaaggccatagggtctcttagatgccttcaaggagcagggtagggggctgtggccactggcgaaatgccccctgctttcccccagtgactccaaatatcacaattgcgtttcccccttgaaagctcatagtagctggatgtgttaatttcctattgctgcatgacagatgacagcagattgagtggcttctgacagtacccatttattatctcatgggtgggtgggtcagaagcccgcatggtgtggttgggctcttggcccagggtgtcacgggctgaaatcaaggtgtccgcaggggcaggtgatcttctggaggccctgaggaaacatccacctccaagctaactctcattgacagaatccagttcctggtggctgtaggactgaggtccccacccttgctggccagcagctcctacaggtcctgtgtttcttctcacggtgcccctctacttgcaaggcggccacagctggccagtctcyttgtgctttgaatctccagcttcctcttcagagaagaagctctgtgtgtgatgccctaagagttacccagaccatctccctgttttgagggcagcaatgcaacagaaccgagtcacagaggagaacccatccrtcatgcatgcagttctggcgatcatgcagggtgttgcccggccacagggatcttggggttgacttagattctgcctgccacactgagtaatacaatggttttcccttgcatacttataagttcaatggaatttaattgctatcattgcatctctccaggccctgtcacctgtgctgggtgtcttggggcatgtcgcccctgcccattccctctcctgggtggcgtctcctgtcatactgcccctgcactccacactgcagccaagccgaaccccaggggcacccctcttgacccttggcctttgtccatggtgttctgcctatctggaatactcttggtccccaggactaactccaactttggggtttggctcaggccacttcctcccagaagccctctgtgctgcacactcccttccctgcgtgggcctcagtgccttcctccctactcacagaccctttgctgccctcatcgcacattcattccactgtttcgtcattgtctgctggccgctgtcttccccacctgaccgtgacagccttgaggacaggggcgagtgtgtctttggggaccatgacaggtcagggcctggaacatagtacctgctcaataagtatgcaaaggagggaagaatgttttcaagaatcagatacataagaaggagatgcactgggggaggctctgagcagaaatcccactcccatgggagataggcctggggcaggtggggtcatgggctcggggccacaggaaggggtggtcctggttgtctgtggggctctcgcggaggtggtatttggagcggctctgaaatactgggctcaattagaggaaggtgggagccattccagggagagggagcaggatgttcaggagaaatgggggctattggtgctgcgggagagagccccatgccgaggcccagagggcctccagggccagtttctgcttagcctatgcggggagagagggaggccattgggaggctgctgtggcttctggaaaagatgctgagggtgtgatgagggtgktgactctggtcaggaagaaataggatggaggccagaaattgagggggaacattggcaggcatcagggcaggcattattatctgggatgagttaaggagaaggaaacacaggacaagccataaccacaatctgtgtgccagctccacagggcaggacagtgctggggggctccaagggtgggccaggtgtctccacggcggccaagaaaaactacaagagaggccgggtgcggtggctcatgcctgtaatcccagcattttgggaggccaaggtgggtggatcacctgaggtcaagagctcaagaccagcctgaccaatatagtgaaaccttgtttctactaaaaatacaaaaattagctgggcatggtggcacgtgcctgtagtcccagctacttcggaggctgaggcaggagaattgcttgaacttgggaggctgaagcaggagaattgcttgaacctgggaggcggaggttatagtgaaccaagatcgcaccrctgcactctagcctgggcaacagagtgagactccatctcaaaacaaacaaataaacaaacaaactatgagagagggaccctttgtrggcccccaatagtaataagtccccagcctgggccaaatcccagggcttcagtgataaagattccatttcaacaggcagagatgagaagggagggcattccagtggcagatacagcacagacaaaggccaggcaggtaagaaaggccaagttatcaccaggartagagatggtccctcttggtgagagcctttcttgttttggggcatggggtggtacaggccccctccacctggcttggagtggacttgttggccttgtcatgggccagagccctccacctttctcccctcctctcaagccttcagagaagtttctgtcatggagttcactcggctgcctcaggggctctggctcagccaagaacattgtcagggctgggtggtgttctctttgtgttttctctggacttgttctggcaactgacagccccagatccagccttgtattttaaacacgaggatcctgcatcgaagctgtgtgttctgcccaaagatgatccaggcctcagtgctcctctggggctggtgtatagtctgttatcacactgctataaataactacttgaggcctgtcatggtggctcacacctgtaaacccagcactttgagaggctgaggcgggtggatcgtttgacgtcaggagttccagaccagcctggccaacatgggaaaaccccgtctctactaraaatacaaaaattagccaggcgtggtgatgtgcgcctgtaatcacagctacttaggaggctgaggctgcagtgagctgagatcacacactgcataccagcctgagtgacagagtgagactctgtctccaaaaaaaaaaaagggattaaaaaaaacctacctgagagtgggtaatttatgaagaaattatgaagaggtttaattgactcacggttttgcaggctgtacaaaaaatatggccagggaggcctcaggaaacttacaatcatggcggaaggcaaaggggaagtaggcatgtctttacgtggcagcaggagagagaaacagagcaaaaggggaagtgcgacatgctagatttcatgagaacttactatcacatgaacagctagagggaaatctgcttccatgatccaatcacctcccaccaggtccctcccccaaattgggaattacaatttgacatgagatttgggtggggacacagagccaaaccatatcattccaccctggcccctcccaaacctcatgtccttctcacatttcaaaacacaatcatgccttcccaacagccccccaaagtcttaactcattccagcattaactcaaaagtcccagtccaaagtctcatctgagacaaggcaagtcccttctgcctataagcctgtaaaatcaaaaacaagttagttacttccaagatacaatgagggtacagtcattggttaaacagacccaattccaagagggagaaattagcccaaacaagaactacagggactgcagtccccatgcaagtccaaaacccagcaggkcagtcattaaatcttaaagctccaaaataatgtcctttgactccatgtctcacatccaggccacactgatgcaaaggatgggctcacaagacttgggcagctccacccctgtggctctgcagggtacagccctcacagctgctttcgtgggctgacactgagtacctacagcttttccagggacacagtataagctctcggtggatctgtcattctgggatctggaggatggtggctctcttctcacagctcccctaggcagtgctcctgtggggtctctaacatcacatttactctctgcactgccctagcagaggttttccatgagggctccacccttgcagcagacttctgtctggacatccaggtgtttccatacatcctctgaaatctaggcagaggctaaaatcttgccttcagcacacctgcaggcccaacaccatgtggaagccaccaaggcttggggattgcaccctctgaagctgtaccttggccccttttagccactgctggagctggagcagctgggatgcaggatgccatgtcctgaggctgcatggagcagcagggccctgagcccagcccacaaaacaatttttcccttctagacctcctggcctgtgatgggagggactgctgtgaaggtctctgaaatgccctggaggcattttcccctattgtcttggctattagccttcagggcttcttatgcaaatttctgcagctttgagttcctcctcagaaaatgggtttttcttttctaccacgtggtcagcctgcaaatttttcacttttatgctctgcttcccttttaaatataagttctagtttctggtcatttctttgtttttgcagatgagcataggcttttagaagcagccagtccacgtcttgaatgctttgttacttagaaatttcttccaccagataccctaaaccatctctctcaagttcaaagttccacagatctctagagcagggacacaatatgccagtctctttgctaaagcataagaagaatgtcatttactccagtttccagtaagttcctcatctccatctgagacctactcagcctggacttcactgttcatagcactatcagcattttggtcacaaccattccacaagtctctgggaagttccaaactttccctcaccttcctatcttcttctgagccctccaaactgttccaaactctgcccgttatctagttccaaagttgcttccacattttcagatatccttatagcagtgccccacttctctggtaccatttttctgtattagtttgttcttaacattgctataaagaactacctgtgactgggtaatttatgaagaaaagagttttagttgactcccggttccacaggctatacagaaggcatggctggtgaggcctcaggaaacttacaatgatggtggaaggtgaaagggaagcaggcacaccttcacatggtgacaagacagagagaaagaaggatgaagtgctacacccttttaagcaaccagatctcgagagaactcactcatgtcatgagaacagcgagggggaaatccacccccatgatctagtcacctttcaccaggtcctcccccgatgctgggaattacaattcaacatgagatttgggtgcagacagagagccaaaccacgtcggctggcttagaagtttgctgctgatctgagttcgagttctgtcatggtaggtagatggacgagaaggctgcaccttccttaatgcctaagggtcaagagttccatctttgggcaggaggaagcaaacatgtcactcctccagtattctctactcttctttctcccctgcctcccccagggccatgtcagactgcagagcagtgataggctctgtaaggtgatcttggatggttttaaatggcagaccttcaaatagtaataccagtgatgatgatgacgataatgatggacaggatgttgggatctgacacttggtgtcttctgcatgctggtttctgttttaagtgctttgtgtgttaacctgtttgatccttacagcaatcctatgagcaggactgctcttattgccattttacagatcaggaaatgaaggcaccaaaaggtgaagtaaccgtctcaagttcacacagtatggagcattcagccaggcagcttctgggactggctacagtgtttgggaagcacagctggcccagtgcctctgtttcctggtccctgaagtgggaaaggagccttccttaactctttccagactcagtgttcttaagtgggaatgatgagactggagaccagtgacaaaggctattatgcagtggtttgcccagcagtcaagggtattctttcccgccacatgctggctttgatcttgaacgtgcaaccaactcagggcctctgcttctcacatgcaaaatggagtggtgatagtgatccgtgctatggcattgctataaagatgacacaagttgatgcctgcaagtgcttgttgatggcgcagagcacactgcattgcttgtctggttattgttgacattaagccctgcatatgctgtgttaagtgcccaacacatgtcatctctatgagccttcattttggttgtctgttagatggaaatccaaaatgataatggtgtttcttgtgctcatgaatctgcagcttggctgggctcagctgggtggttctcccatgcagtcttgcatggcagtttakcatgatggtgacagagtagccagactactgacttggcagctcagggacccaggggtgtgtcccgagaaagacagcctctctggccttgcttccagagtccatattctatttatctgtgaggctctagggccagttcacattcaagggaacagcatttagggtctacttcataatggaaagaagcatgtaagaaatagagactgagaagtcccacaatctgctatctgctaactggagacttgagacctaggagagctggtggtgtaagttatagtctgtattaggtcattctcacactgctataaggacatacccaagactgtgtcatttataaaggaaagaggtttaattgactcacagtttgcagggccagggaggccttaggaaacttacaatcatggtggaaggggaagcaaacatgcccttcttcacatggcagcagcaaggagaagtgcagaatgaagcaggggagcatggggggagccccttataaagccatcagatcttgtgggaactgactatcatgagacagcatggaagtaaccgcctccatgattcaattacctcccaccggctccctcccatgacatggggatgatgagatttgggtggggacacagccaaaccatatcatagtccaagtccaaaggcctgaggaccaggagagctgatgctataatttatggttctactgcaggagactgatgtcccagcttgaacagggaggccaagtgagtgaattctttcttacccttccttttgttctattcaggcctttgactgattggacaggctccacccacattggggaaagtagtctgcttgactcagtttaccaattcaaatgctaatctcattcaggtacacggagaacaatgttaaccaaatatgtgggaaccctgtggcccagtcaagctgacaagaattaagcgtcccaccatggcaggcctgctgtgttctargctctagggcaggtcccaggcacacagagatgagcaaggcaggcatagtccctgctcccaccgagcctcctgcctcatctgcctccatcagggaggaaggaactgcgtactggggcaggggcacccaagaagccttaatgtcggaggaactgggtactgggtcaggggcactgcctggggcactgagcctgcaccctgtggcggagcttgattgagaaaccgagcaaggctcattttgcccagagcttgggaggagggaggcataggcaggcccttggccatggaggacttcaaggctggcaaggagtctggacctgattccgaaggccatgggagccgttggggagcatggagcagcggctcagccttaggctgggctttacaggtcacacctcccgagttctcccttgccccctcgcaacagcatgaggcatgccaacactcaggagatgccacttccctaccctctcctcatggtgggtccaagggaggagacacagtcctgccctagcccctgtgccctgaagctgtgaagtcactgcttagtccatgtggcaagggcctggccttctctcacacccccgctcctcctgtgaccacagtcctcatgtgacccttcctttcctcagtgaaccggacggctgggcagcacccagtcctgctggggargactcactccaggctgcctttcagtgacccaggccccatgggccttttgccattggccttgagtgccttcagctctgagttcctcagtgcctaagcagcacgggaagtgccttctctcctcccttgtcccacgagggcacctgagagggccactgtgtccttacgccygatgcccatgagagatgctagctcctggggagctcctgagactgtgcaccttggattggaacctgggctcgtagctctgtgtcctacatgtatgcatcgctgcacatgcctggcctgcccaaggcccttgaggttgctgcattagctacaaggggctgcgaggctgagggtccactgctcctaggagccaggcagggctgtcatagattttcaggtggcttccaggagccaggctgtttgtcctgcatccccagggcatgccagcttcaggatctggaacttttaatgtcttcacaaacaaaacacaacatgtcattccagttttatctcatccargactgttcatagacctttaacacacgatgatgtcactgccatccaattgtttccatcctttcggaagcgcccaaatcccctacaaatccagccctgctcagtgccagcccctgcaggggccccaccctccaggggcccccaacttcagggagagatgagtcactcatcctaagcgagagggacagttcggaggtgttagggatgtaccctggaggcacagggcaagggcagctcctcagcatagccagagggatctggtgctctgccaatctgcaggagggcagggtgggggcctaggcagtcaggcaccccagaggggcatggaggggccctgcctgcgggcaaggcacatggctttctaggatggaatgcctggagccctccagccaggccaygtggacaggaccttgtgctgtggtggtgagggtgcatccagcccctctcttctggctctaagtcccttcagattgggaccacctctgtctctctgtcgcttgcatcccggggcctctcacccgggcccttcctggcatccccctcctggctcaggcctgtgcggccctcccacccacgtgcctgtgagttgactgtgggtgttactgggtggctgccatcgtcatcgctggccaaaaagccatttgggttgtttccagagctgctgtcaggctggaacttggttcacccggatgcacagaacatcttccctgtctagaattcaagagcatgtgactcccgccycytaactgcataaccacagagggaaggtgactttggatgagtccagggcctgaatgagtccagagcacttgaacttacagatgggccggccaggctctttccagtcctgccacagccatcttcaaggctgttccagacccacagcgccacagggtggccaggcgggagattgcaggcccctcctccttcctttgcaggctgtgccaacactgggcttccctcctccttttgtttccagtgcttacggctcacttatcccatccatcaacttatcttcacacgtgcacatgtgccagagagatggttcttactgaggcctgccttctcctgtccccaaggaacatactgcctagttactgaatcagaacccatatatgaaaatttaatagcgtacaagaggtaaacaacaaaactcggtagcagtgccagaaaaagtactagaaagacgtgactgtgggtaggagttgcagggtgaatgccactcgaggcagcagcatgggacagcgtgttcttgggggctctgcagaacagctgggattctgtgatgcttggaagagcaggtgttgccaagtgaggcatggaacggggaccatcccagagatatagtggggacagtatatccacctggcacaagggtttggctgggaacgatcttgggttgtgcggtcagagaagagttgggygcggtggctcatgcctgtaatcccaacactttkggaggccgaggcgggcagatcacttgaggtccggagttcaagaccagcctggccaacatggcaaaaccccgtctctactaaagacaaaaaaattagccaggcatggtggcgtgttcctgtaatcccagctacttgggaggctgaggcaggagaattgcttgaaccgggagggggaggttgcagtgagctgagatcacgatgcctctgcactccaacctgggtgacagagtgagactctgtctcagaaaaacaaataaacaaacaaacaaaagagttgggaagtatattcatttgcgtgggctgcatgacagtgctgcatttaaacaacagcaatgcactgcctcccagttctggaggcagaagtctcagatctkagtgttggcagagttagcttcttctgaggcctccctccttggcctgcggatggccctcatctccccacgtctgcacatggtcttcccctgtgtgtgtctgcgtcctaatctccttataaggacaccagtcctattggattaggacccactctactgacttcattttacctctttaaagaccctatctcccagtgcagtcccgttctcaggcatggggattggggcttcaatatcaacttggaaacagcgctcagcccatcacaggaaggtacagagtcaggctgcggaggcctggaaaggctgtgggcttcactcgcggggcatggacgccttgctgggagctgtctcagtacaggtgagagctgtaggacggtggtttgtgggcagaggatcttgtgtgtggagatgatrattatggagtgaggggaccaacaaggggcttcctggattaacagacttcaggaacatcgattccaggagctgggaagaggtcgcggtgctgggccacagcccttgttccatcagtgtcccaggagggcaggccagagcaggctgggggtgctgtgctggtgggtaccaggcaccccgaggagggtgggcatccatggaaacagggctggacaatacgattctcagtcattccgaatgcccctcatgggcgtggcctcaccgcgtccctgcaaccaccccgggaggtgggcggcatcactggcctagtttacagatatcagatcagagcattggcggtcccagtcatggcaactgggctggccctccttttgcttcctgggctttccctgccatgacagcttcctccctgcagtgtccctggcttccctggccctgggcattgtggcatcagtgctgggtgcccctgttccttggcgtgttactgacatttgacctacttcttggaccctccccagcagaccttgcgtatgacggtccaggtgatgacgacaatagtacggcgagtttttcatgcacacctgctagtgccagggtttaaacatgaggcccatcctcagcatctgctggatgctggccacctctgagtgagggcagtgggaccacgacgatgagtgggggaggggtagtagccctctgaaccagatgctgttctagtcctcattttacagcaaggaaactgaggcatagtgaggtaactgagacaaaacaaagcaaaatttcttggccagggtcatayggctgatataagatggagccaggattaaaaccsagacagcccaggtcctctgtggatcctgcagagtgcccagtcgggtgggggaggtggatgcttcattagttggccaagatgagcagcgtggggcccttgggtggcacagcaagggggctgctcccaggtgagcaggaagagggtgcctgacccatgttggaggataagcaggagtcttccaggccatgggttggtgctgggaggggaaagaaagggcgtgtggggctgagatagctgccctggggcctgagaagtccgggggtgggtttcactccaacccccactttcaaaagatgctgtaaggctggcccggtggctcatgcctgtaatcccagcactttgggaggccgaggcgggcggatcacggggtcaggagatcgagaccatcctggctaacacggtgaaaccccatctctactaaaaaaatatgaaaaaattagccagacatggtggtgggtacctgtagtcccagctacttgggaggctgaggcagaatgttgtgaacctggaaggcagagcttgcagtgagcagagatcgcgccactgcactccagcctgggcgacagagcgagactccgtctcaaaaaaaaaaaaaaatgatgctgcgagaacttagatcctgctgatcctgtccccagtgccctgctctatcagcaacacaatggggcccctcttgccccagtttcctgccatataatatgggcccctaggaaccgggagtggcccaggaagcaggactgagcgcagctctaagagccggtgtcggaggcacacatagctggggtctcccacgtgcasgggcgccctgggatgtggaccagtaaccactgtttgacacctgcctcctcccctgagggcatcccccgctgggtgcctgtcgtgtgccaggcctcccagcagctctctagggaagcaacactcccattttatagagaggaaagcaaggctcagcagagttaagtcgtgtgcccaaggtttcagctagtggaagtttgccccaggtccagcgtcgggctggctggcttcaaaactgccccttcaggtgctcatttcctcctccctccacccctgttgtcctctcgggtccacctgtttgtcactgaacttttgttttcttgtaagttctgtagctgctaccggtcggatgagggaaaggtcacctggtggagtggatgggtaatgaggtgtgacgcgggaggccagcctttttctggctctgctggtaactcgtgtggccttgaactagttccttcccctttctggacttgtggaagcctgtggctgggacttgcccatctccacgtgccctcccgcttcatggtgtctgatttggaaaggcagagagggaagacgggagcatttccgtttcccaggggctgatattcgctctcaaaagaacacaacccaccatccaaccaaagaaagcctcattccacctcccatccaaaaataaggatggcagagaaataagcaacagtcgcctttttcagggaaccagaaatagcctcccgggctccccgctctgacttcccaagtcttcattctgtctctattctgggagaagagctgctggcgccaccactgcgagcttctcgtgatcgagagggaggaacccctgctgtcgctgtccctcaggcaggcagaaggggcttgtctgctggtactgagatggtgggggtgcacctgggcgccacctgccagtgaagacagctgggcctggttccttcccagcctcccactcagctggagcgttctcaggttgggtccagttcatacatcctaagagcagcaggttgggcctttgcaccggctgttccctgtgcctcgttggcgcctccccacccccccagtctttggaaggtgcccctcaccatgttgttcaaatcgcataccccacctctgccggcacccccattttgtggttaatgtttccctgccagctccggccagctatacatttcatttatctctctggattattgtctgggtcccttccactagaatgtaagctcctcgaggacagggatgcctctgttttatttattactatattgttagctcctggcatctagtagaggctcaacatgtttttctgttggtgaatggttattggaacagtagtactctacgtttcttatttactctcacttcatgggtgtgtcgggatgcttttggctaccagaaactgactcaagcggtgcagacatagcagcctgtcatgcccagcaacccgagcgggggcagctcgggatgcaaaacagtctgtgtccactgagagatggggtccttcccagcatgtgctctgtgggctcaagactgccttcagcaaaggctggtgcccaagcttggaatacgagctcatcctagcagtgtggctgggcgagtctcagttgagtccccaccccacgccagagcaggagtggtccaggcagccggtgtgtctgccgctcagagtgtggtcagcaagctccagcctgggacgaatgaacaagaatgaccgtgcagacctttcctggccacccaattcctgctcccacctaggctgctgtcttaacagagcctgggatttcagaagggtgggggtgtctggcctgatgctggatgtggcccattctttgaaaatgtcttgttcttgcatttcgtctggactccagacatctctggaggaagatgggctccccttgttccttctctgacttcacctcagacccagtggggatgaggaacaagactcaatgcgtgtgtagggaggactggaggagaccgtggttgtgaagcatttacttagcccagtgtcctgcagagggcaagcactctggatgacagctactgctactaggttttttttccccttaatgtattgatacaatttatgtatcatacatttacctttctattttttttttgagacagagtctcgctctgttaccaggctggagtgcagtgacgcgatcttggctcactgcaacctccgcctcccgggttcaaaggattctccttcctcagcctccccgagtcgctgggattacagacatgtgccaccacacccagctaattcttgtatttttagtagagacagggtttcaccatgttggccaggctggtctcaaactcctgacttcaggtgatcggcccacctcggcctcccaaagtgctgggattacagttgtgagccaccatgcccagccaaatttaccttttttaagtgtacatctagttctgtagttttgattatattcacaaaattgtgcggtcatcactactaattctagaacattttcatcacccccaaaggaatgtacccatttgcagtccctcccagttccttccttccccagctcctgtcaaccattaatctctttttttgtctccatggatgtgcgtgttctggacatttcagataaatggaatcttacagtatgtggtcttctgtgtctggcttcttccacttagcccagtgtttttatggttcttccatgttgtagcatgtctcaatactttgttccttttcatggctgaataatattccattgtatgggtaggtcacattttgtttattccttctgcagttgatggacttctggattgttgccccatttggactatgatgagtaatgctgctgtgaaccatttttaggattttatgcggacatatgtttccattctcttgggtataagaagtggaattgctggatcatatggtcactctgtttaactgtttgaaaaactgccagactgtttcccaagcttctgtaccatttctctattcccaccagcaatgtatgagggttggaattttttccataccctcagcaacacttgttatttttggtctcttttattatagtcatcctggtaggtgtaaagtggtgtctcattgtggttttgatttgcatttccccgatggctaataaggtgcttattggccatttatatgtcttgttttgagaactttctattcaaatcctttgcccatttttaaatagagatatctttttaattgttcagttgttgatagtgttttatatatttcggatactagacgcttctcatgatttgcaaatatttcccccattctgtgggttgtctttatgttttctttatagtgctctttgaagcaaaacattttaaattttgatgatgcccaattctatttttccttgggttgcttttgcttttagtgtcctgtctaagaagccattgcctaatgcacggtcatgaaggttcacatctatgttttcttttaaagttttgtagttctagctgttataatgagatcatgatcagttttgaattaattttgtatacgatgtgaagtagggttccatcttcattcttttgcatgtgaatatccagttgtccaagcaccatttgttgaaacgaatattctttccgccccttgaattgtcttggcacccttgtagaaaatcagttgagcatagatgcacaagtttatttccagattctctgttctattccattgatctgtatgtctgtccttaggctggtaccacattgcctcaattactgtagctttgtagtaagtttcgtattgaggaagtgtgagtcctccaactttgtttttctttttccagatattttagtggtcctgagtctcttgcattttcataggaattttaggaccagcttgtcatttcctgcaaagaaaaagctgtagttttgatggctatcatattgagtctatagatcaatttgggagtattgcccacttaacaatattaaatctcctattaatgagccttgtgtgtctttccatttattgaagtcttctttaatttctttcaatggtattttgcagttttcagtgtttaagtcttacacttattttttaaatttatttctttttgatgcttttataaatggaattgttttcttaatttcatgtttggattgttcattgctggggtatagaaatacagttgaggccaggcatggtagctcacacctgtaatcccagcactttgggaggctgaggcgggacaatcacttgagccaaggagtttgagacaagtctgggcaacatagtgagacccccatctctaccaattagttgggtatggtggtgcagttactcagaaggctgagcggggaagatcccttgagcctgggagtttgaggctacagtgagctgtgatcgtgccactgcactctagcttaggcaactgagtgagaccctgtctaaaatacacatacataattttctctttttttgatatggagtttcgctcttgttgcccaggctggaatgcaatggcgcgatcttggctcacgtcaacctccacctcctgcattcaagcgattctcctgcctcggcctcctgagtagctgggattacaggcgtgcaccaccacgcctggctaattttgtatttttagtagagacgggttttctccatgttgatcaggctggtcttgaactcccaacctcaggtgatccgcctgctttggcctcccaaagtgctgggattacaggcgtgagccaccatgccagacccataaatataatttttaaaaattaaaaaagtacagttgcttatcatatattgatcttgtatcctgcaaccttgctaaactcatttattagctctaatagttttggaggttttttaaatatgtgcattccttgggattttctatgtataagatcctattatctgcaagtagagatggtttcacttcttcccttccactctgtatgctgtttcatttttcttgcctaatggccgtggctagaacctccagtacagtgttaaatagaagtggcaagagcagacctccttatcttgttcctggtcttaggggaagtgtctagtctttcactggggagtctgggtttttctagaaggttgaagaagctcccttattttcctagtttgtggagtgttcttgccatgaaagggttttagattttttcaaatgctttttctgcatccattgagatgatcatgtggtttttgtcctctattgatatggtgtattgccttggttgattctgtgtgttgacactgctattgttatgaggtttgccacagagcagagtagcatgctgtcaggaaccccctgagccagggagctccatgggcactttttctgcgagggaggctgtagtcaacagcaggggcctgggagtcagatggtctgggtatgacctcctggctgtaccactggctcaccatggaactctatgcagggaaatgccacctctgtgccctagtttcctcatctgtaaaattctcaggggacaggagtgcttccttgtggggttcttatgagggtaaatgagttactgtgtaactacgttgaacagtttctggcatggaacacatgcagtgttttgagacattggctactggccactagtgacattatgtaaaagcttggatgggccagggtggggagggacagttgaggagggcattgaaatctgaaagccaagctgattcacctgctctaaaaactccggggggccacagggagtctggaagctcttccaggaggtggcctgtttgaccccagcagcctccaaatcttcctgtgggaggaggggccaagggtggagcccaggctggtgagcgcccgtccgaagcctgcctatggcagaaccctccagtttaaattcaggcctgagcaccatatcctttgggactgggttgcaggggcggtgtgtttgcagcgaggaggcttttgctcagactgcttcctcccttgacagccatggagggcctgccagccctcacagcattcccgccctgcctggggccttgtttggaaaatggctttcagctgagcaccagctcccctccctccccaccctgactttcctgacttcccctctcctgtgctgccaggtgagcctggctccttgtcctggctctgccgttgaccactgtatgaccttggggcctgtttctggacactgtcagggaccgcttgggattgaacaggcctctgtgcagagggcctgcaacactgtctgccaggggctcaggaaacactggctccagaccaccctcccagtgccccagagaaactgcaaccccccaaatctttctgtttggagtttagactgtgagggtaggagtcggggaacgggggaatgaggatgaggagggagataaaagcaattttatatgccctgtgtaattcttggcatttgtttttatgacataaatgaggctggatctaccttgatttaatgtcctgacctcctagccagccaagtagctagcagctcgagacagtctgctttgctctgtttacttttggtttggtttccaagcctgtgggtggcagaccgcccccgccccgctcacactcagcctttcctggcccctgtgccctgaagtacagggtggtcccacctttgtggtcttatcagggaagggggacaatgacaagaamcaataataacaaaccagtaatttcatcatcagcagagagattccaaatacattttgttatcccacaaaaaatcagtttacccctgctcggtgccaggcacgagtcaggatgaacagaacaggtcagcttttgagggttttaggaagttggactcactcttagaatccactgggtgggcctggagaggggcccaggaatgccaagctgtgaagggcgaggaggaattggcagggggaccaggcgcggcctgggctggagcatgcagcagagatgcagtgagcgtggtggggaggccacctctggagctccacacaatgccctcaattatgttaagtagtctgcaggtgaggggtcaggcagtgtccatgtggaaacagttgtgtcaccaccagctagttctttaatctctctgaccccagtttcctcctcatgggattattttgcaaactgtggaggtgatgccggcaaagccctcggtacagcgccagacrcatgctaagagctatattgtcactgcgattattattaagccagtgtatcacatggtgggaaagtctttattgaaccagaaaaaatggtcatggcttatgaagttaggattcaggttacaaaatttgtacagctctctgcgtgtaaatgtacgcgtggstaaaagtccacagtggtggggtagtagttgtaatgtcttgtcaatatgtacattttttacttttctgtactcttcggattttacacagtgatcatacacgagttttgtaattacagaaatgttattagacaatgtaacggcagggctgtggttattgttcacacacacgagcacatgggactgcagaggttggggacggtcagatccaggagcgtgggggcactgaaggcccctggggtggggcgggctgtcacaggacgtgcacctggggcggctgcccaggagctgtgctgaccaggcctcccttctgccctagacgacaggatctgctcgccacccttcatggagctcacgagcctgtgcggggatgacaccatgcggctgctggagaagaacggcttgactttcccattcagtgcgtaccatcccagctccacctgagggcaggcgytgtagaccgcaggccagcataggggaggggctgggtttatagtgccctctggatttaagctcacccgaggatggatgagcacatggccctgggtcccacctccacccacaccatagaaacgggtcctggtaggggacacaggtcaacgtgctctcctgcctggcctggggktgtctacccacacgtcaccctcagtgcagataccaggtgtccagagtctgtgtctcagctagagttcctttctagacrtgccaagtwcctgccttgtgggtgaacggcctcactaatttctctctgcttttctctccccaacccatagtttgcaaaaccagagtggctcatggcaccaactctcacgaggtgagtggaagaagatctgactgttgtccctgacccccatcctttcagctcatcgtgtctcactgctaccctgccggattcctcactgccactgctcctgccctgctgttagtcctggctccttggtagatagcctccttcccttccctggactccagaggaatcgagcgggagtgctgtggcttcatgcactgtctgcaacctcacctcaatgcctgtcctgtccctaaggcaggaggatgtgctggggacccacctgtcctctgtggagcctgtcgtagctgtggcagccataacaaaccccaggcactgggtggcttcgccacatttattttctcacagccccggaggctaaaagtcccaggtcaaggtgccagcagggtcagtttctggtgagggctctcttcctaccttgcaaatggccaccttctcactgtgtcctcacacggcctcttgtgtgtgtgaatggggaggggcagaaagcaagagcaagctctctgatttcttctgataggggcactaatcccatcttgagggccctgccctcaagacctcccaaaggccccacctccagataccaccacagtggggcatgggcttcagcgtaggaattctggggcacacgttcagtccataggggagcttgtgcgagtcatgcctcagtccggcccgccctgcagggctggctatcctttgggccatcagtgtcatctcttcgagggcctgttttgtggcaggcaccgggctgggcccacatgagggctgttagctctgacaaggctctgtcactgccacaggggtctgccatgctgctgaattgagacgggccagggaggaaaagagggctgcttagaatcaaccctgtggaatgctttgaatcatgagtcacccacccgcccattcattcttttattcactctatgatgttcccggccaccttgaggaccatggagaccaggagacagatgcataggatgtgagtcctgtccctagagagagccaaggagcctgtgaggactccaggggctagaggagtggatggtcatgcaggggcttcgctggggccagggcccgtaccaccctcaggagccacacctggggccttgtctttgccctggacacagcactgcctggggtctccccagtgggcacatgttggggtatgctgggcaacaggcatctgaccggagtgggctctctggggaaggcttgtccttggaaagccccaccaacagaaatgctccccagagctcacgactaaaaggggaagatgcagcagcatgggcctttcctgggttatgtactgctctttatccctggcctgcacttccggggaagtatcagcagacagtgtcagcgtagcgcagcacatgctgtgatgggaaggagtgtggagacagcccgccgtcccgttgtcagttgtctgaaatcaggagccctcacgtagtcttcctgtgggtgttggccctcctgccgcagcctacctgggctctgtgcctggtgctggcagcaccctccaggatgtrccaggccagggagggagcaggaaggctcgagagcagcagcgttggtccccaggcccccctcagccccagtatctgcctgcccgccttccaccagcccctttaaccacccagtggttcctctgtgtgtgagttgcttgggtgttcccagatggaagcacgagcrtagttattaacgtgagtagatccgcctaactcagaacctggcagcccgggaggagggagccacttctgcgagtcactcaaggcctgagggccggggctgtggaatcccagagacctgggactgattctggtgccgtgtgttgccatttgtgcgactttggcaaattacccagccacccagagtatcacatttgtgactggagacgttagcggcttctgtgaaggatgaggggtcactgccagggttgcctgggtggactgttggatgagctgccggaaccagctgccctggtacttgcccggtacttgctgaaggggatgggggttctggatccaggtgcacccctctcaggatgcccctgatgggcctcgggactctcagccctcaagtrtggggtcagcacgctcaggggaagctataaatcactcctcattctagccgcctggctccaggatgtttgtacaggtgcccctccctctactccccagccggctgtctgggtccactgccggcaaggtgtgccaccacgtcccatgtactcagagaccccagcggactctctgtgcagacggggcatgttagcattgcagggacgtgccctctggkgtggacactgtccaccagatcggcagaggttgggggacaagcttctcacagattccaggggtacccggggaagccaagtacagcaggggcagaaaatagcactgtgcatggctggctttagatagggcagcaggtgcttctgatcgggagtcctcgtctgcatcccagcccgcgcactcccggcctctgaatctcccagcccgagactcaaccaaaaccaggaccatttctgctaaaccactctgtcttcattttatgttctcagaactcttttatttgggtttttgttttgtttttgagccagtgtgagggtactcatttgctccacagtggaatctttttttttttttaagctataacttagccaaaagctcaaagcatccctgaagccacccatgattttgcagaggaagacagtggcgcttaagcagggtgggggcccagcctcggctcacacagcaagtgctcagcaggcattccagcccctgcctgactccagagctgctcgtgtttttcctgtcctttattcttgtcagaaggctgaggagatgttcactgccccccaacgcccccagcacagacacacactttttgtttttcccatgtggcctggatttccacgtctgtcctgcccagctgagctccaggcacgtagggccggcgctycgtgacagctgacacaaggggtggcagctggggaggcagccagctctccggggcccattatccctgctcagcagccccagccgtctggtggctccttcctggggccctgcgggctgagggattagccatgaccctggcaccagcagctggatcggctaggcctagggcccacccctctgtccttagagcagaccctgtgcagagcccgtgctggccggggctgagagggttttggcagctgccccmctgcactccctaccccagcccctaccagatcctcctgtcagggacctttttccccrgaggagtcggggaccaggagcacaaaggcctgttgtttgcggagtatcacatggctccgtgtgtaggggcgcggctgggtgctgtgcagacccagttccatcccgggctcactcactgtccagcagtcactgaacctctcagcgcctcrtcgtcctcatctgtgaaaggttgtatgctcacctcagatgtgcattgtgagggagacactaggtaactggtgtacgtgctcagaacagggcccggcttgtcacaactgcttgacaagaggcagccgttgtcatcagacaggctttgacccaaggcctcctgactcctgcgcccgagtcatctgcttccttcctcctcccgggtctttgtggaggatcctttaggatgtcagagggttgagcagcacacaacctcagcggcccccttccctggaccacagtgcgacaagtggtgtcacgctctcagaagttgtgcagtgcacagccagctcgatctcacatggcaggcccggtgragggaggatctccaaccccgtggcagaagggatgcatccccaggtgttcttcacaagtcccactccactcaccctggctcaaggctcctctaggggagtcctcatgccacaggaccagggatgggccttggtggaggtgctctggacaggtgacacacctgtgtgttggaggctgagaaggtggtggattctgacagagcttttgaccccttgtcttcccagatggctatcgtgttcaaccaggagggcctgaacgccatccagccaccctgcgtggtccagaatttcatcaaccacaacgccgtcctgtacaaggtgttygtggttggcgagtcctacaccgtggtccagaggccctcactcaagaacttctccgcaggcacatcaggtaactgctcttctcaccatcttgggctgagcaagactcaggggcccagctgggatgtggcagcagctgtctgtccttcggcactgccccaaccaccctgtgttcttggtgggatggagaggtgctctaaaggtggaaacagttgtgtacggtggataaagaggtcttggggaactagtaaaatgtccctattccctgggtcattgtagggggccccacycacctgaaccaccgtagactccaggatgcatccagaagtgttctgtccccagcatgcttctgggggacccacacaataatgatattcatggaggaayacgctgggacaggtgtggccagcatggcgtggattggccttccagggaagccagggcaggtgctgcctgctgtctcccgctgagccatctttaccttgggtctcattttcccctggggagcctgagacagagttgcctgctgctacctgcatagctgccagggtaaatcagactgtgagaagcagcagctgccgggttacaggtcttcttaggtgcaggactcctaccgtgccagtgagcgtgttttgagtcagtggacggtggtctaggagtcccgtgggtgtcacatagggcgttctctgcatgatgctgttgtcgctgggcctgagaagcagcctcccagggagcagcctgtggaccccactgcgctgaggggccttccttccgccagctgctcaccgccctctccagcctcagccattttaaaaacggacactgagttaaagatttgctggcagtggagctgctcgaaaggatgttctagtggcttctgaaggcatctctaaggcacgttctggaaacctttggaacagtrgcagtgtcttgggataagtagctttccaggaggaccctttggagaacactcactgccccgctgtggcttgttcaaatcagctgcacatttctttcagcaaggggaacccacatcatcagaagcgttcagacgccggctgttttacctccagctgagcaaacagatgtgtcctcttggcatccctcctccggggactgcctgtggccatccacatctcctggctggtgtgccgcccggcatggaggggctgcagtgctgcggtygccctctcagcccttcttcccctagatrcctcttctctttccatggacacatgcagagcgtggatactttggaaacgtgcaggtgttcattttcctccgagggcaggtggccttcctagctgggcgtgtggctcccagactcaaggctgtattttcagggtttgggacatcatggtcccagcccctgcccactgggtgggagccaaatgctggaagcatatttttatatgtggctatataccaccaagagatattcctccaagttatgggctggaagaggctgacattttttaaaatgctgtttattccctgatttaagaaaataataatgctttaagtctatggaaaatatattaaattaagaggagttatattttatatcaactcctttctgtttttacccaggtcactccatctctaaaagaaatttactgtcagatctcctttcttatccactgtggttgggtttttctgttttctcctttttccttctggttgcaaaatgctgggccagtttccgtctcgacgctgggaaccattaacagcagagtgtgggctcctatcctgtatctgtgaggacgaggactccttgcctgtgtgtcttcttgtgtggctatttctaggttgccagtttgccataaaatgcataccaggagaccagacgtggtggctcatgcctgtagtcccagttctttgaagagaccaaggtgggaagattgcttgaggccaggaatttgagaccagcctgggcaacatagtgaaactccatccctaccaaaaaaaaaaaaaaattaaaaaattacctgggcatggtggtgtgcacctgcagtcccagctactaaggaggctgaggcaggaggatcgcttgggcccaggagtttaaggttgcagtgagctgtggtcatgccactgcattccagcctgggtgacagtaagaccttgcctcttaaaaaaaaaaaaaaaagcagactaagcccaaatagtagagaaacacacagagctaaaaaggagaaatgtttattctgttcacgtgaactaagtaactgttagtgtgtctctccatccccaaagctgattctgtgtccccatctctagggcactgtgccagggagctaacgtgggtcctctggtttctacgtgtatgttctctttctggataagaagtgtaatgcaacagcagccttttaagctggaccagttggaaagggggtttgggactctggcctctttccggccctcaccccagctttccaatttcctttgcccaatgacatgtcccccaacttcccgtggccacgcagggatgggggttccttgagtgggatttttctggacctgggatagagacagggacatgagtcttcactcgacaactgccagtctcctttgcctgtcagctgcacttttgttttttacgtgttgacatctcaaatcaagtgtgccttatagccagtggcatccatgcagaggctttggctggagctgaagtcaggttgtggcttgtgccatccaccaggaacattttgtgttctctgcctgtggttcgcattcacagagagactgtttccctccctccaccctgtgccagggtagagattagcgggttcctttgctctccctttctatagagtgggtttatttcttgctcgtctttaccctgaggacgcagcgcaggctcccagctttatgcaggttccctccattattctctccagcttgagccttgtttctcttaggcatgcatgagtggtacctctcaccatgtagagcgggaggcagcaaacttttttttgcaaaaggccaaattataaacatttccagctccatcccaattatttaatgctgccgttgtagtgcaaaagcagctgtagatatgtaaatgagtggcacggctgtgttcaaatgaaactttatttacaagtgcaggtggcsgggcttacagcctatagtctgctgagctcctctccagagcctcttaatagtcagtgatacagcatttatcaaacctaccatgtgcccagccctgcgtgagctgctggggatccagtcagggactaggcaggcacccagcttcctgccctcatgagcttgtattctggtgggagaaactgcacacaaggagagaaataagaaaagggtcaactgtggcctgagataaggggttctgaggggaagagaatatgtcctgggataccactgggtgaggggagccacttggaaagggcagctcaggatttccctctgcagagatgatactcatggcaactggaagatgacttgggtcaccatctgtagcattaggacacattctccccatccccttcgcctcccaagagagagagaggagatgaagkaaataaggctaaaagcagtgtggcccagctcgtggctgtacggctgagttgctgggatgtttgggggctaatcttatcatttattcttcttttaaacctattttttaaatccataagttgagaagaaaacacacacattcttcctttcattgccctccctccctgtagaacgttggtggtagttctccactggtgctattgggctagtccaggaacagactgcatggggcacccaaaatccagggtgctgtcgtgagtgagggcttgctgatacatgctgggagcaacgccctggtctggtgtgttagaggaaccgactctcttggagctggccaccaggtttctttccctgatgccttctcacttgcctcagctttccatcatctcttgggtgactggcagccacaggaggctgctcctactccctccgacccctgttcagaccgcacatagagaggaactgagcccagaccatctctcactgccctgccaaaagggtcttctggccagagctcccaggtcagaattagccagaagggccaggtgcggtggctcatgcctatatccccagcactttgggaggctgaggcgggcagatcacctgaggtcaggagttcaagaccagcctgaccaacatggcaaaaccccgtctctactgaaaatacaaaaaattagccaggcgtggtggcaggtgcctgtaatcccacctactcaggaggctgaggcaggagaatcacttgaacataggaggcggaggttgcagtgagccgagatcgggccacagcactccagcctgggcaacagagtgagactccatctcaaaaaaataaaaagaaaaacagaattagccaggaggagaaaagagccccttttgaaatgtcctggactccagctcttcctgccaggagaaactgttgtgttgcatgatctgtccaggtgagcagacactggccggcccctctgagtacccagctctggcccttcctggcacccactcagcacccacgtgttctccttgcggctcctgcagacttcccaacctccctgatctttgctgtgtctacctgcgcttggtggcccttcctccccctgggccttctccgccattcggcaactgctattcaggatctacagggaaataggtgggaaggtgccctgagctcagggggctgagccaggctgggctacaggatgagaaggtgggcagcgttcccctcccagctgctcgagctgttccagccgcaagcccacagggcttatgccatccccacagactccctcttcttggctgtcggtgccttgggagtagagatcctgggggccacatgacacatgtcctgcggggtgtttattttccccaggctcctccccaggaccatatttcatggcccccgtctggactggctctggtcagagcagcaggaggactgtcgggcacaccagggcagccaggggcctctgtgccccgctagcgggagggacgccgggtacatctcagcgcctgcctgcttggcttccgcccgaatcactccctcatgcatrattgttgcggcgcygtgaagtcctggagctgatgggtcgttggcagccagatcaggtgccccattggcatggcccccagcacgcagcggccctcagccagtgccctcctgtcctcgcacataggcgcctgggtgccaggggtgtgcattgcatcctgggggtgggagccacaatgcctcaccctgcaaggactcaaggaggggctgctggggctggyggcccaggacggtcccgtgccagccttgggggaagtcgtgggatggtgacagacagccttttccagaactcggcctgaggctcatggttctgcaattcttgcatttgcgtgccaatgcttcccagtgcctacaagcgtgtttctgaccaaccgacctgacattttccccaagtgactttggcttactccccaaagacatttctcctgtgggatctacttgcactttcagtattctttggactggtctgcctctgcgggtccccagtgggcctgtacgggccgggtgttgtgggaggcaggcgggagccagacgtgtggggtgagggtatttcagactctctgtgccagcttccgttgccaaagagraattgtgctgtgtgctttcttggacggatcctgtggaagcctacattctctgatttcctatttttttccctaagtcgctaagaaccaccagaaccctttgtattttaagtgctcacgtgccggtgccagcctgtccctatgtctctagcatgttccccaaaagagagtcccgtgggctgggagcactggcctaaataacaccaagaggctgctttgatgtgggccctctctggccgtgatattcaggtgtttagctgtcccaccgagcccttttcccctacttccctgtatagtgacagcacactttgggaacagggcctcagggaaaaccagatgtgatgctgtgagatggtagcagaggtcagctcattacatcggttacttttatgtgggaggagaaggtgaaccggagccctgatggggcacacatccrtgcccagggctggtgcccagcttgctggagcccagggctctgcagagccgggggccacgtgttgtgtgcctggggtgatgctgccccctggtgtcaggtggcggcagtgtggtccctgcattgaggttctaacgccggctccttcctgtcgctttttcagaccgtgagtccatcttcttcaacagccacaacgtgtcaaagccggagtcgtcatcggtcctgacggaggtgggtccctctgctgggatggcctggcctgaaactgccctcccgtgggcctaggtgtgggctgctgtggccatggggtccttggccaagctctccagcagggtagggtgggaaggacgtttgcctccatgccasrggccccaggaggttccagagccccctgttcctctgcttgcttcgagttttcatgctagcagccattgcagcccggcccagcacagggagaggtgaggggcacactgggcttgcagggacagaccactcactgcaagctgcccacacagaaggtgtgctgacccttctcccagcatgaggaattggaagaactgctctctaatctgccttgttcctgattttcaaaaaggctgtggaggcagcaccatctcagtcctttgtcctgcagtggtcctgaggctggcaggagtgttaccctgcccccagcactatgggtaacgggcgttctggccgttcagtgagtgttgctgtggccagtgtcagcccaggtgccctgcagtgcgggtcgcaatcaggtctcatggcatcagagaggctcagtgatctttgcacgttcacaaggctgttcacacggtgcaaggctggggtttgaccccagatctgtctgactccaaagttggatcttccaggaatttaggacttctgacctcaccagtgattcctgagcacctgaccccaaagaatttaggaaaggctaccctctgctgtttgcccgaagtccagagagccagcggctacttccctaaactcaagagccctctgccagggagcctgctgttctgaggatgcatgtgtgctgctcttctggggggctttgctggtctcttcctccctgtcctgggctggcctctccaacgaaccagcctccactccagtggcagtgctcgtgtccctcggggggctgccccagaacccagatggcctgtctgtctgtctgtcttttgtgtcagggtcctctgaggagccagcagtgtgctgaggattagacagagcacaggcgtgggcaggacctggagggaacatcgccatccctcaggatgttgacacatgtcccctgggaacatatcaggctttgggaacagatttcaacagagcctcagtgcctggctgagaatattatgagatgttctgtgcaagagacggctttcttctaagcttcagaatcctggggcttcttccrtgcatggctttgctctgggggcctcggcagcccatgcaatggaggggatttggcatttgcagactgagtgtcctctcaggggcaaggccagcagccgtgatggcagaaggacccatccagaagtcactgtcttggattatcacttgttgacctcagcctyaatctcctcatctgtaaaacgggaaggggtcagcctagagacactgcagggcccttcccttcacctctgaggtctgcagtcacctcctccttccctcagcacatggctgctagtcaggaatctgccaggactgacgatttccaaaaatagaaaagagaaatgcggtcagcaccaccttttccactgggacatcagcccctcctggacgcccgcaggctggcctgacagagccagctctgttcccaggtgcggaaacacgcttgctgctcatccacctgcccctgcccacctggggctcctccagtcctgccttggcctccctgggagtctggtgcaggaagccctcctctggccttaaagcaccccctcccttcccagtgggatgcccctgcggatgggcctagccccaccgaacttggagggccccatacattttttgcttttcgaaattcagtctagggtattagttaagagcacagactctgacgggactgcctggggtccggcccaagctaaggcgagtcgcgtcgcctctctgagccttggtttcttcttcctgccccagaaggattccggagtccagggagttcctgggtgagaagcacccaccgcagttgccaggtgtgcagtatgggcacggtctcggcagcygggtgccgaggcccactggggacccatgaacgccttcccagttcctctgtcacctccttgctttccagaacgtcatcagatcacttgctttgagggccccaggcatcttgtcctaggatggctatttggttttggataaccagacaacttcggaaggatttctgagattctgcaaccaggccgagagcacttttgtaaatggcgtgccatggggcgtgtggcagtgcagcagccaagctcccttgctgctgggcctgtgctgtcagcctgaggcagcagctcctcccgtcgtcggcaccacaatctcacagcgagatgtttttattaccccatttactggggcaagaaaacaaggcccagaagggttctgttatggcttagggtacacagtggagagtgggcagctccaaggtatccaccagggtctctctgactcagtgagggccttgggctgcaggatgagtggctgagctgccccactaggcttagcctctggcccccactggcaagagtgacccaggaggctcagaaaagctaagtggctgggcgcggtggctcatacctttaatcccaacactttgggaggccaaggcgggcagatcgcttgagcccaggagtttgagaccagcctgggaaacgtagtgagatctttaatccctaccaaaacaaaatacaaaaattagcagggcgtagtgttgcttgcctgtagttgcggctactcaggaggctgaggtggtaggttcatttgagcccggaaggtcgaggctgcggtgagttgtgatctcgccattgcactgtagcctgggcaacagagcaaggccctgtctcaaaagaaaaaaaaaaaaagaaagaaaagtgctaagggatgagtgtctcttacagccaggccactcctgccccctagaaagtatttcttccagatacgacaccaaggccttgaggctgtgagcaggggggccctgtgtgtcctgcaaagccggggtgggagatgcgctggtgtaggcctcagagcgtgggtgatatccaggcgtgggtccctcagagcgtgggtgatatccgggtgtgggtccctcggagcgtgggcggcgcccggacttggagcgtgggtggtgcccgggcatgggtccctcggagcgtgggcggcgcccgggcgtgggtccctgctcagcgcttccctccctggaagttcccagtggttacttcagcctcctgtgcttgggtaagggccatttttcttggtgaccagggctctgtccccagccctgtcgatctgctttcacttttttttttttaattcaggtgcacctggcacagcggctcacacctgtaatcccagcattttgggaggccaaggagggaggattacttgaggccaggagtttgagaccagcctgggaaagatagtgagaccctgtccctacaaaaaacaaataaaattagccaggcatggtggcacacgcctgtagtcccagctaccccagaggctgaggcccaggagttcaaggctgcagtgagccgtgattgcaccactacactccagcctgggtgacagagtgaaacattgtctctaaataaaataaaattgaggtaaattcacatacataagattaaccattttaaagcgaataattcagtggcaattagtaccttcacagtgttgtccaatcaccacctctatctggttccaaaacattttcatcactgagaagaaaaccctgggcccaccggcactcactccccatttcccccacctcatgttattggcagccgctgagctcgttgctgtctctgtggcgttacctgtcctagatattccgtagaaatggaatcacacaatatatgagcttttgtgtctgggttcctgcactcagcatgatgtattcagggttcctccgctttgtggcatatgtcagaagttcattcctttttatggctgtacaatattccgtcgtatggatagaccagtttttgtagctgttcatctgtggatgcacgctggggtatgaataacaccacggtgagcgtgggtggacagcatccgtttgagtacacgttctcagctctggggtgtgtaccccggagcagaactgccaggtcagatggttattccatctccagcttttgaacccagcttcacttttgtctttcatggatcagccactcccttcccctttggcccctaagcccacaacccccaaaacttcactatttattgagcacctagtgtgagccctcccttggctgatttagaggagacgggatgcagttcctgccctagaattcagatgaatctcctcccagccgggcacatgctgtccacaccttatcaacataagtctgagatggaggcctgttgcttccttttacagaagagcaaacctgagacagagaggccaagtactgtttccgaagtccacagagctaggagttcactgtcaggtttggaacccacgtctctctgactccagaatccttcccagtgcagtgccccacttccttggaggccttggctgggggcaggctgagcccatgacagtgtgtgcctgtcccaggccagctgcgacaggcacaggacttgagtggcagaggggagtgccgggctgggagggagaacagagcagggtggcctgaccagcacatggaaaccttgaggaaagctgagcttggaccccaggaggcaggcaggagcagcagagcagcctctctggggagcccgcattgtttagggtgtgagttcatttggaaacagcatttttkgggaaggaagactggcctgctgggccacagggccctcaccctcacctccttgggggtctctgtgatggcaggcaagtgggggtctgatcagaactcctcacttgtgcccggctctgcgccccagctgctcctagccatgtcccrcagctgctggcctcagcacctttgcctcccctgtgtcctccctggggccgctctccttctcccacccctcccaggggcccacatcctcctgcctccaagttccggcttcggtgctctgcaccrtgtcttcccgggtccctgacacactctccatctccttcctccctgttaaaaggctttggttttagaggctaaaaaatatgggtccaaattctgccctgtgcttttgagctgtgtgactttagaccagccccaaccctctctgagctccggtttccctgtgtgtaatgtgcagtgctggcactggccttccaggctgtgatgagcccacaggaggtaatgagcctcacacacctcgtgcctggcggccctcagagggcaggacctggccagtggccgccccgtgctcaccacagtaggtctgtctggcttcctggcctgaagcatgccagggcctcgtggcagctggtgtggggggtctgtctgtgtggtgyggcttcgcagctcctcggcccatggcctgacttccttgtgtatgttggcagctggacaagatcgagggcgtgttcgagcggccgagcgacgaggtcatccgggagctctcccgggccctgcggcaggcactgggcgtgtcactcttyggcatcgacatcatcatcaacaaccagacagggcagcacgccgtcattgacatcaatgccttcccaggtgagtggcggccaggccacctccactgaccggcctccagagactgtcctcaggtgaccaggcaggngaggcggggtgactgaggccagaaagccagctttctccctcaccacgrggtccggggaggtgcagccccgagaagcctcagmctcacctgcgcgatgggcttacggggtgtgcgaggagggagggagagctgcacgtccacctggggagcgccaggcacagtggccacagcacgcatgtccctcacctcctctctccacctgcgtcattggtggatcagcccctcccccaggccctcctcgatttaaggagcaggaaggaccttgaagggattacagccccctgcagtttacatgttgggaaactgaggccctagagaggaggaagctgttcaggccccacagcacattggtggcaggccagagactcccaggctcacgttgcctccaccaccctgaactgcagcgccgggcagaggcctggggaggagccctgggctatggrgtctgttccctgctgccagctgggccctaggaacccactggcattgagccaggctctgccatgtgcccctcagctctcagtgaggggccctatggggaccgcaggagcagagccccagcacagggcatgaggaasgatggtgtgacatcacagctcgcggtcaccaggctgcgtgcctcgccctggggacaccaaggctcagtggcttgtttacctcccgcagcagctcagagacagagccgcgcttratgccttggtgccygccattccccagatgggggtcccccgttcctttctccatcctgacccttgtaaagcatctgctgtggaggtgaagccagccttgctagctgctgaggtgcaaaaacgttcaggaaatgcctcctgccttcagagactgtgcctggcaggtggggactcggggttgtttatcgtggaggtgaggcaggaccttggccccacacactggctgggcactttctgtgtgtgtcacctccgctygtctgagagcatgcgcaggcgcagtcagcagcaccggccacagcaaggaagccaaggctcagaggagtgtgctggctcctgtcattcagctggtgtttacccagggctgctgtcgcccagggctgctgtgtgtcccagctggtccagatgctgatgcagcttgagctycactgccatgccctgcctggggagagctcacccctgtctggaggaggcggaggacagagcgggcggtcagcgggctcctctgtgaggtggtgacactggagcacaggggcaggtcccaggagaggcaccgtggagccctgtggctacagcaggtgcagctgcggggcaggaaggctggaggacagagtcaggggagctgcgtgtggtgaactgaggacgttggagctctccctgggagtcggggagcagccaccgtgagatctgtgcttgtgaactgaaagggcagacccgtgcgacgatcgtgtttttctccattgcctctgggtgcagtggggrggaaaccatgggtttagctggagctgggatttcatggggttttgctggcaggtatgagggaaccagggcgcaagggacattcaggataatgcaagggacgttcaggataaggaagtgtgggatctaaaccacggagcatgttttgagtggcagaatgaaaaggggacaacgtcagtggctggagggccaggggggcacagggaggcctgttagaagagaagttctggaaggagggaggagacaggagagggtgggaagctttgcacctgagcaaggccagtgcctcccaacacaaaatgtgtagatggtcgcgatctatgggtgcagataagggatggccttgtgagtcagtgtggggcactgtgagccagtgtggacagggagggttcttccagagaagccaagagaagggccacccagatggggtgggactatggctgagcctggcrgagactggtgagggagcctggtactgaggagaggcccagggctctggcagggcagagctggttccccgggagatagctcagtgtgtccgccttaccatagagcacccttttggggccaagcagagcagcaggcctgttctcctgcaccccacaggaggcaccttgggccatgggtgtccagcagcacgtgggtgggagaggcctgggagagggccyctccagagaggggctggctctggagtaataaccgcaacagctgcaagcgctgatgacaccgtgagccaggcctgccccgacgcctcacttcgtcctcacgaggcgttgtgcaaagggccgctggaatctctgtgttgctgataagaatgtgaggctgggggttgagtggcttgtccaaagtcacgtggtggagctggatggggcccagactgtcagccccagcctttccacctctcagctccagccatgggttcgaatcttgcctctgcctttacagtctgtgatggcacaagccacctaacgtttaagtctcagtgttcactgcagtgggaaccagtttcccaccctgcagacagaggagatggcttttgcacagtgctggtatggagctggcaccctgccctgcaggttcatgcctcagtccgctccccgagctcctgtttatcctcaggcctccgtggaggcagccgtctctgcaccaccacagaaagcggcctccctgccctgggccactgggcgttgtctggggatgctggaggaggttgctggagaatggctccctgttccctggcgctgacctgatggtggagctcctccactgcatttctccctaggcacccaacagccatgcccgtgcccgggacacctaccctgccctccaggcctagcccagggccgacggacaccccgggtcctatggtgggggacctggcaccatgtggtattcaagacacacacaagaccaagggcgtccttcagatcccactctgcctcttaggagccaccttgagcctcagggtcctcacctgtgaaacgggctgcaggggtgcggtgggctgaggaccgtggcgctcacagcccagtggctgctacttcccgagtgctgtgaacgccatggacgtcatcactgccctccccgtggtggttaacggtcatgcctcctcatctgtaaactggggacagcattatgaagattaggcgagaggatgttgcgggacgctcgcacagtgccagctcgggaggcgccgcttgccggccagaatagccatctttatttccaccgcgggcacctgcatcccctctcagacttgggcttcctcaaaccacagcagttgtttgctgaataagtaagggcatgggcagattcagcagtctcatcttccaggcccctgggcactgtaagaggtggcacagggtgcccccgtctgaaccttcattcccaccctggtggggctgatggttgtaaatgttgtcccagaggacagcccagggtttttgaaaactcccgcccctccaagttggctcaggcaggcagggcgcttgccctgtgtgagtctcttttggagcagtttgctgggagccagcagaatcctcccctgagatccgaaacctgcttggtggctcccgagggctctgcygatgttcgcaactgtgttaggaagcacttgccccaggcaggtaccatggtttctgttctgttcccctctgttaaggggagcatgtgatgctgcgccctggagcttgtctcaggcctggatgttgctagtgatgcccagcatttccgttccttggctgtgatcctcagagaatgggacacagggggcctccctgcaggtattttgtggtgagaaggaagcagactcagttggggcggcagctgctttgtgaagcagacaccactcacatcccagcctctctcagtagtgccacagcagcctccacctgggcggcagccttctcttctcagtttgcagacagggaagctgaggctcagggtggaagcggtctccgggactcagcctgaggccagactcagctgggcctcaggagtatttattactccaagtgtgtggagctggctttggtgctgctacctccagccacgccaacatcccctgcacatgtactggcttttaccatgcaagtggatgggtgggtgagacagtggagctgtgcctgagaggaacagggacaagcaagtttcatcctcagctcaggttcttcagcttctcacaccctggcaacagctgaaggtcgaggagcacgcacctggttgggcgtccaagctttttgactcccctcagccccccttatctgctgagcctcacgttttctctgtaaatgggacgctgacagcacaccctgcctcatcccaggagcccatcggttctgcctcctcctcctcctccctgcatgatgcgtgcccctggctcacgccccttgtgctgtctctctcccacccccaggctacgagggcgtgagcgagttcttcacagacctcctgaaccacatcgccactgtcctgcagggccagagcacagccatggcagccacaggggacgtggccctgctgaggcacagcaagcttctggccgagccggcgggcggcctggtgggcgagcggacatgcagcgccagccccggctgctgcggcagcatgatgggccaggacgcgccctggaaggctgaggccgacgcgggcggcaccgccaagctgccgcaccagagactcggctgcaacgccggcgtgtcgcccagcttccagcagcattgtgtggcctccctggccaccaaggcctcctcccagtagccacggagccgggacccagaggggcagcgcagggcgcagagcacacccgctgggccagcagctcccaacggcgatgctactactaagaatccccagtgatctgattcttctgttttttaatttttaacctgattytctgatgtcatgatctaaatgaggggtagtgggggatggaagagagtaccaggtggtccaccgttggggagtggggccgtccgcctgctctctactgtgcagacctcctaactgagtttacacacgcttgtgtttgcaacactaggtctggatgrgaggtgaggggtgtgcgtatggctgccatgccrgtgtctgtgcacatccctgtctgttggtctccatggccactgtggacygggacccttgggggaagcctgcccatgtcgggctgtgggaggctgatcrgtgcrtgtgagagtggcttcccttctgcctgactccccactccctgacctgccccttccttgtttttcctcctactggtctccaccaaggctttgttagcccccaccctgcctggtgtgcagctaacccctccctccccacagccagaggaggccacagacccctcaggggagttccgcgctggkgtctgggctgtgctccctcactaaagggaaggaaaggaagctgggcgtcctcygggccccccaacacacgtcccatttagccctgcacagcggtctccttcccctaagccagcactgctgctccctggagcccgggaaggaggctgcctggctggaggcccgagccratggcgcctgtgctgaggatttgtgctgtgatttgggcaaatcattccaggtctttgggcctccaccccctygtctctagtggacatttgagatcagagagcaccacagggctggctttgtgccctaacccctgggatgcagcctgcctttccataaagtcacctaggtgaggataggcgcgggagcctcggcatgacaccatggagatcggggccctcttcccagtgggttcactccttttcacacctgctgggtccctcctcacccagcaggcctggtccacctctcattgcaagccccaagcactgagccagcaggtgccagggagccacccgccccccatmgcttctgcacacctcagactcaccccatcaccttggcagcaaagcactggctctgccgtctgacccctgatccaggcagccccctcygcagagaaaagggttggggagaagcctctgcagtcctggaagatgtggggtgctgggtgagaggcatcagcccccacaagtatgtttttgtgtcttaagatagcagtttactttgaaaaagtgaaaaaggcttccgggctgtcctctgcccagtgagatggaggacgctagagaaagtgctgagtgtcccgagagaggccmccgagccagtgcatggaggtccttcggcctggctcagctgggctgcaggatgcccactttgaggagggaggcacagggcttgggcgaggggcagaggccatcagaactgcccggcttttttggaaactgaggacccaacaactaaccacgtttacacgacttgagttttgaaccccgattaatgtctgtacrtcacctttcctagttctgaccctgagccctggggaacaggaaagcgtggctggcctcttgcactgctttgtctccaaaataaactactgaaatcaaaccgcatttcacacgtgtttacacatgttgctcaagtttgttatgtcatactcccagtccttaaaagacgtttaataaaacagctttaccttttaaaaataaaatttcaatcccagtctgcctcaggtacgggtgggggtgtgcagcgtgactcctggctgtgttcctgtaccgtttgtggcctccggggtcttgcgcgtccagggcccagataccgagtaactgccatgtggtgtcgtggtggcgtccataggcctccgtggtggggcgggggcggggctgtgggtgtgcagggcagctgcattttccaagagtggagatggaggatggagatttgcttcgtaaaggcctgggagctacatgggaggtagggaggggccagccacacccagggctggggggccggtggactctgcccagtgaagccaggggagtgtcagcaatgaggggcctggacagcgacgcgggacccgcacctgggagcggcagagatggagcccagctcgctaaacgtaccctaagggtgcacgctgaccatctttgatccctggacagtgtccatagagttgtctccccttcggtcacattgtccctggccttggagtttctgcctcagggaaagacccactaaaaccacccgggctctggcggcctcctcttctccagagcatggtggcgctgcctcctgagcagagtcactgagagtgtctgggtccaaggaagggacccacttagcaaaggttgttgtgtggtgctgtgcaggcacggcgcctggagttggccccgccagcatcggggtggcttgggsctctggttcctaagcttctgcttctgagttggtcagcacgttggctctgcgccctgcagtgcctgtcttgatggtggtccctggatgtgctgaagggctccaggagcaaggggccagaccacactttggctgagtccttgggtagtttcagagggtcacctgcacagtctgcattgagcaccctggggctgaggccgtgggtcaagttctgcctgacagtgctttgattatatggtgatgtgattctgcaaacataaccccccaactgagtgccagctgctgggtgtccccaccycaagagccaaggggaggccaccctggaactggtgctttgcccttggtgtcatggaggtgtctgggtccacacgtggtgggtgggctgggcctgcagtcacccagcatggccggcgggattggacccagctgcaacctggcaggttccatggggcttcctgtgcctgggcctgcctgtgtctcatgcctgtcaataaaggagaaagcaacctgggaaaaacattcctctctgtacccaggggactgccaagtgtgctttatagaaggctggaagaccgactgaagtaggaagctgtcacatgtttgagccaactgagcaaagcagctgttgcctgccagacagccaccccaagaccaagggagccagcctgtcgtttgtccttctagcctggaagaccagttcttggctcttgggcactcacattggccactggccacaactgctgaatggcttcactaatgtccctggggtctgtatctgccctctcttctattccctagaaactctggccgggcatggcggctcacgcctgtcatcccagcacttagggaggcygaggcaggtggatcacaaggtcaagagatcgacaccatcctggccaacatggtgaaaccccatctctactaaaaatacaaaaattagctggacatggtggtgggcgcctgtagtcccagctacttgggaggctgaggcaggagaattgcttgaactcgggaggcgtaggttgcagtgagccaagatcgcaccactgcactccagcctggcaacagagcaagactcctcaaaaaacaaacaaacaaacaaacaaactctgatcattcacccggtgggatccccggcagctccttctccttcccgagctgtggctcatgggccattggattcagagaccttgagctgggtgctggctgccctaaaggagcacgacccctccagcctggtgaccgggaggcagagaagtgcagctgtccttgacaaaggcccagcctctgctgcctcaggccagcctggccacaccccgatgccacagtcatctgccccgcccaggcataagcctgactcaggtgatacaggcgaggcttctcccatgggtcctccccttgtgagaaagggtctgtgctgtgtaccttctctctgcacagccattgtcagtgtggtttggagtgagtgagcctcccgcactgctcaggggagagctggtgagcatgactccatggcctcctgctggttggggtcttcttctgattctcacccgcaggagcacccagacccccccttttcagaaatgattacattttcccttcaagagtcatctgtgacctggtggtgtggagggactgtcccctcctgcagcctggccgacccccttcctccagggctgtgtggaatcacctctcagaagctcactctgaaaagccactcacagggatttcaccaggatgttgctgttcctgccgacacctgggctttgtgacaaatgctgtttgcttcaagctgttcacaagcaacttcaccagaatcccaagctggttcgtacttaatttgtgtacatacatatgcataatatacatgaccatgtatgagatacagacaccatggcttctgtccattggctcattcgcctggtcgcatgttcactccatgaggttaggacactgcgggtggctttgggatgggtggtttcagggacaaggtgtcgctaggatctctgtatttgctaactagtcttgttttgatttctaacggtctagtggagtacagttaatgttgtgtttatttctgtaactgtaggggtggagtataaacctaacttttggaaacatgaagaaataaacaatagcgccagccgttcggagggtgtccttctgtgctttgcagggggcagggggtgcgcattagccgccatgagcagcccatcctcatcagagaaacccagacttgccgagacccctcaaacgactcaacaccattgcagtggttttctgtgtgggctcctgatcatcaccataatctggtaaggagatagtaagtattgtctccattttatagatgaggaaactgaggcactgagagggccaggagcgcctgcccaaagactcctgctcattaatggctgggctggggagttcaactccagtcttaggtccaaatctgagttcccaccatggaaccttgcctgctcagactcaccaggcagagcctcagggacttggttcccaaatcccaactggcctctggacttggctctgcctgggaccctggagggtggcagcgatgcctctgagcctcacccacccacaatgcccatgtctttcccattcctacctggaagacaccacgtgggcagcctgcgaaggccgaggcccctccctgcaccctctccaccactgcctgggatcatcaccctccctggcttgctcgtgtttgagctgcaaaggccaaggacgttagccccagaactgccacctggacaggtgaagtgactggccaaggctaaccagccagtccagcagaacctggctcgaacccaacctcctcctggcctgcaaggagcgccctccagcgtgggcgtgtgctcctcctgctgagcgtacttttgtccccatgggttgctttggctgttgaagggtgcagctgtccccgctggacagtgagcttcttaaagccagggcttgtctcagccatgctcaggcctaccaggcccagagcagccatgcacaaatgtttgacgagtgactgaatgatgggccctgatattcagccagtacacatgggtcctgactgtgtaatcctcacagtccccacgcttcagtgttctgagcatcatccccgcctgtgacttgggtgagtcatttcaccttctctgcctcagtttcctcattcacaaaactgggactaagagcagcccgtgctctagtgaagcgttacatacacgagatcttcagacgccccacattcctatgccttcttcctaggccagaagtcatagcagggcctaataagtggttatgccaagcggtccctgcagctcagaggctcaagtctgatgcctgtgtcctgcgacaggcactagactggggctgtcagggcctccacccggcaccacaggtgactggatggcggggaccatcagggaggggcgacctgatctcaggaaacagagcccgtgtccccacctggcgctgcctctgcatggcccagctcaggtgtggctggggacggggagaggaaggaacctggaggccctcagcaagtgtgctttaatccctgcacacactctttgaggcaggtcagcattcccgttttacagatgaggaaactgaggctcagagctaacaaagtcacttgctcaagatcccacagccaggaagtggcccagaaaggaggtccccaggaggactgaacctccctttgtcccttcgcccaaatccagtgcatctcactccactcttaagttgagaggcgaaaaaattcagaggaaagagcccagaacagatttatttttctttagataaagttcatacagaatatgttacagtcagkagttctcagctttcaccaaaaggtcagaagttattgcagttgtgcccagkkgataggatggagraagggaaacttctagaaagctgcctgtgttcagagaaggaatcgtcaatgtttaaagttgtggggctgccctgcaaaggatgttccagggcaggtaggagtcaggagtaggagacaaggcgcgtagggggcgatagggtggcctgggcttgggcaggctggaggctgcctccctaccggaagcagcgtccgggccatctggccaggacctgccaaggggacagcagagccagggccacagggtgccctggggccagccctgccagccggtgtctcagccccgccgtagtgcctgcagctggtgggccactttctccagctctgcytcaatggccgacaggctctccagctcctggtcctaggagagacattggggttcactcgggccagcctggccagtggcatggaaggcacagtaagccagaaaggcgctgggttagctgtgtggcctcggacaggtggctttgtctctctgtaccctcatccatcatggagacagtgataatgagcttactgtactgctctcgggatcattatgcacaagaaggtggctgatgccgggggccctgtccccacactgctcttggtggcctcttatccaggccccacttcctctcaaatggtcccgcacaggtgggagtccgttcttttagggcacatggaaaacaaagcttacagtgccctgaagagcccccttccctcggcctagcccatggttgccaggacccagggtgaggccagcctgggacttccgggtctgtcttctgcagccttcccacctgaggggaatgtggggcctgagacagggctacatgctgggggagctgccccacatcagcctgcctagggctgggctttgatccctggtcctgattgtgagaggatcctgaactctggctacccaagtttagggaagcagggacccctcctctgagccctgttctatgcctgtctgcagaagctttcaggcctcagaacttggacacccacaagagcacaacctcaagacttagagcaggagcgcagggaaggctgcctcctttgacctgggaggggtcattttcccggggtcactgccagatttgaggctgccgagggcatcctggcccagggaccccgacattgcaggccgtggaaatagactctacagccccttagtcttggaggaggccctggggcaggtgctctgcgaggctcgggtttctaagaagacccttgggctgtgttgaggaggcccccaccccatcctctccatatgcctcaggggtccagtttctctgccctgcggtccagagctccctctgcttgtggagaaaggaagctggtggcacctctgggcccccattctctccagctttgtcctcagcccctcgccctgggctcccaggcacgtgggcagatgccctctcccgctacagctgccaacatggagccttcttcctctcagactgccaggcccagagagggggtcgggggcccagtgaaggggccacaccctcttctaggtgggcagagaagagccttggggtcagggctgcggacaggtgtcagccttcccacagagcctgggttcctacctggacactaggcttgaaccaggtatcccagccgcctagctgccagggaccccaactcccccctgctcctgtgggctgtgtccccacgccccatttgtcttccccaggggccctggttttcaaagcctttgtgtgttccaatcatggtaatgacgtgggcagaggagactccttacccctacttcataaatggaactgatgaggctcggggaggggagtgaccctcccaagtccacgcagccaagaggaggcagagcccaggtcttccagctcacatccggtgtggctcccacccactccccacaggcaagagatcccttggccctgcccctgccctgccccgttaccctcatgggccagaggcagggcctgagcctgggaggaggctgtgcctgggctgcctgggggccaggaggggacacggtcagacccaccgcatggtttttccagggcaccctactgccttctggacaacgtccccactcagcgcctcccccgctgccacaggctgacctgagctcctcccatctcccagccagctttgctgggtgccccctgtgagctggggtgttctcccaccctgagagcccccggtctgagcatctctccatccccagacttcggcgggggggccctgtcccctcagtggggcaggggcagtgtgtctgggtgcggctgccccctgctgctccgtggcctggcacagagctggctcccgccccataccaacctctggtctgcggtttgcgctgccctcytcctctttcttctcctcggggtagcctcggacctggaggggcaggcccgcctcaaggctgtcctcccrggaggatggcctccagcctcgtcgcagctgcggcccagggcccctgaagcygtaggcccgggcccggaaggagagcttcatggaactgtyccggttgtcctcctcctcctcctgcccctccagccgcttctcagccgtcagctccttggccagctggtccatcttgctccagcgtttggagtcctcccactccttggagagccgctcctcctcctgctccagctctccgctcttcccaccccggaagaggccttgcgggaccactgcca

SEQ ID NO: 94536 - DNA, 17984 bp, Homo sapiens
tatatttgtggccaggcacagtggctcatgcctataatccctgccctttgggaggccaaggcaggcagatcactggaggccaggagctcaagacaagcctagccaacgtggtgaaaccctgcctctactaaaaatataaaaattagccaggcgtgatggcagattcttgtaatcccagctactcgggagactgaggcaggagaattgcttgaatccgggagacggaggttgcagtgagccaagatggcaccactacacttccagcctgagtgacggagcaagacactgtctcaaaaaagaacaaccaaacaaaccaaaaaacaacctcacaaatatttgttaaataatgaaatgaattcataaaaacaaaagagggagcctctgtgaagcaactgtaaaatatattgagtcagtgctatagtttggatgtgatttgtccctgccaaatatcgtgttgaaatttaatccccagtgtgatagtgttgtgaggtagggcctagcaggaggtgtgtgggtgatgggagtggatcgctcatgaacagattaatgcccttcctggagtgtgttggtgggtatgagtgagaggttctcactctattagttcctgagagagctggttgtcaaaaagagcctggcatctccctcccccttgcttcttctctgccatgtgacctctacacaccctgccttcccttcttccatgagttgaagcagtctgaggctctcaccagtgaagatgcccaattttgagctttccaaccatccagaaccataagccaaataaaacttttttttttttttaacaaattactcagagtcaggtatttccttacagcaacacaaaatatgctagacagtgaggtgagttaatgtaagtaaaacatggctgggcgtggtgactcacacctgtagtcccagcactttaggaggccaaggtgggcggatcacaaggtcaggagtttgagaccaccctggccaacatggtgaaacaccatctgtgctaaaaacacacacaaaaaactagctgggtgtggtggcacacgcctgtagtcccagctactcgggaggttgagtcaggagaattgcttgaacccaggaggtggaggctgcagtgagccaagattgcgccactgcacttgagcctgggtaacagagcaagactctgtctagaaaaaaaaaatatgtgtgtgtgtgtgtgtgtgtgtgtgtgtgtgtgtgtgtgtgtaacacatctgcaatcccagagagcagaggaattcatggttccatccccacctctctggagaagcttgaggctctcgtggtctggggcatctggcatgaagtggatagtggagtcactagtatcatagtaggcaatgcccaagtatcctgaattccacagcacacacagatggatctgtccagcaaggaagaaaggaaatcactattagaatcactcataagtgtagggtttaccatgtcttatataatttaatcattttctcaaatctctgagataggcatcatcacccccatttagtgaatgtgaaacagccactcaggaggtaagagacttgcccagctcttcccaaccctgttttttttttctttctttctttgagacggagtcttgctctgtcgcccaggctgaagtgcagtggagcaatctcagctcattgcaacctccgcctcccgagttacagtgattctcctgcctcagccttcccagtagctgggataacaggcacgtgccaccacgctcggctaatttttatatttttagtagagacggggtttcgccatgttgcccaggctggtctccaactcctgagctcaggtgatccgcccgcctcagtctcccaaagtgctaagattacaggtgtgagccaccgcgcccggctcccaaccctcttttattctaacttcccatcaactctccattcaagtttctactcccctcagagacctcggccagctcctcctcctcctcgacttcctcctcctcggcctccctggggcccggcactggggccgggctggggaagccggaggaggccgccccaggtctcggtccctgcggtgtcctccttgggttcgctcctaaggaggccatgagcttggaggctctgcggatgcaaaaagtgagggcggttcggaagcaacgattcacagaggaggccggggtagggtggcgcgcagaatgcaaagcrctaagtacttctgctacagggctgcggggcagggctgaggggcgtggagagctgtggacacaggaggtgaattctcgggtatttaactaaagtacagattgtgggaaactccacgcgccccaccctcattcctgtcacgcggaggttaccctttggaaggaaggggtctgagggccctgtggggcgagtcgtgcacgtcttatgtctctgcctctgccaaccacgcgccaggaccccagcctcacgcgcttatcttcctcctcccccagctgccgccatcgcagcgttttcccgccttttcagtaacctgagtcgctacaggtgggagaacgccccgctgaccgaccgccacgagcctgcaaaaggagcgcgccggcgcgtgagcgaggtgcgcgcgcacgcgccccgccctcctagccgctgttgattggagaggcccggatccagcctagagatccgacagggcgaggaggagaagcggactgccgtagctgaagagtctggacgctgattggcctatttgccttcggggcgggtccagaacgttcaaacttcccgccctctgccgttgcttagcagccgggcctctagcactcactgtttctgggatttgattggcgcagtgggaagcccgcgagaaggtcggaccagggtccgtagtcccagtccctggaaggggtttgggaccgttgcgggggttttgagggggaggccaaacttaaagagccagaggcgcttattttttttcctgcaacaactcttaagttaatatttgtaccctctgagttaatatttatacagagcttagaacagtgcctggcaaacaaagtaagacctaaatgagcggtgtttcaaataaataagcggaaacaagcaggacttctgtctcagccctaccgtgcctgtttcctgggtacagggtatgaccacccccataatggcacgacagggcctaatttattatttaaacccttcaagcagaggtggaagcattcgaattacatcaaattctggcagagagaagtagttctgatcagaacactcacacccctactgggacatgcccataccccttcgcacttctacacacccctgaagacagagaggtatctatcattcatgcattcggcaactatttagtgcctattttgggccaggggttggactcaaagcggtgaacataatgaagtcactgctccataaagcttatttgtgcgtctgtgtgtgtgtgtgtgtgtgtgtgtgtgtgtgtgtgtgtgtgtgttgcgggggtggggttatgagggagaaagaaaaaaaatatatatatatatatatataatccctttaaatgcaccatcctccccagctttgttcctagtaccctgagatggggagattcctccccagccccccaacccaagaagttaggaaagatggtgggggtgagatgacctagctgtgctaaccagtaattggaaaatcccctccagcaagaaaggtgggggaacagagttaagggctgggttaatggttacccctggcaaatctgttgagcaatggagctatagaaacttggaggaggttggtgacagctctggggagtgtcagggagggacccaccttccaatctggggtgtgaagagattagggactagtttaccaagcccaggaaggggagggagtggaaagagaagcccagagagggaaagaggagctactgagataggagaaatgcagggacagggaggtgagatggagggaaacctctgttgcaggatttgggggtacagccctggctctgctggatggttccaggagagggcagcgttgcctgtcacctggtaaattaaggcacgataccctgtgggtagtcatgccagccagccaaagtcaatattgatatcaaggcagctgtagctataaagctgtaggagagaaaagagaggccgggagaggctgccaaacctgtttgatcttcaagctggccccatttacctaaggcttctcttggacacagaccagttggaacaggagaggaccctgagaagtagagttgttttgatcccctcccctcaatgggaaggggtcctgtgtgcagattttgagggtcaccatgagggaattcacacccacacagaggcatggaatcatacccttacaggatgttacagttcaagggaacgaacaccaaagatagcctttctgtcgggaggagagaaaaaggccctcccacaagcaggagaaaacccacagaagaggaagcacaagaggaaaccaccaactgctggtttccagcagcacatcacrtcactccaccccactcctcccccaagtctctccctttctttaagtttcaagctctgttttagttctgtgttcttgcactccaccatggttttctggaactgtaggtcttttgttggacagagggtgatgaggaggatagagaagggatggttggacaggagagaaattcaggatatggaggctggaattctgggtttattttttcagcaggtcataaaggtttaatagaaatcaaggttactggagagagagctgctcctcctatgtcctccctgcttatttatttaggtgtccccaaggactctactcccactattctgtctgatctttctttatccccatgacaggaccagctaacaacacccctaccccaccccctatacacatacttcaggatcgggccatgataatcccacccctctgccccatctccaaggcaacctgtcagtgagacgaggacaaagggcacaggaaggggccccaataggaaacataagtggaagcacaaagctgaccaagctacaggaacagacccctccctgcaacaaagccccttgcctcggctttatgtttccttcgcaaaagacttcgtcatctcccttcccatccctaactctactttctttttcttttcttcttcttctttttttttttttttttgagatggagtttcgctcttattgcccaggctggagtgcaatggcaccatctcagctcactgcaaccttcacctcccgggttcaattgattctcctgcctcagcctcccaagtagctgggattacaggtgcccaccaccccgcctggcaaatttttgtatttttagtagagacagggtttcaccatgttggccagtctggtcttgactccctgacctcaggtgatccaccccccttggcctcctaaagtgttgggattacaggcgtgagccacctcacccggcccctaactctatttcctatgcccaatcccaagtgtaggccacaaggactgcaagtcctagtgctgagctgggcccggagacagtagactgcggggggcacaggacctactgagacaccagtctgggcagctcagggagtgctggcgtcaccccttccctaatcccaggctgcatggctaacggttcctatctgcagtcccagccttccacttccgagttcttctctcagaccacagtcccagcaacccagaatttggattggagtctggaagaaatgcagaatgattaaacgaccacctttccatttgaagtccccatccctgaatcttcacgggtgtgcccaagctgttagtgtcaagttttttatatgagggtcagtcgggttgtactcagattaatgaagcagggaaactgaggcagaaaagagtcctgtgttcaggagaggtcggagaaacaaggaggttttcaggactcctccttaacacccccatccccatcctgtgggagatccgaggattccccttccggactcactccctacatcgtcgagtcccgcccccctccagtcccctccccaggttcagggcggggccggtcggtgagtcagcggctctctgatccagccmgggagaggaccgagctggaggagctgggtgtggggtgcgttgggctggtggggaggcctagtttgggtgcaagtaggtctgattgagcttgtgttgtgctgaagggacagccctgggtctaggggagagagtccctgagtgtgagacccgccttccccggtcccagcccctcccagttcccccagggacggccacttcctggtccccgacgcaaccatggctgaagaacaaccgcaggtcgaattgttcgtgaaggtaagaacacttctctcctcagccacccaaattcctggaagccaactctcacctttcccccggtccagccttaactccccaatcccttccctccttgactcccacccccaatcccacgtgcactctttggttgaggggtggttttgagaggggaagacattaacttgttagcaagtaatgagaattctaggatcaaccctgaaaagtttgtaaaagtgcaagtttctagcagactaaaggaagggaagtggagaaaaaggagaattcccaaaagtgagactggggtggggttagagggcgagctggtgaagggacagtgggggcccagcagggtttagaagggacagaggggaacctcagttaggacatgtgtccctacaagatctgagggtgagtagtgcagtaggagaggtgtgtgtgtgtgtgtgtgtgtgtgtgtgtgtgtgtgtgtgtggatggagacgcttcagggaagacggtgtgttgagggaggcctgagagtgagagcaagtaaattgggaagctttggaggggcggaacaaaacaggagactgggatcggagtttgaaaagcagagctggagaggtgatcgggtggcattgaatatccccaggactggggaaagggacagaaggggaggtggcaagaagacgtgagtttaacgtagctaccacaaggatgggtgggagagagatcagacggaggagaagagctcggttagggcattttgggatttgggggttggagaagtagaagacttgccccaactctctcctctctctgcgggtgtgggtaaggagagatggtcctatggcatttgggtagcaaaactgcaggcagcaggcttctcggtgtcacccagcccccctctgattgcagcggccgctcccctccctaccgctgctgcattcatttcccagtcttgggacctcctggctgtgcccctccctcccttccttaacagtgtcctcttctccccgctccgtttgtgtctctccgttggcacgcacgtctccccactctccactttcctgccgcctttctttccccttccccccttttgtttctctcatctttgtgtgtctctgcctgtgtctccctctcccttctgcttgggtttctcgggcagccattccctctccctgggcccagggaagtcggagcctgcttgggtccgcccccttaggtgtggtccccacctcactctcacattcgcctccggggctatttttactcgtgggtgaggctgtgccgcagagattccggccctgtgtcctgtgrgaggatggttattgcagtcagaggacttgtgctgggagaccctggcarcaggttaggggtagccttagctgcccaggcctcatcctcactgtcccttcccccacatccttgacaggaaggaagccggagacagagagatgaatcaccctcagcttagggggaggtgtcccttgggccaatgaggtcaccacttgctaattagagggcagcccctctctgtagggccctccacatctctagcgcgaggcccagggccccttgactagactccccacccaaagacaccttggattggaggtgtagagaaccaaaactctggctcccaaaccccacccacctctcctgtcttcagactctactcccttcaggaacccagaaatccaggcttctagcctacaactctggcctcactgaagttccacacccttccctctctaggattcagatcctcccaagttctccaggacctcctccctctacctacctcccacctgtcctcagtgtctggggaaccagaagcctgcctttgcaaaacagtttcccattgatctgccttaggtttgacccaggcccaagggcaaagagcccatagtgaggggacagtgtatgtgtcatgactaggcagaaaacagctggtctgggagtgggaatgcagggactggcctagggatgggtggggtgcatcaggcataaccttgggttggggttacttttcaggctggcagtgatggggccaagattgggaactgcccattctcccagagactgttcatggtactgtggctcaagggagtcaccttcaatgttaccaccgttgacaccaaaaggtaggcctgcttatgttccttgaaacacccctggtgtacacatgtgtgcaaacacacacccacccgagtccttctgtcatgaacatttttgccctccccctggagtccctttcttatcccacgtcctccattccccctttctggttcttcctgacccccatttccagtcctgattcctgatcctttctccaggcggaccgagacagtgcagaagctgtgcccaggggggcagctcccattcctgctgtatggcactgaagtgcacacagacaccaacaagattgaggaatttctggaggcagtgctgtgccctcccaggtataggggcactcagaaagtggagaggtggagcagggagattctgggaaacagacagtttgcagaaatggaaaacagagatggtggtggggctggggcaggagagctagctgaggttcctcccaggaagacatcttacctcatttttcccattggctttcaggtaccccaagctggcagctctgaaccctgagtccaacacagctgggctggacatatttgccaaattttctgcctacatcaagaattcaaacccagcactcaatgacagtgagtcttgtgggtcagaggcctgggtcctgggaggaatagagaggacccagcgggtaggagacattaggggcacctggacgttcagatatcagggagatgaagcagatgttcgtaaatttcccccagcttcccatttttgctttacctctatatttccctgcattttcattggccaagacttttaagcttttctcatttgttccctagcctcttctgccccactgaggacgttagttggctgctggcctgttttctggcagaatagggtcatgcttaagaacagtcatcactctagatccagactacctgagtacaaatccaactagccgtataattttgagcaatcatttcacctctctgtaagtccatttccagatccacaaaattaggatgacaatacctatttcatgggttgatataaatttttttttttctttttttttgagatggagtctcgttctgtcgcccaggctggagtgcagtggtgcaatcagctcactgcaacctctgcctgccgggttcaagcaattctcctgcctcagcctcctgagtagctgggattacagacgtgcatcaccacgcccagctaatttttgtatttttagtagagacagggtttcaccatgttggccaggctggtcttgaactcccgacctcaggtgatccacctgcctcggcctccmaaagtgctgggattacaggagtgagccactgcacccggcgatataaatgagtttgtaaaatgtaaagtgttcactttgggaggccgaggctagcgcaccacctgaggttaggagttggagaccagcctggccaacatgactggtctctactgaaaaaaatacaaaaattagccagttgtggtggcaggcacctgtaatcccagctactcaggaggctgaggcaggagaatcatttgaatctaggaggcagaggttgcagtgagccgggatcatgccactgcactccagcctgggcaacggagcaagactccgtctaacataaaataaaatgtaaagtgcttagaataacacatagaaaagtaactacatgagtgttagctattattattttggactcaccattagtatccacccccaacgggccttttcggactatgtcaatcttttcctgaagttctaatcagttccctctcttgcacagatctggagaagggactcctgaaagccctgaaggttttagacaattacttaacatcccccctcccagaagaagtggatgaaaccagtgctgaagatgaaggtgtctctcagaggaagtttttggatggcaacgagctcaccctggctgactgcaacctgttgccaaagttacacatagtacaggtgtgtggttattkcgggaggagaggatgaccactggagtggccctttaaggagctcccacatgggcttcccctgacaaccactctaaagacgatttctttcttagggtggttttcataaattgctaccaatggcagaccccaccccagtcctttgcagcagtcattgctaacaagaccactgcttgagataattatattccatgatgtaagtcatgggtgcaaacagactagcaaagaggaatacatcccagtattacttttgaagaatgctcttcctgtctcggtatcactgccaaattcccagattagacagagcaggcttttcctaaagtcaaagctttaactttctttataacttcagtcttcacttcctcttgtggaagatcaaaactgctggttcccatgtttttgtcatagtctcaaagctatggtttagtttgtgcaacatgggcctgacatcagtctgccacacaactatgtagtgaacatctgtgtactaagcattgaaagatacacaagtgtatggtgactgggccttgctctcaaagggttgaaatctgagacaataaaatattcacatgaaagttaagaatatatgatgaaaagtcagatgggccgggcgtggtggctcacgcctataatcccaacactttgggcggccaaggctggtggaccacctgaggttaggagttcgagaccagcctggccaacatggtgaaaccccatctctactaaaattacaaaaattagccgcacatggtggtgggcacctgtaatcacagctatttgggaggctgaggcaggagaatcacttgaacccgggaggcggaggttgcagtgagccaagatcgcgccattgcactccagcctgggtgacagcaagactccatctcaaaaaaaaaaaagtctgatgaaaaatatagagacaaaagtcacctgtgtcagtgcctgaagtggtatagggggaaaaagtcactgtggaaattcaagaggagaattttataagtaaattatatctcaagttttaaaaactcaggaaaaatggctggttattaaaagccaggatttcagtaagtgagaaggaaggctaacgacagtacaagacagtgaggagttgagctggttttatcatgtcggcctggggagaagggaaagccaaggtggcttccctgggtctaacatgttggtccctctcctctccccatcctcaggtggtgtgtaagaagtaccggggattcaccatccccgaggccttccggggagtgcatcggtacttgagcaatgcctacgcccgggaagaattcgcttccacctgtccagatgatgaggagatcgagctcgcctatgagcaagtggcaaaggccctcaaataagcccctcctgggactccctcaaccccctccattttctccacaaaggccctggtggtttccacattgctacccaawggacacactccaaaatggccagtgggcagggaatcctggagcacttgttccgggatggtgtggtggaagaggggatgagggaaagaaatggrgggcctgggtcagatttttattgtggggtgggatgagtaggacaacatatttcagtaataaaatacagaataaaaatcaagtgtttttacgcaatgggggtttaaagtgtgggcgacatggaatgaggggtgggtcagtgatcttgagctcagggcagaagccaggaattaagaagggaaatgtttgtggtggggctgctatgtttcgtgccggtccgccggtccgccgttgcgctgttctgaggtctacgaagcgtttgcagccccgtcgccagggccggccagatctgggtgggcctggrcagcgctcgctgggcggtgccgatttctggcaaggggggcgcagtctggatgkaatgggcgmggcttagcagggcggaatgggcgtggcccgaagaagccccgccccgtcccgcttagacaatgccccggagccgccagaccgtcgcgcccctgccccatcgtagtatatgagctcgcctacacaaggacccscgctaaaagccagagctcccagtccccgaggcttgaagacggggactcccttctccaccaactctgtcctcggggggtggggccccagccgagatcacagcgcgacaggagtgggggtggccgctggaggtgagtcttgcgtggggggccctgaaccgtgtgggggccggagtttgggggtgccgggcccatgcctgcaccagacagagagtatggggagccggtatttgggcgcggagctaggcggggtggactttgggacatagacggggaaccgggtsctggagccgsgagtagtgccagcgccccggaaccacgccccctgttaccccgcccctcgcatttcgttttagacctctcccagtccttcgggactcggtctggtttatactaggtcgygctaggggcagcgtgaccagccagggcggagagaggatgcttaactccttaggctcgaactcctcccttcctacccacctctctcccttctcgttcgggtattcaggacttccattccccagcccctgcctctccagctttctccttctgtcccataacccctgcgggtcscgggctggacttccagtccctgcggtagcgagcagctgagggttaagggggcggggctgctgcatttttggggagtgagcgcatcctagtggctgccaagaggggcgcccgacagggacctcacaagcccccaagcaggggcaacaggtgttttggagattagagaccctagccttgttcctcaggctcctcttaaagaatctgacccctgagggtgctgggtagagtgaggtcgacaggagcggaaggtctggagtgggtggggcggagtgggagggacgcctagagatggcaggaggaagacctgggcgctcttaaccacccccaacgcccttgtctgcatgtctttttctctgtctcctccttttctgtttcttctcccagacaggtgaagaaacaagaaaactaagaaatccgagcggttggagggggagtctgtgtggatgggatggggacgccgggggaggggctgggccgctgctcccatgccctgatccggggagtcccagagagcctggcgtcgggggaaggtgcgggggctggccttcccgctctggatctggccaaagctcaaagggagcacggggtgctgggaggtaaactgaggcaacgactggggctacagctgctagaactgccacctgaggagtcattgccgctgggaccgctgcttggcgacacggccgtgatccaaggggacacggccctaatcacgcggccctggagccccgctcgtaggccagaggtgagcgccgtggcgcgggtgtggtatggggaaaggcagaaggaactggatgtcggggctttggggaagaattgaggatgggggtgtcacagctccgtgccctcttctcctatcctaaggtcgatggagtccgcaaagccctgcaagacctggggctccgaattgtggaaataggagacgagaacgcgacgctggatggcactgacgttctcttcaccggtgaggctgsggggaggcataggtcttggcacagggaagtagagtttgggagactcggccgtctggagccttgtttctaactcactcccgccctcaaacctccgcggcctcccggactcaggccgggagtttttcgtaggcctctccaaatggaccaatcaccgaggagctgagatcgtggcggacacgttccgggtgcggagcgggaccagcctagggagggagggggtgcaggtgggggtcggaagggcctgggcgcccgctgaggaaatgagaggcagagagcagcctatgtttgaagataccccatcacccctcccgcgcccctgaatacctcccttcgctctccctaggacttcgccgtctccactgtgccagtctcgggtccctcccacctgcgcggtctctgcggcatggggggacctcgcactgttgtggcaggcagcagcgacgctgcccaaaaggctgtccgggtgaggagggggcggggccaacgaaagtgggcgcagttctgggcccgggaggccgggagctgggaggcttaggaaattagccctaacccctgccctcaatgggctgtccatcttacatgaaagaacacaggagaaaataagaagttacaacagcaggactgggaacaggggtgattaatttgctcttccggagtttcaggaaaccccaaaggtggcacctaaactgtgactctaaggatgggtaggacagataggaggggctggggaaggtagggggttgaaaataactgcatgtgattccaaggtggaaattagcaaaggtaactaaagtacttagtgtctgacatatcgtaagctctatgtgcttgctgtcattattttccacaaatgtcagtccgtccccagcccttagtggtggttgagcaggcagacacagctgtggagaggttctgagactcgaacacttcctctttcctctaggcaatggcagtgctgacagatcacccatatgcctccctgaccctcccagatgacgcagctgctgactgtctctttcttcgtcctgggttgcctggtgtgccccctttcctcctgcaccgtggaggtggggatctgcccaacagccaggaggtgagagagggcaggaactccaacaccaagcaccatcagagaaaagagtttcaggctttcctagtgggaggaaggaagggtaccttctctagaagcctgggtggggccactctgagctggctggaagagtggcctggctcagcctgaggtctcactcccctctccccactccatgtcttccctgtgcaggcactgcagaagctctctgatgtcaccctggtacctgtgtcctgctcagaactggagaaggctggcgccgggctcagctccctctgcttggtgctcagcacacgcccccacagctgagggcctggccttggggtactgctggccaggggtaggatagtataggaagtagaaggggaaggagggttagatagagaatgctgaataggcagtagttgggagagagcctcaatattgggggaggggagagtgtagggaaaaggatccactgggtgaatcctccctctcagaaccaataaaatagaattgaccttttagactgggctgtgactggtgtcttactggggcaaagggatagggcagggctgaaacctgagtttggggtcagtgcagggaagaaggcctcttattcaaaaatcttgttaggtacttatcaactcattgcccaaccatgtcataggtacttgagcacaagatgaacaagacagaatttctatcatgggaagtgtgtccagggcagagaaaagagtgtatgggtggattgctcactgaatttatctaaatgttagatgattcagagactggtagattaccagtccacccctatttgataaagaaaaagaaatgacacttccagggacattcattttcattcattcatttaatgaggcttagcaatgatatcaaaagggtcagtctcctgacgttggggagctcacagtacatgcaaatttcttacaaattgaaatacaggttgtcatggaacaatttacagaaggctgtttctatgagggaaataaagggggtgtgccctagggcatcaaagtatatgcaaggggtggccaaggagggtcaccttcccagaaaaggccatacttgaactaaggataaataagaattagccaggcagatagtgtgaaggagggaaaggggtaatacaggaagaaggaattgcactgggcaaagacattttggggctagggagaattctctaaggctggcattttctaagatgtgcatgtggaatgacacaggtaagcctggagagtggacaaagtgctgtagtaccttgtatccaaagccaaggcacgtgggcacagagctgaagctaaggagagtacttcagttctgtaataagggctgtcaggagcagttatctcttgagtaggatctctctgacttcagggaggaaagcaagggtaggaggatgaggtggggctatgggtaatccaggaaggaagtgagcagagtacattcacgtggcagcgctgggcatggaatacagtgtgggtttgacagtgatgttaagatagaaagactggacttcatggctcattgtgtgggagtaagagagaaaggaggtctgcgtgactcccagtttctgggttgggcaactgggttgttaaagagaatacagaggagaattaagtgagcagcttcagagatgacaatgagttgggtttgacattcagagtgcgaaatgcctgaggtcagtcaggcagaatgtctaagtggaagtttgttaatcccaaatctgagatctgagccagagagagttctgagtgtcatttgcagaggagggggctgaggactgactgttgatgagagtgtcccagaagaagagaaagggacaaacctagaatggtgggaaatactgtagggatatggagcaaggaagaggagtccaaaaagaaaacaccagcaacaaagaaaaacagcttaaagaatcaggccgggcgcggtggctcacacctgtaatcctagcactttgggaggccggggcgggtggatcacgaggttagcagatcaagaccatcctggctaacacagtgaaaccccgtctctactaaaaatacaaaaaattagctgggcgtggtggcgggcgcctgtagtcccagctactcaggagcctgaggcaggagaatggtgtgaacccggcaggcggagcttgcagtgagggagatggtgtcactgcactccagcctgggcaacagagcgagactccgtctcaaaaaaaaaaaaaaaaggagctagggcttgattgggtatagagaggacactggtggtgagggagacatggaggttataggagagatgggagtaagtttagaagtaagaccagtggcagagacagcctggaacccaggtctcccaactcccagtctagcacttatttctataccatggtgccttcctcttccaggtgaggaaccaaggaggggagagggattatggggagctgggatcccctagcttgggaggtttggagtaagggcttcccttcaaactacaactgcatagatggtggaggcatcagcagggtccgctgtggacagccggcggggcctgctgagggctagatggtccagatccgcatagagcaggctctggaggaggaaggggaggaagacaagatggtctccacagtcttccttggggttcaggcctttttttttttggtccattttcctcagagattctggctatccccttcccatccccatgcccttaccggttcctggtccaggtcccctggaatcttgggctcttcctcctttactggcctctggggctcrgttttcacaagtggagctatgtgggggggacagagctgaaggatggagagaaggtgaccaacgtgtctgctcccagcaagggctcagactcaggaattgaggggtggggagtgggcatgtaggagaaagaaaatggggtggaattagtctcaccaaatctagggagtggtcgaatcggttgcgggggcaggcgcctgts

SEQ ID NO: 94537 - DNA, 29056 bp, Homo sapiens
gtggcgggcgcctgtaatcccagctacttgggaggctgaggcaggagaatggcttgaacctgggaagcggagcttgcagtgagccgagatcacactactgcactccagcttgggcgacagaatgagactccatcccccacttcgccaaaaaaaaaaaaaaaaaaaaaaaaaagaaatgccgcctttatagcgatttaccagatcaaccgttctcaatgctctttaatacgctggagtttcatactaagaaaaataaacataaaaacattttggccaggcgctgtggctcacgcctgtaatcccaacactttgggaggctgaggtgagcagatcacaaggtcaagagatcgagaccatcctggctaacatggtgaaaccccgtgtctactaaaaatacaaaaaattagccaggcgtggtggcatacgcctacagtccctacgcctatagtcccagctacttgggaggctgaggcaggagaatctcttgaacctgggaggtggaggttgcagtgagccgagattgtgccactgcactccagcctgggcgacagaatgagactccttttcaaacaaaacaaaacaaaacagaaaacaaaaacaaaaccaaaagacattctgtgggatgggcacggtggctcatgcctataatcccaacattttgggaggctgaggtgggtggatcacttgaggtcaggagtttgagaccagcctggccaacatgttgaaaccccatctctactaaaaacacaaaaattaggtcgggcatggtggctcatgcctgtaatcccagcactttgggaggccgaggcaggtggatcatctaaggtcaggagttcgagagcagtctggccaacatggtgaaaccccatctctattaaaaatacaaaagttagtcgggcatggtggcaggctcctgtagtcccggctactcaggaggctgaggaaggagaatcacttgaacccaggaggcggaggttgcagtgagtcaagatactgccactgcactccagcctggggaacagagggagactccgtctcaaaaataaataaacaaataaaaatttaaaaattaataaataaaaataaaaaaattagctgggcatggtggtgtgtgcctgtaatctcagctacttgggaggctgaagcaggagaatcgcttgaacccaggaagcagaagttatagtgagccgagatcatgccactgcactccagcctgggcgacaaagcaagactctgtctcaaaaggaaaagaaaaaggaagctggaagctgaatgagatgggcctttcaaccaaggagttagaaggccatctggtggcagggctggcagaggaccaggagtaaataaggccagagaggacaccagggtctgggagtgaaggcactgagcttgggtccccctttggaagacaatgacctgagagctgtgagatttcagacaagttcccgaaccttttgggccctgctttcctcatctgtaaatgggataatatcagtctcaccagcttcttaaaattcaatacaatggagttgggtgtggtggctcacgcctctagtcccggcactttgggaagccgaggtgggcagactgtttgaactcaggagatgcagaacagcctggataacatagcaaaacagtctctaccaaaaatacaaacaattagctgggcatggtggtgtgtgcttgtagtcccagctactagggaggctgaggtgggaggactgcttgagcccacgaggtagaggctgcagtgagccatgattgcaccactgcactccaggctgggagacagaatgagaccctgtctcaaaacaaacaagcaaacaaacaataaaggaaatccctaccacactatcaggggcattttggctgagcgcggtggctcacgcctgtaatcccagcactttgggaggctaggctggcaggtcacctgaggtcgggagtttgagaccagcctgaccaacacggagaaaccgtctctaccaaaaatacaaaattagccgggcgtgatggtgcatgcctgtaatcccagctacttgggaggctgaggcaggagaatctcttgaacccaggaggcagaggttgaggtgggctgaaatcgcgccattgcactctagcctgggcaacaacagggaaactccatctcaaaaaaacaaaacaaaacaaaaaacaaaactcccatttttgcgaggcaaattgggctcacagaggtaagctgcatgtccctgttgatggcagagctggggtctggatgcaggtctgcttcggggtaatctgctcttttgccttccagggtcctgcctcttacaatatgagctgtcaagttagatgcctgcactcagtaaacctactctgttttaagtaaaaacaacaagaaacaaatctgaatatgctagcctatctcaggtacgttaaaggaaatttttaaatagggggttttttgaccatttgggggagtttygggggaggggcyttctgtctatacttgagctgggggatgttagggttgttcatctggatctagaggttttcctgtaatgttcttactccagaaggaaatctctagatggggaaagaaggtttcagcttttattctagtaagcagggctctacctataaagagctgcttccaccactcttttttttttttttgagacggagtcttgctgtgttgcccaggttggaatgcagtagtgcaatctcggctcaccacaacctctgtcttcggggttcaagtgattctcctgcctcagcctcccaagtagctgagactacaggtgtgtgccaccatgcctggctaatttttgtatttttagtacagatgggggtttcactatgttggtcaggctggtctcgaactcctgacctcgtgatctgactgccttggcctcccaaagtgctgggattacaggcatgacccaccgcacctggccyccaccactattataatatcaccaggttccccatttgaatccttcagtgccaaaggttttgcagaattcaaatgtttttgggacttgatagggctgacctaaaagtacactcactctatattaggtagcccaggagggcctaggcagcccaagaaccaaacacatgagtgtttctgcagggaaatgtatgaatattgacatcagtaggatgaaaataaataatagtcttactttagttcagattaggtttctgtcaccaaatgaattttggtggcagcctgatgaaaaatgttggttctcagagtgtttttgagtttagaattgtggttaagggagtatggacctgttgataacaaaaacaggaacaaggccaggtgtggtggctcacacctgtaatcccagcactttgagaggctgaggttggtggatcacctgaggtcaggcattcgagatcagcttgtccaacatggcgaaaacccatctcttctaaaaatataaaaattagctgggcgtggtggcatgcgcctgtaatcctagctacttgggaggctgacgcatgagaatcacttgaacctgggaggtagaggttgcagtgagccaggatcgcaccattgcattccagcctgggcaagaagagtgaaacttcataaaaaacaaaaacaaaaacaaaaaacagagaaacaggaacaacaatcgccagcatataccaagtgcttatcgtgtgtgccaggtactctaattatgtactatgtcagttgattctcaaaacatatatggcacaacatgggtactctgaacatgggcacaatcaatgtacaatgctataatgtataacacaggacaatgtagctgttaaaagcatggacactctatctagtccatctgggttataatctctgctctaccagtgaataactgtaactctggcaaatgacttctctatgccctgtttcctcagctgggaaatgggggataatatcagtactcacctcctaagattgttgtgaggattaaatgtgttactttataagaaatgtctggcacatagcaaaggttgttattattttaatttttacacatgggcaaactaagcctcaagtaacctgtccaagaatacgtagctatgaagtgtggagctgggatttggagctggggtttgaatccaggcaatctaactccagagcctaccttctatgctactttttggctacgagcaaacaatctgtcaagaaacaaagtagctactaatctaaacagatgtgaaatttgaagaccagttgatctttggggaatgttgggttcttcagacaatggtagctcagtaatgtaaagggacaaatgacagccacatgccaacttggttaactccttccctaggtcctgatgaccaaataaccagcttatttctcaactattggttggctttcatttcaggtctggtcagctgcttatgaccttgttccccactgagcagactcaccatctgggccctggcgggcagcagcatgcagtgccgtgtccccatggcggtcctggtgggcagggtcagccccgagccgaagcagcaggcacagggcaggggcatcgtggcgggcacaggcccggtgcagtggtgggggctgcccagcatctacatcgaggcctgggtgtcgctggaggagggcctgggcccggaccagccgtcctgcagacaagtaacgacgaaagcgacgttctcggcgttggcggcgggaagtggaggccatggaactcttgggctggggaaggaaaaaaggcagcagtcaggacttcagccttggctggtccttctccctccatctctgacatcccctgttgtttctccctttggttccgtctttttttaatatcttcagcaagagatgaggcctaacctaacyctgatcctttatcagatgatagatttgaaaaaaaattttttttgaggggggtgataggatcagaggtttaatttttttaatgtaaaattcgagaaaagggtaaataattggtttaaggctcaggagcccaggtaaatttttaatttttaacaaagaactttaaaaaaacccaacagggccggatggggaaaatttttatcagcagaaatctgagttttaaaaagtcacagataatctccaataatgatctagaaattgaatatcatgtacccggcagacagatgtggaggcttcttcctctggaacctggggggaggggttactcatcagacctgcccccgcccccccaagtacccccagagccgtagsccmaaggcctgtgtttaagaagctcggagacgggaggcgggaagggcggagacactccaggctggaggaaatggcgcaagcagagacgcwggtggaggacggaagtgaactgtgaggggcgttaccggatgtcgttccgccccgaccgggtagttcttggccagatctcccaggggaaactagggaacttaaattaaaggggccgtctgaaaccagaagactggactggaggcgaggaaaaggaggcgaggggaggggagggagaaaagagagttatttggaggttttttcccgcctcctctaacttggcagagagaggagatggttcagtgatggacgaaaagatgagaagacagagaaaatagaggagataaagacaggataaaaatcacattaaacatggaaaacaaaaacaaaaaccacagtgggacaacaacagggacagatcaaaaaaaagaaaaaatacagacaaaagacggaagaagactatcgtaggatggggcaagtgagatgcaaaaatttggacttgagaaatatgtagaaaaagatggagatgttaacaacgggaggcaggggagggggcgggatggtggagagagagagaaaggtagagagttagtttagaattaagcccagaatgctcttttcccaacacaggttgcatgatgacatccttaccttttcaccgcattcacaaccctttatgcttcctctgttaccaccaatcaagttctccttctctcacctcagtactcccccgtctccgcccctgcctcatccctagacctttccgactgggatggctaacctgttgtaagcccgcagctttgggcctggtctctgctgctcccaggcggcccctttgggtactgcctgagcaagaagtgctggagaggaggaccagtcatcaatrggaggatgagattgggagagacactcggtrcaggaggctgagtgagcaggggagcactaagacccagrggtagtggaggactgcagcaacgagctggaggaggagaagtaagcggtggggggtgggagccatctggtactttgacagcattcaaaacagcatcggccataacaacagaaatggccagtcagtcccaaggtatccagcagcttctgcaagctgagaagcgggcagctgagaaggtggcagatgccagaaagagtgagtctcctctttcctcccttaggagtttggaaagaaaattgggggtgggggacarcaaacattttgggaaaacccaaggctggcgggaagacagctagggtctggaggctggttaggagggaagaaatggatggatattagaatctggcacctggttggctgagagaaggctgtataactttctggaagggactgactcctgctattacattgtgtgtgtgtgggtccatccccactcactgtcctttcttctgcctccagggaaggcccggcgactgaagcaggcaaaggaggaggcacagatggaggtggagcaataccgcagagagcgagagcacgaattccagagcaagcagcaggcggtgagttgaggcagagtcgggwtgagaccccactgcaagttggtgggtgcatctagtgaggtgtgtaagggtgactcaacaagaaaatatggtggcagagggctgaggctgaggggaccctggcagggaccacaacattggtgaaactttgtgatgatatgtaggagagtctgggagttttgaaggccacatagagcttgtgggcggaatgccacagtctgtgtaaagtataacatctatgtggagtatgattaacatttgtggtggagggtagagttttatggtcatggatggtgaggtggtggggatattacggtctgttttagkatgaagttgcatgttaggtctaaggggaaaggggactgtgttgatctctttggtgttgggatatttctgtgggatgggggtggtttctgagagggcctttcttctaggctttgtttcaggatctttcccctcatatgcctggacccttgtctgtttytgcttttccctttctctcttccacccctctccctaccccccaggccatgggctcccaggggaacctgtctgctgaggtggagcaggctacaaggcgccaggtgcagggcatgcagagctcccagcagagaaaccgagagcgtgtcctggcccagcttcttggcatggtctgcgacgtcaggccccaggtccaccccaactaccggatttctgcctagggccaccgtagggcctgactccttctgccagttccctccctcaaagaaatcctccaatcaaaatcacctcccaccataatccctgtcttctttccatcccctagaaatcctgggaggcaggatccaataattttcctgtgacacttataaatatcctgctcacatctgaatctccttgttgttctttaaccctcactgggactttgtaaacttccaagtcattctcacctaaaccctctgtgaaatttgtaatatggggaagtaggaatgtggaaaacatcctgacttcagtgtctggccgatgtgggtccctctcttgaccctgtcacttgctggctgtgaaaccaggacaagctacttaacttggtagcctcgatgtcctcctytgtgaaactgggatgataataatgcctaccttgtgagggttgcttcaatgattaggaatcattctgtaaagtctagcasagttccttgcatgttgtagcagtgattcagtaagtagcaaccctgtgatactattaccaccacctgctcactggtcaaaacctacacagctgtttcctcacgtccatcactggctctctaattccacttgttcattctgtgaccctagttattttctgaaaaattggttcttctcttttcccagagaccttctgatctccaaaaagaggagatgactacatttagcccctctcttataattccaggtagataactgcattttgtagcctctctttgtttttcttttgctgatctttgtctttattagattttcctcctttcctatttccccaaagacttatcagatgctcattgctttctaagatctaaaatgatactgtgttccctcatatgcatgcccttcctttctatatccttgacaccttactttcccattgtaacaataaaaaaagtatcaataaaataattattggcaaataaattggtgagttgaagcagcctccttttgcctcatcatttctcattttcagtcactttgttttttttttttttgagatggagttttgctcttgttgcccaggctggaatacaatggcgtgatctcagctcattgcaacctctgcctcccaggttcaagcgattctcctgcctcagcctcccaagttgctggaattatgggtgtgtgccaccacgcctggctattttttgtatttttagtagagatggggtttcgccatgttggtcaggctggtctcaaactcctgacctcaagtgatccacctgccttggcctcccaaagtgctgagattagaggtgtgagccactgtgcctggccttcagtcactttcttgttttttgtttayatattccctaaacagcccaaatggctatcctttgaaacttcttggagaaacaagaacaagtagtactttattatttctctaaagtgagaaacatggttcctcatttgggaatctgaggactatagatcgcaactgtagagaaaagctggagtgtaggagcaagtgctctttgcccctttaccttgcattttcttcatagcacttactgctactggttttttgagacaaggtcctgctgtgttgcccaggctggagttccagctcacggcagccttgaccccctggactcaaatgatcctcccacttcagcctcctgagtagctgggattacgggcgagtgccactatgccttgctaattttaaaattttttgtagagatggggtctcacttgcccaggctggtctgaaactcctgggctcaagcaatccttcgggctcggcttcctcaagggttgggttacaggcctgagccactgcaccctgaccacttatcgatacttgacattatatttgtgtttatgtgttttctttcctgtaatgtaaacactgtgagaacagggctgttcaccgttgtgtccccagatcctaggacaacatgtggcacaagggaggcagttgataaatacttttgaataaattaaatgatacttgggaaaataccttctatgacaccattcttgaattagttacttcatttgtcactgaagacaagcttactkcaccaagaatttgaaccaataaggtaacctgcagtgtatttactaaccagattctttgagcagggaggcagaatacaatagagaatgagagatgtttgcatcctggctgtaacctcaccagccgtactgcttgagatatgttgctttgcttcgcttctgtcaataagatgagaataacggtacctactccttagtattaaatsaktaagtatgytaacagggagagggccaaacgtttgttgttttattacacagcaggacatcaggtcttacttttgtrgctccccatctcaaagacggggatagcaaatgtttcattcaggaaaaaaatccaggttgaacaatggggctgttggggcggggccaagaacattctgctcgaattaacagtattaatgggccgggcgcggtggctcacgcctgtaatcccagcactctgggaggccgaagtgggtggatcacctgaggtcatacatgggtgaarccccgtctctactaaaaaaacaaaaatttgctgggcgtggtggcgggcgcctgtaatcctagctactcgggaggctgaggcaggagaatcgcttgaacccgggaagcagcggttgcagtgagccgagatcaggacattgcactcccgcctgggcgacagggcgagactctgtctcaaaacaaaaacaaaaacagtattaatggaatgtagtataaccctcaagccctactattaacacttggggccgaatccagaccccgtcttcccgctcggattcagaacaccttcctgactcactggccctagggcatcagctacctcggacagcatccttttgggaaaataccgcccaccagccccacgactgggaaagagtcgggaaacacccccgagcaatccagttccctgagacttccctcctccctcccctcagctagggcctgccggttcctagtgcgtgcccagcagtcctcaggtcaccttcactaccgggccaaggaccccgtgggaactcgcagccttcgccacactcgttcctcgcgcatccayggaggggtgcctacagagaagacctgcgtggcaaaaacctaaacgaagagatgaggggcatggagaggagtaggataagagaataaagataacagtggggggsagacgttagtttcctttatatcttttgttactggmggtagcagtgaagttagaaacggttttaaaacaaatttcagacaggcattttccaaaggcaagcctggagcgcacggatctgtataaccgcggaaggccctgtttccggtcccttgcgcctgcgctcttgcagccaagaaggcgggaggctggagtagagggaagcctgcaaccggaagtgaaggcasatttccctccttcgtcgctgttgctgccgccatacgcgctctccctgtttaggtaagctttggccttcgctacaatccgtttccatctgcgcttctccgcacccatcccgtcacatgggttcctgatacccttttcacaggcgatggtctggtcgctggggcctagttggttcgctatttccttagcttgcatccctttcgagagcaaagagctcctgggggaaggaagggaagctaaggggggacccaatccaagatggtgtcctcggcgccattgtgttcgttttgctcccttcttccaatgggttcttctcatattggaggcctcagcatcaatgagaggcggygctcggcgtcccttggtcttggtatttgcggagggcggggctcttctcaccttccttgtyctttcttgagctctttytcggccctcggtgggactgggaggaggagctggtttctgggcccagttggatttttctcaccttgacttgsccaacttaatttggagtgccttccaagtgtttacgatacgattggtgtcattgtatgtttctccaaaaggagtctcaccttcgtagcgtaacagtgatgtgagaccacttggtaaagatcctgttaaagcctgggcggggattgcctttctctgtcacctattagctttcttattgtagggtggagacatgaattttgtttttttgtggccgagccatttgtcttgcaccgcccctcccccccatgctaattacacaaggcttgcttaaacagcggaagggaggatactgagaagtgggaggctgagagctatgggaggtggacggcggccatatgatgttttcttttcgaaaggtgagcgctttgcgcagtgatgaccctcatctatcacccttgactgatggctgctgagttaggcatccataacggtgggattataatagggaaagcggagtcttcctttgaggacttttcaggactctacttgtcatctccattttccactttactaagttattagtcrtattttaccttttattatctattctatttcctcactgttactttcagatcaagaatttataagttggtcttccccttccaacttttctggtttccgctactgtgattgctaatcttgttgggaacctctgtcctaaccactttccctggtactgctttttctgttctgttatatttgcttttcgtttttatgttttgtatctgtttttctttccaggtaaaagtttcctggtttagggaaagtgggaactggggatggaaaagaggtggtgaaggctgtgctcgtgattaagtcttgctttttttttcccccctccagctcttctgttagaaatagtatctttgttttcctttgctgttcctcaatcccctactcttcaccccttgttttcacctattttgcgagaacccatccagatcccccttcccttcttcccctgccggcccagttatggcagagaacgatgtggacaatgagctcttggactatgaagatgatgaggtggagacagcagctgggggagatggggctgaggcccctgccaagaaggatgtcaagggctcctatgtctccatccacagctctggctttcgtgacttcctgctcaagccagagttgctccgggccattgtcgactgtggctttgagcatccgtcagaaggtaaattttctcttgggcatgtagtgctcattgggctctttaagggtacaatacaaagatgtgtttgtcgttgctcaggtggtggtaagggtttatacttaaggctagatcagggccaggtgcagtggctcacgcctgtaatcccagcactttgggaggcygaggcaggagggtggccacttgagctcaaaagtgcaagagaagcctgggcaacayagcgagactcctgtctctacaaaacgttcagaaattaagcaggtgaaggttgaggcttcagtgagccgtgattgcaccactgtgcaccagccggggcgacagtgaggaagaaaaaatygggataagtatcaaaaacaattttggatagaggaggcttatacaggcttattctttctttcgtgatagcaccaaagtgctaatgatccaaaagtgacttccaggtctgccattcattcttgtgactggcttttcttgtctgcttatttttaattttgtcacttgacttctaattttaaatttccagaaaggtcctgcttggacctgtagtctccctctgttgggccaggccaactgtggtctctggaaacctctatgactggtttagagatgactggcttctgggtcaggtaccaagtccttcattttgtccaggrttgtagtagttacgtgacccgaagtatagcaacctaagcaggagaagtggtctgtggcaggtattcaaatgtcatgaattgttacagattaagaaaaataaggacagagctaggatcattgaaggtgagcggttggtagatgcaaggggtttgttactaggactgggaaggcctagatctggaggaggctaaagctaggaggaattaggagagtctgattttgaggtgaatgtaattgagcagagagaggtaaaatgggtctggaagttggcaagaaccaggtaaatactagactttgagaattgagtggtaagaaatgggcttggcatggtgaaaaaggtagagttatctggagactgaagtctaatttatcttcctccccccscaacttttagtccagcatgagtgcatccctcaggccattctgggaatggatgtcctgtgccaggccaagtcgggcatgggaaagacagcagtgtttgtcttggccacactgcaacagctggagccagttactgggcaggtatatttggggagagtgctggggaggggattttggttaggactataagggaagggtgtttttgtcctarctacatgatgcttgcagagccatgagcacatgacctctgttacccttgacaayctgacagctgtgggggatgttctgtcgcaagcgtggggttcatgatttagatcacakaattgaagtcatttattatcggcccaggtgtgtttttgtgacagtcacttccytagaggggataatgaagagctacatttaccatatgtctccgtmtacttcctgcctaaggtgtctgtrctggtgatgtgtcacactcgggagttggcttttcagatcagcaaggaatatgagcgcttctctaaatacatgcccaatgtcaaggtaagccaaggtaaagagacctgagagtgagggtgtggcaagttggagggataagaaacttgtaggccaatagtctctttaattttggagaagctttagtttgctgtggtgtaacagagtgttgagttcctatgtaacaggaggattcgtaattgggctatggatgatgcttaacacaagaccacccttttcttactactttatactgactttgaatcatatcagtttaataattttggggtatgtggcagagaaagccggaaactttaaaacagctccagtggtgtgtgaatattgaggattctggccaagtgcacaatggcttacacctgtaatctcagcagtttgggaggccaaggcgtgtggattatttgaggtcaggagtttaagaccaatgtggccaacaggatgaaaccctctctctactaaaaatgcaaaaattagccgtgcatggtggcacacacctatagtcccacctgcttgggaggctgaggcaggggaatcgcttgaacccaggaagcagaggttgtagtgagctgrgattgtgccattacactccagcctgggtggcagagtgagactcccatctcaaaaaaaaagaaaaaatctgattgaagttaagcatttttggcaagaatccttcataggtgatgctgtatctcctgttatgccacaaatctggtcgacttatgttagttattttattttatttttatttatttgttttgagatggagtctcgctgtgtccttcaggctgtgagtgtagtggcgcgatctcagctcactgcaacctgcgcctcccacgttcaagcgattctcccgcctcaaccccccgagtagctgggactacagtgtgccatcatgcctggctaatttttgtttttttttagtagtgacagggtttcgccatgttggccaggctggtctcgaactcctgacctcaagtgatccacccacctcggcctcccaaagtgctgggattacaggagtgagccactgcacctggcctcattaatgattttagatttaccataggattagcgtcgtgacagtctgatyccacagttgttcttttcccccttgaaaccagaaagtagtttctggtgttatttgatactgtaccaaggcccagatccccaaacaactattcacctaatggttttaacatgaaatgataatatttagcccgaagcagtaatttcatggggtttgtgtgaaaagagtttgagattctgggtttatttaggaaaccttaatgttccatgtgttttttgtggtactttacactaatctggtgatttcttgctgtcctttatttatttattttttattttttgagatggagtctcgctctgtcatccaggctggagtacagtggctcaatctcgcctcactgcaatctccacctcccgggttcaagcgattctcctgcctcagcctcccggctaaattttgtattttttgttttttagtagtaaatttgtaaattttgtattttagtagagatggggtttcaccgtgttggccaggctggtcttgaactcctggcttcaagtgatccactttccttgacctcccaaactgctgggattacaggcgtgagccactgggcctggctttattttatttttatttattttatttctttttgagatggagtatcactcttgttgcccaggctggagtacaacggtgggatcttggctcaccacaacctctgcctcccaggttctcgtgcctcagcctcctgagtagctggaattayaggcgtgtgccaccacacctggctcctttattttttaaatgaagcctggcctcataaatgaaggaagttggttagattaagtcagtagaactgaattattgtcctgactgctccgactagccatgtaactttaggcaatcaccctcagtgtttggtgggggggacataaaatttttaaattaggtgacctctaaagttagttttagtttggaaacatgctaaaaattkgtttagctcaaacagagtgggaaccctggggggattggactctttccttcctctgttttgagactctttgcttctggctcggcaggttgctgttttttttggtggtctgtctatcaagaaggatgaagaggtgctgaagaagaactgcccgcatatcgtcgtggggactccaggccgtatcctagccctggctcgaaataagagcctcaacctcaaacacattaaacactttattttggatgaatgtgataagatgcttgaacagctcggtgagtggcagtgctggggcttggctaatgctggggagttgttctttggagccaaatgatgtttatttgaaacaggagcacctcagtgcaaggacgactcttatctatcacccatgactgatggctctgggttccctggttggtctttattatgcttttaagcacagtaaagggtgtcatctatcatctttctatgatttttgtttttaacctttgagaataggggactttgataattttaggcataagtcatcaccaccaccaccgttttcattatagattcatatactgggagtcatagsggagattctaaactgaaagagaagacagtacccttctggcatctccagcacagcatttacagtcagaatttatagctgaataagtgtctagactcaggtctgggattaatgtagagagtgtttgtagcagtttgtgtgatgtggtattctagtgtgccaggtggggttaatggaagatttttctgtaagaattgaatcttggtgaatgagagtggggttggacataggccccataagtcattacaaatgayctttggcaattctatatggtragctrtaaaggtgggctccaggtagggatgtcatatttgcctgacttgatagaaaagtaatccagagagtcatagatggactctgatatctggaatataatatgtgcttgatatttgtagtctgctgaaggctggctggggcttgggcaggaaagggtygggagaaggtcccataaagcatgtttwgaaggccttgagagcctctgcactgggctttatccccatttcatagttgggaactttggggttttaccttatttcttgcttggttaaaacmaacagmtggaatctgatcccacttcttgattccaagtccattgctctttccattgtgttgttactatttccagcaatcttcacctcactgggaagtctacctctaatctttgtttatcatacctgcttattttctcctacaatttttttccttgttcttgtagacatgcgtcgggatgtccaggaaatttttcgcatgaccccccacgagaagcaggtcatgatgttcagtgctaccttgagcaaagagatccgtccagtctgccgcaagttcatgcaagatgtaaatacccttctaccttctctccctccactccccgcccgctgcctcctccccttcctcgccctcttcctcagactcccttgtcattcaagtgccaagaaggcggcttgtgcccaactgggagtaatgactccttgaagagacatacagaagcagagacagctagtgttagggcctgcgcgggtgccagggaaactccggaagacttggtcgggttaatgtgagagcgggtagtgttcgactttttcataaatcacaacatttttgaacctcttctcccttygggggagggcaggatttttctgccctaccacccacccatccatcgtctcttacatgcaccctacagccacgcaccctcaaggtggcatcgagcrtacagctggagccttctgctcaccaaaactcctacttcccggtggcaggagagcaagagagggacagacagatggcagggcatgtccaaaagaagagcatcagcacaaatgaatcctccccttccccacctccaggggtgggggcctttggcacctcaatccccgataccctactccttcccacccacatctccttgcacccatctggaacctcggttgatgtgagccggcaacagagaagcaccgtggcgcggcgagggaatgcagacggcacccagcggtggatggcggcagcggaggccgcggggaaacctgaccaggaagctgaggaccaaaccagcctctttttccgttcccggtttttttcctgaacccaacgcgtgccgtgccccgtttcccccaatatgtgttggggaggggtgtcctgaatggggtggtagattttttttcttaaaaaaatttttttgttttttttaatactcagaggagagggacataggaaaggtaaagtggatgtaatcgggtggttgttagggtttggggctaggtggggccaattgcataagcagtggagtgtgttcttcccctccctgcagtgttccttcccgtgggatgatcactctttagctgtatttggggctagaatgagatttgaaggaggccatggaacttctctttagaaagcctgccttggctgggcctggtggctcacctctaatcccagcactttgggaggccaaggtgggaggattgcttgagcccaggaatttgagactagctggggcagtgtagtgagactttgtctctaccagaaaaaccgggcgtggtggcgcatgcctgtagtcccagctacttgggaagctgaggcaggagggtttgcttgagcccgggacgtggaggtggcagtaagctgtaattgtgccactgtactccagcctgggtgatagagtgagaccctgtatcaaaacaaaacaaaaaacaaaacctgccttctgggattgggcttctggtttttttcccatgacacacrcatcctttcctattttgtcctctgggtcttcatattaactatcttcccccaggatagtataaaaagtgttaggaaagttgggctttggagttgtggtaatttctgtctttgttactttcctccccttcagggggttttttaattttaaagatgaatgcagtgaggtataatggtgtgtrcctgtagtcycagctattcaggagactgaagcaggaggatcacttgagcccaggaatttgaggctatagtgtgctatgattgtgccagtgaatagccactgcactccagcctgggcaacatggtgagatcctgtcccttaaaagcgtatctgctgctctgaatttggtattttaacaccacttactgatacctttcctgtaaacctgtagatggtttaattcttagtcaagagaccagtctcatctaaaactatcctgttgtggtctgacggcaagtaactcatcttgagtaatttttgtttctccttaagtggcattttgactgtccattgcagcattctgatcwtaaaagacatccactttgctaatgcacacgagattctcttagttgaagtaggagaatcaaatggagcagttgtcctccccccaccccatgttcttagaagcacctctgatggagttattctgaccttgagtcactgcctcccatcatttcccagatgtttggtccttgctctccctttgagaatcatctcccattttctttcctctcccacctctatttgaggtaatggcatctgtgccattgggtggtttcactgctccttgacttcatttgcagtttctttcccatgatagtttttagttgggcagtcttaaaactcatctgataggaaggaaattagatgtaatgtgagagagaccacagtaaaatgtgggtatttttgggagtggggtggggttttcaatcttctctttcctccccatccccccatggggtgtattggagatcaacttcctccacccccccaggtttaacccccccactctgccctcctcccgttccccacccccttcctcccccccagccaatggagatcttcgtggatgatgagacgaagttgacgctgcatgggttgcagcagtactacgtgaaactgaaggacaacgagaagaaccggaagctctttgaccttctggatgtccttgagttcaaccaggtcagttagacgtccagtagggggatgagcattggagcactccagctgtagcagaaacctggatattaagtacacttttattgaggaaatcacatgtgtgatgtgggagagaataatgagggtataaatatcttagggrctgagcatgagtaaggtgggagctgcttttctattctatggctggcacgggtatgtcctcaataacctcaaggaaaataaacttcaaaaattaagatccttggccaggcacggtggcttatgtgtgtaatcccagcacttggggaggctgagggaggtggatcacttgagtccaggagtttgagaccagtctgggcaacatggcgaaacttcatcactaccaaagaagaaaaaaattagccaggtgtggtggtgtatgcctgtagtcccagatactctggtggctgaggtgagaggatagcttgagcccaggaaattgaggctgcagtgaactatgattgcactactgtgctccagcttgggcaacagagtgagatcttgtctccaaaagtccttgaaggattttaggaagttgttaaaagtcttgaaacgatgtttgggggcatgttagggttcttgaatgtttaattcctctaataactgcttattcaagagaagcatttctgactgggtgcagggcagtggctcatgcccataatcccagtactttgggaggctgaggcaggagcattgcttgagcccaggacttcaagaccagcctgggtaacatagggagacgcccgtctctacaaatagtaaaaataaaaaataaaaaaagtagctgggcgtggtggtgtgcacctgtggtcccagctgcttgggatgctgaggtggaaggatctcttaaacccaggagggtggaggctgcagtgacttgcgattgcaccactgcactccagtctgggggacagagtgagaccccatctcaaaaaagtstttaattaatatacttgtgagtggtctatttgcatttaaaactgctttctagaattaggatagctcccttaggtttaatgttttggtgagcaggaatatcagttacccctccagatcttaattctagtttttwatcactttttcatgaggtgatctcatcctcatctcctagcatgtctggcaattttratttctgaactctgtgctacctcagaggccagcttccttagggaaaaatcagtgctgaaataaagttatatttccttttctgctctaaatatatagtgggggaataagagaaatgaagaggaattcctgagaacgtaattactagaaactcccctctcccacgtaatgtctctcacacaccatggacccctattcccccaatttgcgaccccccaccccaccccacaacaggtggtgatctttgtgaagtctgtgcagcggtgcattgccttggcccagctactagtggagcagaacttcccagccattgccatccaccgtgggatgccccaggaggagaggtgagctgaagatgggaaagatattttgtgtccttgggagaaaaagacagttgagagaagggaatctcaacatgttttaaatttcctttctcacaaaggctttctcggtatcagcagtttaaagattttcaacgacgaattcttgtggctaccaacctatttggccgaggcatggacatcgagcgggtgaacattgcttttaattatgacatgcctgaggattctgacacctacctgcatcgggtaaacctcacaggctgaaaaaatcccactctcccattcccttgttttctgtttgtacatcttcattcctgcctctgggtctctttcctcttyggtcttccagtgctaccctctgtctccctccaggtggccagagcaggccggtttggcaccaagggcttggctatcacatttgtgtccgatgagaatgatgccaagatcctcaatgatgtgcaggatcgctttgaggtcaatattagtgagctgcctgatgagatagacatctcctcctacagtgagtactgatctcatgaaaccctttaggtcctccctgttccttagtgtgtttgtcckaaatcccatcacataggtcatgggcatctgatgcataatggacacttgactggttcatgccccctggtctttgatgctgtgttgggatgtttttctgacctttatgtggggtttctgtcttctctcatcatattacatcccttccctcacccccacgtccgtcctctgaacccaggcagtacaccagtgtctgcatgtgtgccgtgtgttcctgcctcactttccccttttcatgccttattctgaccatgctacgttttcttctcagttgaacagacacggtagaagactckcccattttggaatgtgaccgtctgtccttcaggagaggacaccagggtgggggtgaaggagacactactgcccccacccctgacagcccccaccccatggcttccatcttttgcatcaccaccactcctgaacccccatttytgatttgtcagaatttttttttaacaaaactaaaaatgaaacacatgtgtctgtggtatctataagtgcttcgtccctttattgtatttggggtgaggttattttagggcatggtccagggtgaattcctataaggcctgggtgccctgcctgctgtgagatcaaaggggaatgggactaagactgcagagccctggctcccccactgcctgccaattgcctgcgstttgtggtctcttccactttctctggcctgggaagacgctggggtgtttatgatcccaaggctcctggtgggtggtgcgtgtattttcagygccggagggtgctgtgggcactgggggaaacttaggcrcctcctccaaggctctcttggtgcctcctcatctgttccttcagcttctggatcttgagcaccagggcttgggcctcccaggctccctcctgcccttcaaggagggcctggtacagctccagctgctgctccaacaactcttcagctcgggccagctcagctgtgcggtgggtcccagggccctggtcagggaattaagggagggagcatcagccagggcagggggccgaggccctgggaagctttgtcgcaggctgtggctggaagtgagaaattccaccttccctattcgtttttgaaccggtcatttaaggacacctgtactgagaaggccaggtagcttcctgtcttgggcataggcctctgggtggtagtagggggagcaaatagagttccctggcccaggggctgtaactggcttccttgaacaaggatatggggtcactggaaagaggatcagccgctcctccccgctaagaaataattaactgttaggtgagggggaatagatcctgttcaaggactttgtggactgtgctgttgtgggtgggggtggggtgagggaagggaaccctgaggtctgggctgggggaggtggggagaggagttggtagctgaactaagaaaagagctgcaggggtaggcatggtgtggggtggtgcagggtgggattgagggtttttttttcccacaccccagtgtaaattctcacaccctctgttcctacctgtggtgccacttaccctgggaggggacgtcatcttcccatttcctctggagttggtctgctcttccatgcttgctttggggttttgggagcagcacccatgggagccctggggtgccaaggaccaggagggcagaaggaggcgaaggaaatggtaccgagagagccagggcagagggaggaccatggcgggtgacctggccgggagctgtgtgagctgtccaacggccaccaggaactggttcgctccaggacttggcctcacttgagtgcctggccctgcccaggccccagcccccagccctgcccctgcccctgccccactctgccccacgtctctcccagcctggccccagacagagtccaggaacaactcctgttcctgatgtgaaaaatgtccctgccagtttaggcagaacttgctttagagcactggtgcccagcctaccacaggtctgtgattttttttttttgatctagtgtttattaggtatgaattttasaaacattascggtagctgtggagctggagagtattgcaccttctccaagctgcatggcgagaaccaccaatagtgtggtagaacttacagccctttccaaggccgtggctctcttggcctgcagatagcctacgcatctccctatgcttgttgtggaccactgggtgtcaggtttccytctgatagtgttatggaatggatcaactaggatagcctcaaaaactttgtatgtggaatctttaaccagcccagtgagaattcaggactcagagccccacagtggcatccagcttgctcttctgtaacagactgaaggctttaagcaaactagctggttaacaccatgatagacagscttgctgttaagttgccttcttaggaactagattttcagccaccgtggcgcttatatgtaacataaccttgcttggctgtagcccagtagcgtgctttattgggctgggtggggcggggatccctgtggagagcagagagctggtggtactgccagcagcggaccctcagaagaaagctcatgacatcagactgcttcttccatagcttctggatgtacttgtatgcaccatcttggtttacccagtggctgctgccagacagaaaggaaaggctaccacaggtcttgtgtctttttttttttttttttttgagacggagtctcgctctgttgcccaggctggagtgcagtggcgcaatctgggctcactgcaagctctgcctcccgggttcacgccattctcctgcctcaccctcccgagtagctgggactacaggtgctcgccactacgcccggctaattttttgtatttttagtggagacggggtttcaccgtattagccagggtggtctcgatctcctgacctcgtgatccgcccgtcttggcctcccaaagtgctgggattacaggcgtgagccaccgcacccggcatgcctttttcttaacactgttttctcacttcactctgcaaggtaggaattacctcactggtttgcacctgaggaaactggctcagatggtttcattcagcattcactggggaagtgtctgttgggggcagctctaggctggatgtgctcgaaggtccayagctggttgttggtagggcctggagggttcatgtctaggtccacctgacttgaaagctcatcctgaccttgcttaagtgctgattcccctttgcagatgtaccttttattgtgcttccctttattgctctttgcagatgctgttttttatttagagattggaggcttgtggcaaccctgtgtcaagcacatcaaacaggtctattggtgctattttcccaacagcaggcagacatcatgtctccatgtcacgctgtggaattctcaaaatgtttcaagcgttttcattattatacttgttacagtgacctgtaatcagttactgaagttaactattgtgattgttttgggacaccatgagcgatgctcatataagacagcaaacttaatggaaaaatgtgtgtgttgtgactgcttcaccaactggccattctcccgactctgctttccaggcctccctattccctgaggcacaacaatattgaaaggaataatccatgcggcaaatggcaaacatcattgtcttattttaagaagttgtcaaagcagccttcagcagccatgcccctgatccatggaggcaagaccctcccccagcaaaaagatcaggattagctgaagcctcatatgattgttagcatttgtttagcaattaagtattttaaaattaaagtatatggccagatacagtggctcacgcctgtaatcccagcactttgggaggccgaggtgggtggatcacttgaggtcaggagttcaagattagcctggccaacatggtgaaacctcatctctactaaaaatacaaaaattagctgggcatggtgatgggcacctgtagtcccagctacttgggaggctgagcaggagaatggcttgaactcaggaggcggaggttgcagtgagccaaaatcgtggcactgcactccagcctgggtgacagagcgagactccattaagtatatacacagttttttgtacacaatgctactgtacacttaacagactacaatatagtacaaacataacttttatgcacaataggaaactaaaaagtttgtgtgactcactttgttgctatggtctggaaacaaatcttcagtatctccgaggtatgcctgtcatttccctttccctcttcttgctggcccagaatgaccttgtttcttgcccctgtctagccctgcatgctgtaggggtttgccttctctggtaggtctgggcactttgtatcccttgtaaccttggctcctgggatatgacactggtacaactggcctcaagttctgttggactagtgagcctcccccaacacctcctgaagtagaaccaaaggcctgtgcacacaccgtgcatgtgtgagtctgcatagagatgtcagcttcctgcagggtgttctgaagggatgtcctgttgtgactggactgtgacatagccacaggcccagaggcaggagtggctcagaagggagtggctggtcccaattttgatcatctaggaacaggaaggtccttagaaaaccatgccccagaaggcaggattgctggagagtggacagctgctagccagctcgctatctggatatcactctgcattgggagggaagatggcctctgccatggtgtaagagtccaggaaccaggcagtgaggacttcccagcggtcagtgcttctcacacttgcgggccaaagcacctttagatgaggccaaagactttacgttcctcattagctgactttttcccacttaagtggaaaaagaacccagaacctttgtaaaagttttaggggagaagggctttccctcttgtatcttggtgataaggttatgcatgactcatactttaattgcaatgtgtacacagctaaagtcttaattattagaatataagagccccaaactactgttattatagataagcgaaactatgcagtatatggttaaacaatccacaactaattaacattgaaagttggccgggcgcagtggctcatgcttgtaatcccggcactttgggaggccgaggcagggggatcacttaaggtcaggagttcaagactagcctggcgaacatgatgaaaccccgtctctactaaaaatacaaaaaattagctaagcgtggtggtagccacctgtaatcccagctacttgtgaggctgaggcaggagaattgcttgaacctgggaggcggaggttgcagtgagctgagattgtgccactgcactccagcctgggcgacagagcaagactccgtctctcaaaaaaaaaaaaaaaaaaaaaaaagaaaagaaaaaaaattaactacatttttgggaggtggacagagcaatgctctgtcacccaggctggagtgcaatggcacaatctctgcttgctggaacctccgattgccgggttcaagcaattcttatgcctctgcctcccaagaagctgggattacagacgtgtgccactatgccgagctaatttttgtatttttagtacagacagggtttcaccatgttggccaggctggtcttgaacacctggcctcaagtgatccgactgcctcagcctcccagagtgctgggattacaggtgtgaaccaccgtgcctggccctctatctgttaatttaaaagattagcagccatttagaaaaaacaacaaatgagacttttgcaagacaatctaaatgatacactaataacaatcctttgggaaagtgacatttcaaccatgtgagtttctgctttaggttatgaactccaaaatggactaaatggactaacccccaataatttatagtagctagtttttttttttttcacagtaggtaattctaaaccataaataaaatagaatctgaattttggctttgttcacctgtgggaacttaattaagaaagcactggcctttgggtcggttcaaatatagtggatgaggccaggcgcagtggctcacacctgtaatctcagcactttgggaggccgaggcgggcggatcatgaggtcaagagatcgagaccatcctggccaacatggtgaaaccccgtctctactaaaaatacaaaaattagccaggcatggtggtgcacgcctgtagtcccagccactcgggaggctgaggcgggagaatcacttgaacccgggagccagaggttacagtgagctgagatcatgccactgcactccagcctggcgacagagcgagactcttgtctcaaaaaacaaaaaacaaaaccaaaaagaaagaaaaccaaatatagtggataatcgtggatctcataattgtagaaatgaaggaattaagctaaaaaaatacataaaccagaatacctagtgctaaagttgaatgtccccaccaaaactcgtgttgacatttaattgctatcctaatggtattaagatgcaagacttttttttttctttttttgagatggagtttcgctcttgttgcccaggctggagtgcaatggcacaatctcagctcactgcaacctccgcctcccatgttcaagtgattctcctgtctcagcctcctgagtagctggaattacaggcacatgccaccacgcccagctaatttttgtatttttagtagagacggggtttcatcatattggtcaggctggtcttgaactcctgacctcaggtgatccacctgccttggcctcccaaagtgctgggattacaggcatgagccaccgtgcccagccgatgtgggacctttcagggttgattagattgaatagattaatgccattgtatggcatgatagaaatcagttcagcctctttgcccttccacctctcactatgggatga

SEQ ID NO: 94538 - DNA, 15922 bp, Homo sapiens
  misc_feature (1)...(15922): n = A,T,C or G
ttgacctgtacaggcccctggctaagagtcaccccagtgggactgacacttctggttagaagcttcacctctttcccccactccagctttcaactctagacagctttctgactgcttctggagtggcagagcatgggataattgattcctgctgagggccttttctaccagtgttagggtgtagcccggaggtctcggtccccatgacccgcaattccattcctagyctccgggaccctgctcagcaagtgcggaaaacagcggggctggtgatgacccacctgatcctcaaggacatggtgaaggtgaaggggcaggtcagygagatggcggtgctgctcatcgaccccgagcctcagattgctgccctggccaagaacttcttcaatgagctctcccacaaggtgagaggcagagaggcactgagggctggctgcagagggaatctgtaggtcacctcatctccttaacatggctctctctgtcttacagggcaaygcaatctatratctccttccagatatcatcagccgcctgtcagaccccgagctgggggtggaggaagagcctttccacaccatcatgaagtattgctccccgggccctggggcacattttccacatagcacgggcttaggaatcagacacacctgtatttgaattccacctcggctactctttagctgtacagccttcggcaataacttagcctctctttgtgcctatttcctcttcttttgaggctgatgatacttaacccttagttcttgaaaatattaaatacgataaagttcctaacatggtggcagacatacagtagcactcactccctagcagctgctcctgttaatttccattcacagtgaaaattcctgagccgggggcggggtggggtccctctctgctgaatgggacagggcaaggggagtggtgaggcagacaggggccgtggcagagaacatcagagaagacgagtgctgggggagggtccagggttggtcttagtggatggcagagctggccctgggccatcgaacatcctcatcttcccttcctgcagacagctcctctcctacatcaccaaggacaagcagacagagagcctggtggaaaagctgtgtcagcggttccgcacatccckgtatgctgccctccctgagggttctttgtgctgagcggggccctgcaggggagaaaggcccatccctcaccccttcaatgcccccactgtggcatccctgggactggggaggctgatggggaaggttgagcctttactagctggatctcccagttcctcacaaagcccttcctatctgcagaactgagcggcagcagcgagacctggcctactgtgtgtcacagctgcccctcacagagcgaggcctccgtaagatgcttgacaattttgactgttttggagacaaactgtcagatgagtccatcttcagtgcttttttgtcagttgtrggcaagctgcgacgtggggccaagcckgagggcaaggtgagcagcacaggacacttcaatgcctgttgggttctgggctggctaagacatctgccggccctgggcagcatacggctcttgcagtcaccttcccgtcctccttatccccagctgggttgcaaccaaattgccagagtgacctaagaccagatctttgtctccagttctttttttattactccaaaaacacaaccaaagcagcatctcatccaattcttgtttgtttgtttttaatagtttttatttttcagagcagttttaggttcaaagcaaaattgagcagaaagtacagggagttcccttctaccccttgcccctacacatcacagccttccccaccttcaacatcctgcaccagggtggcacatttgttacagctgaacctacacttacacatcatctcctaaagtcatggtttaccttggagttcactgcacgtaatgacatgtacccaccattgcagtatcatacagaagagtttcactgccttacaaatcccctgcactccacctatttatccctctctccccacaacccctgatctttttactgttgccatcactttgtcttttccagaatgtatcattggaatgatccggtatggagccttctcaccttggcttcttagtaatgtgcgtttaaggcctccatgtcttccatggccttgtttctttttaatcagaagtaactgttttcaggcctgctctgaatctccttttctccctccaggctataatagatgaatttgagcagaagcttcgggcctgtcataccagaggtttggatggaatcaaggagcttgagattggccaagcaggtagccagagagcgccatcagccaagaaaccatccastggtacgtaaggcagcctgtgcgggcgagaccagactgggccctcccctcctgcagtgatttgtttcttcttcttttttaaatcacgttttcctgccttttctaggttctaggtaccagcctctggcttctacagcctcagacaatgactttgtcacaccagagccccgccgtactacccgtcggcatccaaacacccagcagcgagcttccaaaaagaaacccaaagttgtcttctcaagtgatgagtccagtgaggaaggtatgatgctcccgcctgttcccggccgagaaggcacacagctagggtgcagagggctggtttccataggacctgctgcgggggcctgagtgtagatgctctgccccactgccgcagaagggcctctcctgtacagcttggattttatttcttctgtgcggtgtgggattgtctcacttgttctctgatatctattttttcaccatctttgtgactcagctttttcttattcctttaattctttgcatagatctttcagcagagatgacagaagacgagacacccaagaaaacaactcccattctcagagcatcggctcgcaggcacagatcctaggaagtctgttcctgtcctccctgtgcagggtatcctgtagggtgacctggaattcgaattctgtttcccttgtaaaatatttgtctgtctctttttttaaaaaaaaaaaaaggccgggcactgtggctcacgcctgtaatcccagcactttgcgataccaaggcgggtggataacctgaggtagggagttcgagaccagcctgaccaacatggagaaaccccatctctactaaaaataaaaaattagccgggcgtattggcgtgcgcctgtaatcccagctactcaagaggctgaggcaggagaatcgcctgaacccagaggcggaggttgtagtgagccgaaatcacaccattgcactccagcttgggcaacaatagcgaacctccatctcaaattaaaaaaaaaatgcctacacgctctttaaaatgcaaggctttctcttaaattagcctaactgaactgcgttgagctgcttcaactttggaatatatgtttgccaatctccttgttttctaatgaataaatgtttttatatacttttagacattttttcctaagcttgtctttgtttcatctttcacattagcccagtttcatgcagcagagagagggttatcagtgcagagagagatgagtgagcccagagtcctagggcctgtcccgggatggcagatgagcttcctgccccgtcactgccacctttcccctctcaacctctggaccctgcacagtgaccagacagcctctctggggagaattatgcagtgcctaggctccagatcagtgcttctgaaccgggggcaattttgtctgccagaggacatctgacaacacctggggcctgttttgttgtcatagcctataggggaagaatgctaccagcatttgtgggaagaggccagggatgtggctcaacatcctgcagtgcacaggatggcccctcaacaaagaatcacacggcccacaatgtcaatagcgtcacagttgagaaaacctgctctagaccaagggttgctttctgccgtgtgcctcaccccacccccactcgtgttccctaatcccatctccaaaggttggcagcagaccggcccaggctcgtggaagttcagatcatgatcccctccagctctgcaggagacaagacctgtctcccagcattcctcattgttcccgggtctgcagagggcgtgagctatgctgcaggcgggctgccccctgaagcctgcgcacccctctccagctcctcaagtcttctctgctgagtcaccttcgaaccggaggctgtgagctggctgtcgtgaccacactggtgcctctgctgtcatgacaacagcacactacgtcagtagtgctccctgggcactgagctccctctttgcggggagaagacagtaatgaaaaatgacaagcatgaggcagaggggaagatcacgcttgggtggtgcaggagcatggaggtgctcttaatgctctcaatgagaaagggttaacggtcctggttgcaggaatagctgagtcagaggtggggcttcctccactcccccaccccacccctttcaccattagggaccttcttgccttgctcttgctactctgctctgggtggtcattgtgaaaagcccgcaccaaccatgccagtggcagccagacgaggacacagcctggctctgggtcccagcaggaaaggcaatcccagaaaggcagggtcagggactggagtcctgtgggtgctttttaagcaaagattatcaccaggcaggctaaacttagcaaccggcttttagctagaagggcagggggctggtgtcaggttatgctgggccagcaaagaggcccgggatccccctcccatgcacctgctgatgggccaaggccaccccaccccacccccttccttacaagtgttcagcaccctcccatcccacactcacaaacctggccctctgccctcctaccagaagaatggatcccctgtgggagggggcaggggacctgttcccaccgtgtgcccaagacctcttttcccactttttccctcttcttgactcaccctgccctcaatatcccccggcgcagccagtgaaagggagtccctggctcctggctcgcctgcacgtcccagggcggggagggacttccgccctcacgtcccgctcttcgccccaggctggatggaatgaaaggcacactgtctctctccctaggcagcacagcccacaggtttccaggagtgcctttgtgggaggcctctgggcccccaccagccatcctgtcctccgcctggggccccagcccggagagagccgctggtgcacacagggccgggattgtctgccctaattatcaggtccaggctacagggctgcaggacatcgtgaccttccgtgcagaaacctccccctccccctcaagccgcctcccgagcctccttcctctccaggcccccagtgcccagtgcccagtgcccagcccaggcctcggtcccagagatgccaggagccaggagatggggagggggaagtgggggctgggaaggaaccacgggcccccgcccgaggcccatgggcccctcctaggcctttgcctgagcagtccggtgtcactaccgcagagcctcgaggagaagttccccaactttcccgcctctcagcctttgaaagaaagaaaggggagggggcaggccgcgtgcagccgcgagcggtgctgggctccggctccaattccccatctcagtcgttcccaaagtcctcctgtttcatccaagcgtgtaagggtccccgtccttgactccctagtgtcctgctgcccacagtccagtcctgggaaccagcaccgatcacctcccatcgggccaatctcagtcccttcccccctacgtcggggcccacacgctcggtgcgtgcccagttgaaccaggcggctgcggaaaaaaaaaagcggggagaaagtagggcccggctactagcggttttacgggcgcacgtagctcaggcctcaagaccttgggctgggactggctgagcctggcgggaggcggggtccgagtcaccgcctgccgccgcgcccccggtttctataaattgagcccgcagcctcccgcttcgctctctgctcctcctgttcgacagtcagccgcatcttcttttgcgtcgccaggtgaagacgggcggagagaaacccgggaggctagggacggcctgaaggcggcaggggcgggcgcaggccggatgtgttcgcgccgctgcggggtgggcccgggcggcctccgcattgcaggggcgggcggaggacgtgatgcggcgcgggctgggcatggaggcctggtgggggaggggaggggaggcgtgkgtgtcggccggggccactaggcgctcactgttctctccctccgcgcagccgagccacatcgctsagacaccatggggaaggtgaaggtcggagtcaacgggtgagttcgcgggtggctggggggccctgggctgcgaccgcccccgaaccgcgtctacgagccttgcgggctccgggtctttgcagtcgtatgggggcagggtagctgttcyccgcaaggagagctcaaggtcagcgctcggacctggcggagccccgcacccaggctgtggcgccctgtgcagctccgcccttgcggcgccatctgcccggagcctccttcccctagwccccagaaacaggaggtccctactcccgcccgagatcccgacccggacccctaggtgggggacgctttctttcctttcgcgctctgcggggtcacgtgtcgcagaggagcccctcccccacggcctccggcaccgcaggccccgggatgctagtgcgcagcgggtgcatccctgtccggatgctgcgcctgcggtagagcggccgccatgttgcaaccgggaaggaaatgaatgggcagccgttaggaaagcctgccggtgactaaccctgcgctcctgcctcgatgggtggagtcgcgtgtggcggggaagtcaggtggagcgaggctagctggcccgatttctcctccgggtgatgcttttcctagattattctctggtaaatcaaagaagtgggtttatggaggtcctcttgtgtcccctccccgcagaggtgtggkggctgtggcatggtgccaagccgggrgaagctgagtcatgggtagttggaaaaggacatttccaccgcaaaatggcccctctggyggtggccccttcctgcagcgccggctcacctcacggccccgcccttcccctgccagcctagcgttgacccgaccccaaaggccaggctgtaaatgtcaccgggaggattgggtgtctgggcgcctcggggaacctgcccttctccccattccgtcttccggaaaccagatctcccaccgcaccctggtctgaggttaaatatagctgctgacctttctgtagctgggggcctgggctggggctctctcccatcccttctccccacacacatgcacttacctgtgctcccactcctgatttctggaaaagagctaggaaggacaggcaacttggcaaatcaaagccctgggactagggggttaaaatacagcttcccctcttcccacccgccccagtctctgtcccttttgtaggagggacttagagaaggggtgggcttgccctgtccagttaatttctgacctttactcctgccctttgagtttgatgatgctgagtgtacaagcgttttctccctaaagggtgcagctgagctaggcagcagcaagcattcctggggtggcatagtggggtggtgaataccatgtacaaagcttgtgcccagactgtgggtggcagtgccccacatggccgcttctcctggaagggcttcgtatgactgggggtgttgggcagccctggagccttcagttgcagccatgccttaagccaggccagcctggcagggaagctcaagggagataaaattcaacctcttgggccctcctgggggtaaggagatgcngcattcgccctcttaatggggaggtggcctagggctgctcacatattctggaggagcctcccctcctcatgccttcttgcctcttgtctcttagatttggtcgtattgggcgcctggtcaccagggctgcttttaactctggtaaagtggatattgttgccatcaatgaccccttcattgacctcaactacatggtgagtgctacatggtgagccccaaagctggtgtgggaggagccacctggctgatgggcagccccttcataccctcacgtattcccccaggtttacatgttccaatatgattccacccatggcaaattccatggcaccgtcaaggctgagaacgggaagcttgtcatcaatggaaatcccatcaccatcttccaggagtgagtggaagacagaatggaagaaatgtgctttggggaggcaactaggatggtgtggctcccttgggtatatggtaaccttgtgtccctcaatatggtcctgtccccatctcccccccacccccataggcgagatccctccaaaatcaagtggggcgatgctggcgctgagtacgtcgtggagtccactggcgtcttcaccaccatggagaaggctggggtgagtgcaggagggcccgcgggaggggaagctgactcagccctgcaaaggcaggasccgggttcataactgtctgcttctctgctgtaggctcatttgcaggggggagccaaaagggtcatcatctctgccccctctgctgaygcccccatgttcgtcatgggtgtgaaccatgagaagtatgacaacagcctcaagatcatcaggtgaggaaggcagggcccgtggagaagcggccagcctggcaccctatggacacgctcccctgacttgcgccccgctccctctttctttgcagcaatgcctcctgcaccaccaactgcttagcacccctggccaaggtcatccatgacaactttggtatcgtggaaggactcatggtatgagagctggggaatgggactgaggctcccacctttctcatccaagactggctcctccctgccggggctgcgtgcaaccctggggttgggggttctggggactggctttcccataatttcctttcaaggtggggagggaggtagaggggtgatgtggggagtacgctgcagggcctcactccttttgcagaccacagtccatgccatcactgccacccagaagactgtggatggcccctccgggaaactgtggcgtgatggccgcggggctctccagaacatcatccctgcctctactggcgctgccaaggctgtgggcaaggtcatccctgagctgaacgggaagctcactggcatggccttccgtgtccccactgccaacgtgtcagtggtggacctgacctgccgtctagaaaamcctgccaaatatgatgacatcaagaaggtggtgaagcaggcgtcggagggccccytcaagggcrtcytgggctacactgagcaccaggtggtctcctctkacttcaacagcgacacccactcctccaycttygacgctggggctggcattgccctcaacgaccactttgtcaagctcatttcctggtatgtggctggggccagagactggctcttaaaaagtgcagggtctggcgccctctggtggctggctcagaaaaagggccctgacaactcttttcatcttctaggtatgacaacgaatttggctacagcaacagggtgrtggacctcatkgcccacatggcctccaaggagtaagacccytggaccaccagccccagcaagagcacaagaggaagagagagaccctcactgctggggagtccctgccacactcagtcccccaccacactgaatctcccctcctcacagttkccatgtagaccccttgaaraggggaggggcctagggagccgcmccttgtcatgtaccatcaataaagtaccctgtgctcaaccagttacttgtcctgtcttattctagggtctggggcagaggggagggaagctgggcttgtgtcaaggtgagacattcttgctggggagggacctggtatgttctcctcagactgagggtagggcctccaaacagccttgcttgcttcgagaaccatttgcttcccgctcagacgtcttgagtgctacaggaagctggcaccactacttcagagaacaaggccttttcctctcctcgctccagtcctaggctatctgctgttggccaaacatggaagaagctattctgtgggcagccccagggaggctgacaggtggaggaagtcagggctcgcactgggctctgacgctgactggttagtggagctcagcctggagctgagctgcagcgggcaattccagcttggcctccgcagctgtgaggtcttgagcacgtgctctattgctttctgtgccctcgtgtcttatctgaggacatcgtggccagcccctaaggtcttcaagcaggattcatctaggtaaaccaagtacctaaaaccatgcccaaggcggtaaggactatataatgtttaaaaatcggtaaaaatgcccacctcgcatagttttgaggaagatgaactgagatgtgtcagggtgacttatttccatcatcgtccttaggggaacttgggtaggggcaaggcgtgtagctgggacctaggtccagacccctggctctgccactgaacggctcagttgctttgggcagttactcccgggcctcactttgcacgtgtgcttacctagtggagacaaaagtacatacctcggtagagcgcgcacgcctgtaaccccagcactttgggaggccaaggtgggtgtatcacctgaggtcaggagtttgagaccagcctggccaacatggtgaaactccgtctctactaaaattacaaaaatcagccaggcttcatggcacatgcctatagtcccagctacaggcatgctgaagcaggagaatcgcttgcaccccggaggcagaggctgcagtgagctgagaccacaccactgcactccagcctaggcaacagagtatgagactccatctcaaaaaaaaaaaaagtacctacctcagagttcaaactagtgaatattaggaagtgcttgagacagtgacaccaaagtgcacaataaatactcgccagtttcattattattaaagaatccatttgaatgtcagctcaacacagcctcctataccgaggcattgtgaaccgcatctccccagcttctccaggcttttccaagaatcagggacactgtagcctgttggtctcagtgtatgacagacacggaggaagcacatctttagctgatacttaaacagagaccctgagcgcacatacacccgcgcacacatgcatggagcttcaccttctctgtcattctgcagtgaccaggagagcaagagctcccacctcccttcaaaacactgtgcccatcccgggcactaaggcctctttaaagcacggcacctccacgagggagggccacagccacatacactccacctggcaggtggacagcgtgagcatgtggaccatagcagggacaaggtgccccggccagccccaacgccctctgccgctgacagggacagaagccctctccagctgcgtgtgctgcagaggccatgcgtagcctccagctgcattctattccactccagtgcctgggccagttagcaccagtgtggaagacagtgagctggctccggacaacagggatggaggaaaggtcccacattcacattcctgatacgtggacaaggtgaggggccgcaatcgctctggcagcattttaaagatggggaagtagcagacacccacgcgtgaaggcaggagagccccaactgtggtggaaatggccccagaatggtagggccaagcctagctccagacaccccagagccctggagaagccaagactgagggagaaagcctgagggaggagcgccccagtccccagggrccggcctggtgcagagctgcagctgatgttcccctctgtgcagccccaccctctgcctcgctgagctccctgctgcgagggcctcgggtgcaagggggaggcaggtctctatctcatggagctgtcagatgagacatcgcgatcggagtcctcagcctcgcttggcggcggcggcgggtcgctaagcgggaccgcagtgaaagcaggagactttctagaaaaaaacaccagttgtcaaccttggggcaggcaggaatcctgaagacggacggcactcctcctcctgctgcctcaccctctggcagcccgtgagaagtaccggaagcgagggcggggccgcgggatggcgagggagcggcagggactgaactctctccaaacccaccctgacagggaaatgggccccgcctgtgtcttgggaactcagaggctgaggtcaggcatgatggctcacgcctgtaattccagcactttgggaggcagaggcgggtggatcacgacgtcaggagttcaaggcaagcctggccaacatggtgaaaccccatctctactaaaaatgcaaaaattagccaggtgtggtggcgggcgccttggaggctgaggcaagataatcacttgaacctgggaggcggaggttgtagtgagccaaaaaaaaaaaaaaaaagaaatagctgaagtcacagtaggagagaagctgctgagcctccagcaccctgactctagggccttggctttatgtctatctgcagtatttttgtgatttttaaaaattcactttcttgttgcggtgtaacttacacagggtcaaatgcacaaatcatggccctgactttagataaaaatctgcccccacaacccttctgttccttgccagtttttaaactgcctctaaccaggggaaccaccagagctggtggccttgggaggtttcagccctcccgtcatgaatggacatagctcatccaactgccaagggagagagctgtgggtctgggccagccccaccaggtaactcccaaagggcagccccacagcaagatgtgacccagtcattgcctgagggtctctggggctgtgttccaacctttctccccgctgtgtccccctggaaggccccatgcccaggggaggcgcctaccggtctccagactgggtgatgagccggcggcaggtctccatctgcacgtccaggccgcgcttcatgctgcacatctccatgtactcgtgcaggtgccggttcatgtcgttcttggccgtggccaactccagctgtggtggggcaggcagggccatcggggttaacaggtggcgttcacagcgcctctgttgcccccgccaggaggccaacacgccaagagcagtggctgggccgggggcccaggcagccattactgaaggctcagattttaaaataaaccagaccaaggcagaaggcagcgaatacaccattgtttcctctgcttttcctggaaatctttgcctatggaggaatgcaaaggtactgctgcaggctgtgttcttttaagactgataagagtggtgaggaaagtcagtgtgggcgggatggagcagatccacaggctcccagggccacacaggttcctatggggcccggctcacccctcatcccctgtactgcgctggtcctgggctgtcccctcactgcactgtgagctcccgtaagggttagcgacaggttttcctcatcctggcagacccagacctcgaagggaattaactctctctgtgacccgtggcatacaagcctggctaactgctgaaaggggcccaatcctcttaccattctctccttatcactttattttctcacctaaaagccattttcagacactaaaaggaagactcccatattggaggtgccattgattctgagacctgtcctgatttcagaaatgtcacacgtggaaaacacggggctcagaatcaaagaaatccggtctccctccccgggcccattctgcagcccacactctgaggcaggcggagaggcagggcccaggcagcacaaactcagtgccagggacagtcgactgcctctctttgttttgggtacaaagggcaggggccgcaaggggaagcaaaatgaaacttcctggagatgacgttcgtgactgcctgagtgaagagaacggggaggataccagctgccataatgtggattggacagagagggtgggaacttagagaaagaaggaaacaggttacagggccagacagcagagatggtcaggacagtgacatttggggtgagatggcggctggctgggtgagaagccctagtggggacagcttccctggcaggcttggatccacagctggggccccacagtagtgggaggagcaggacacggtgactgttcaacccagggggaaaatacagtgccaccagcccttgttcagatcagctgcctacaccccaatttctccaccttggaagaaccggagtgcagggagctgggttctggaaccatcactcagggagactgggaagaaggaaatgaaccaaatatattctactgaaatacaaggctagtactgccaccagtagtctctgcatatgtctatgtccccacttaattcacaaatttacagcaggaacaaggtcaggaggtgaacgtgcatgtcaggagatgtccttgacaagccaccttgaaaactgcaggctcgctgtgtgaacagacttgggggtgggacgggaggagacagagagaggtgaggagcggtggggaagaactgcctcccgcccaccactctgggccttggctttaccttgctccatcttagtgaccctgagagatcaaaggtcacaaagataaaggcaccttgggtactcctgaggtcagcaagtcctcctaacggttcccctaatgcagaagtccccaaaccccaggccacggaccagtacctgtctgtggcctgttaggaaccaggccaaatagcaggaggtgagcagtgggcaagtgagtgaagcttcatctgtatttacagctgctccccatcactggcattacagcctgagctccacctcctgtcagatccgcggcggcattagattctcacaggatcctgaaccctaccttacgtgaactgtgcatgcgagggatctaggctgtgtgctccttatgagaatctaatgcctgatgatctgtcactatctcccatcacccccagatgggaccgtctagttgcggaaaacaagttcatggctcccactgattctacattatggtgagatgtataattatttcattatatattataatgtaataataatagaaataaagtgcacaggccgggtgcggtggctcatgcctgtaatcccagcactttgggaggccgaggtggtggatcacctgaggtcgggagttcgagaccagcttgaccaacatggagaaaccccatctctactaaaaatacaaaattagccaggcgtggtggcacatgcccgtaatcccagctacttgggaggctgaggcaggagaattgcttgagcccgggaggcggaggctgcagtgagccaagattgcgccattgcactccagcctgggcaacaagagcaaaactctgtctctaaaaataataataataatttttaaaaatagtaataaagtacacaataaatgtaatgtttgaatcatctcaaaatcatttcccccgggtcagtggaaaaactgtcttccacaaaccagtccctggtaccaaaaaggttggggactgctgcctaaagtcattgcactgggagagaggaggagtcagatgatttgaaaatacttttttttttttttttcctgagatggaatcttgctctgtcacccaggctgtggtgcagtggcacaatctcagctcactgcagcctccacctcccagattccagcaattctcctgcctcagcctcccaagtagctgggattacaggtgcccaccacaatgcctggctactttttgtatttttagtagagacggggtttcacatgttggt

SEQ ID NO: 94539 - DNA, 29699 bp, Homo sapiens
taaaaaccctagaagaaaacctaggcattaccattcaggatataggcatgggcaaggacttcatgtctaaaacaccaaaagcaatggcaacaaaagccaaaattgacaaatgggatctcattaaactaaagagcttctgcacagcaaaagaaactaccatcagagtgaacaggcaacctacaaaatgggagaaaatttttgcaacctactcatctgacaaagggctaatatccagaatctacaatgaactcaaacaaatttgcaagaaaaaaacaaacaaccccatcaaaaagtgggcgaaggacatgaacagacacttctcaaaggaagacatttatgcagccaaaaaacacatgaaaaaatgctcaccatcactggccatcagagaaatgcaaatcaaaaccacaatgagataccatctcacaccagttagaatggcaatcattaaacagtcaggaaacaacaggtgctggagaggatgtggagaaataggaacacttttacactgttggtgggactgtcaactagttcaaccattgtggaagtcattgtggcgattcctcagggatctagaactggaaataccatttgacccagccatcccattactgggtatatacccaaaggactataaatcatgctgctataaagacacatgcacacgtatgtttattgcagcactattcacaataggaaagacttggaaccaacccaaatgtccaacaatgatagactggattaagaaaatgtggcacatatacagcatggaatactatgcagccataaaaaatgatgatttcatgtcctttgtagggacatggatgaaattggaaatcatcattctcagtaaactatcgcaagaacaaaaaaccaaacaccgcatattctcactcmtaggtgggaattgaacagtgagatcacatggacaccagaaggggaatatcacactctggggactgttgtggggtkgggggagtggggagggatagcattgggagatatacctaatgctagatgacaagttagtgggtgcagcgcaccagcatggcatatgtatacatatgtaactaacctgcacaatgtgcacatgtaccctaaaacttaaagtataattaaaaaaaaaaaagtcaggaaacaatacacgctggcgaggctgtggagaaataggaacacttttacactgttggtgggaatgtaaattagttccaccattgtagaagacagaatggcgattcatcaagaatctagaagcagaaataccatttgaatccataatcccattactgggtatatacccaaaggaatataaatcattctaccataaagacatatgcacatgtatgtttattgcagcactatttacaatagcaaagtcatggaaccaacccaaatacccatcaataatagactgaataaagaaaatgtggaacatatacaccatggaatattatgtagccataaaaaggaatgaggtcatgtcctttgcagggacacagatcaagctggaagctatcatcctcagcaaactaacacaggaacagaaaactgaacatcacatgttctcattcataagtgggagttgaacattgagaactcatggatacagagaggggtacaacacacaccagggtctgttggggggttgagggtgaagggagggaacttagaggatgggtcaataggtacagcaaaccaccatggcacacatatacctatgttacaaacctgcacgttctgcatgtgtatccctttttttttaggagaaataaagaaaaagaagaagagaaaaaaaagaaaaaggacattagtggaaaaactagtgaaatctgaataaagtctaatttagttaatagtgattcactaacgttaatgtctttattttgataaatgtatcacggctacataagttgttaacgttagggaaaactgggtaaagggcactgtttttgcaacttttttgcaagtctaaaattattccacataagaagtgtattaaaaataaattcatttccatcctcttatttccgcaacatactgtacaagcaagactcagtctgtgattcaatcatcagtggtcagactatgactcgaagggaaggaagtcaaatgcagttcattttaacattgtcactatccccttattcactcaagcctgacccagcccctagactctttccccctgcaaatctcctcttatgctcctgactacaaatctgctcttgatcccttgaattgttacttaatagcatattaagacttgtctttgacagccttttctctgaccttagatctttgcctcctcaaaaaatacctcccacctgaatagcatgctgtcctgccctcccacccatccctctttattatattgcattgtctggttgtaatgtcttcccagcatttagcttcatgcaaaggtatcttgttcaatcacaaggtttacttatacctgtcgtctcttatccaggctgtaatctccctggaaatgaggacttttcctgtcttgtttactgctgatccctgaggcctaaaacagtacctggaatggatagatggtatttttttaaattaataaatgaataaacttcttgacagaaaagtttctgttatatgtttctgtatcctctccagctcctaggaccactgcaataatgacttgtcatgaattgtggtgatgctctttaaaataatctctcactcttatgtccatcagttcactgaagaaaacctttcttaagtaccagccatctgctttctacaatgtagaaatacacagaaccagatgctggtccaggaaagtcaggtaatgtgaaggaggcaacatcatgcttatttacaataacatagcactttttaagttccaatacacaacagagtggttaaccttatagaaaatagcatttgaaagttcctagaaaatcacttcaagagtcctaatgcagtgatccgagaggatgagtcagttatttctggctcacaattctatgatgttggtgaaatagattgatttcttttcccagtgaagtgggacgtttttaatttgaatgacaaactacacaaatctgcgttttattttacaaacacttgtctcaggtttaaggatctcaagtgaaaactgaaaaacaaaacagcatgaataagacctgttctatgttaaacttaattatttttagtcaggaggtaaaagacagaaactcctggccaggtgcggtggctcatgcctgtaatctcagcactttaggaggctgaggcggatggatcacctgaggtcaggagttcgagaccagcgtgaataacatggagaaaccctgtctctactaaaaatgcaaaattatctgggtatagtggtgcatgcttgtaatcccagctacttgggaggctgaggcaggagaatcacttgaacccagaggcggaggttgcggtaagccaagttcgcgccattgaactccagcctgggcaacaagagcaaaactctgtctcaaaacacacaaacaaaccaacaaaaaaaagacagcaactcccttcctgcttctgcctgctgctggctcagtccctatgcataatgaatattgaatgacagactccatccccagaccccttcccaaggctaggatgttgctcctgtgatgtgcttccttttcactgcattcatcatagtttaccataatcgtttaattttctgtcttccttgtaagctctgtaagctccacctaggcgagccaggtctatcttgtccaccattttatacccaggatttggcacatgcctaccacacactcttagcacaaaaatgctcaaaaaatagttgcataatgactatattatgcgattgttttatggcgaatgaccatattctgaagagagagacctctgtgatggagagcccaagcaagaagttttaaagactgaaacgcattctgaatagatactgggataggctccagctgtgaggaacaacaggcttttcagaagcacgtgattgttacctcatcctcacaggtaatttttgagtagctaacccaatgacattgttttctttgctagagtaactgatgatgtggccttggaaattcactctgttaaaaataactctcaaccctaattttgagagttgatttgaagttataatttctcattcttcttctaaaaatccagaagaattggcatcagtagctttatctatgtttcttaaaaggttatcaatccctaacgttaagcatttccatgcacctgaaaggatcggcttctctgatctaaatgtcttaaacacctcgtaaatgtgggtttttttggttttgaggaaatgactgccaatcttcactactagctagaaaaagtcacactctagaaaaaagggagtacctttccattactactaccaaaacatagccccacaaatttaagttacaacataaaagaaataacaaattttgagcactttctatatatacttcagttgtatctatttcaaagtcacagacccaaaactcacacatgtaatcaggtaaatatatatgtatgtacatagagctatagaaatagatacatatgtgtatatgcatatatatactgatatatgcataaatttaaactggcatatatatttacactgagataaatgtttgcgtgtgtgtgtgcgctcttacatttctgaatcattcttcagcctgcctgatcattaacaaattaatctaagcacattattatttgtttgtcttagttttccagtccaatccaatgtgatttcgaagtcaattccttcacattctgtttaaactccctcccaagttttctccctctctgttcctcactatgatcaggtctaatctccagggtctcatgttctgcccctccaagtaaacaaattaatccaggtttcatggactcttccagttgttcagctcaaattgattactgttaaggggaatttgagggcattgggccaatttttaaagacaaatatgaatttttatggaaatctccaagtattttaatgttgataacaatttttttaaaaattaaatactatatgcatacccctgtcttcctccccatcccaaaaaagagatgactattagctagccacattgcaatttctgtcctggactgctgaagggtccttgggtatacttaaggaatatataaacctctttttcaaactgcagtcaacctattattaatgtagtaaagttaatttaaattcataggaatcagtatttttagtaagctaaaaagaataatttaggatggaatgaatggaattgaaggaaaaagagtgaaaagcaagaatattattttgagaaatgttatatttatgtgtgtatgtgtaccaagtgacacagaaattgtatttctgaggagagtggccaaacaagtttggaaatgcatatatataatttagttctattcagtttcccaaatacagttgtccctcagtatccacaagggattgagtccaggaccctctatgggtaccaatatcttaggatactcaaaacccttatatacaatagtgtaatatttgcatttattttacacacaacatcctgtatactttaaatcatttctaaatgacttataataccttatacaacctaaatgctatgaaagtagttatcacactgtattatttttaattgttttttttttaatgttttcaatgggggagttggttgaatccacagacagggaattcaggtacagggagggccaactctagttctgcacccacagaggataggaacataaaaatgcggactccctaaggcctccttcccctccacgttctttcttcagtcttcctctagggggagctcaagttagctttagcacagtgtgaagccagtgcagcgtctcgcttccacttctccagggggcgctgcaaagattttggtcgccaaagatatcacggtgcgcgcgtctggaagcatttccgctctggagcattttcgttccgccgggtgccagcgttcctgtgacgcgtttcctgttggccgagctgcgcacgtgcggccggaagggaagtaacgtcagcctgagaactgagtagctgtactgtgtggcgccttattctaggcacttgttgggcagaatgtcacacctgccgatgaaactcctgcgtaagaagatcgagaagcggaacctcaaattgcggcagcggaacctaaagtttcagggtgagatgcgttgactcgcggtggctcagaagmcccacgcgcgagccctggcgcgttcgggcggccgggggcccagctgctctgtgtgacggaggcagcttcccctgcagcgtgtgtgattggggagagtgaaaaggcagcttccactcgggacdcgcgctgctgcccactcgtcgcgtggctccagcgctgctcctgacctttctgagcaatcagtgtcttcttacaacgttagagcgggaggactccccgttcacttctaggcttacgactaaccctgccttttgcatttccaccttagcttttggttccctcaccacctgcaagtcgcacctcacctcatccctcatttccggttatgctgcatgaaacgtctcatttccacccacttttcacatctatttaattcccgtatttctttccccaaaagcccgtctggctgtttccacagagcttctttgatactattgccttcctctacccacttccacacgttctcgtagcactttctcaccagagsttctacgtatttgtgtcccgcacagtgacctaaatgaaaaggattttatctgaatgtcacctttcttacctacctcatttgcagtcccagtgtcctgacagtggggccacagatcttgaagtaattgtgttaacctgttgtccaggttaagatacaaactccccgagggaaagtttggaggcacagtgccttgccccagttggttttcaacagacattaattgaaaaaaaattctgcaggaggcaataggtttgtgaattttaggaatatgttttgaaatactcttgtatttctaattcctatagaataatactacagcattactacttttcagcgcatatgtaagtaaatttgaacaaaagatggtgttttatctttttcagtaaacaaacagggaacctttggtaaggacattctcaggtacagtcatgcatcgcrtaacaggaggggggatacattgtgagaaatgtgtcattaggggcttttgtcgttttgcgaactttatctagttacacaaacctaaatctactacacacccaggctacatgatatagcctgttgctcgtaagctgtcatcctgtacagcatgttactgtactatactcagagaattgtaacacaatggtaagtgtatgtatggctaaatatatctaaacatagaaaaggtacagtaaaaagactatgacatgagagatttagaaaatggtacctctgtatacagtacttaccatgaatggagtttgcaggactggaagttaycctgagcgagtcagtgagcggtgagtgaatgtgaaggcctagaacattactgtacactatagactttataaacactgtacacttgggctacactgttgagttttttaatacttttattcttaaattaaccttagcctgctgtaacttttacattataaacttgttaaattttaaccttttgactttaataacacttagcttacaacacaagcacattgtacatacagctgtacaaaaagtttccttttgtccttattctatgtgatttttattttatttttttttctttttaagctttttgttaaaaatgtaaagacacagacacattcagtttcactgtcttccgcttccacatcttgtcccactggaagatcttcaggggcaacaataggcatggagctgtcatctcctatgataacagtgccttctaaaatacctctctccctgaggctcttttacagtcgactcatttttttttaataagtaaaaggagtaaactctaaaatgatgatcaaaagtatagtaaacacataaacaagtaacatagtttattatcacgtattatgtattgtacataattatgtgtgctgtactttatacgactggcattacagtagatttgtttayactagcatcactacaaacatgagtaatatgttgcactacgacattgcagttactgatggcactaggtgataggaattttttagctccgttataatcttatggagccactrtatatgttgtccttaattcacagaaatgtcattgtgcacgcattactgtatttgcatatgataaatattggagcaaataagtggtcttatcaactgaattttcaactcactgcagtctagaagagttggggttgaatgttttgaagtggtatgaaaaatagtacttgtgtgaatgagttgtaaatgtctttttcaatatatcagttaatcatatgtttatcaaatacttatgtttattctgtaactgccattatctgacctcatctgtttaaatatttgacctcattgaagttttcctgtcctagactccttaaagtcagatgtacggtcttttgcagttaagaaatcaatatagctttcccttttccagtattttttctttaagataacttactttccctataagggaacaccataaaactataagttgttttaattacatgaaagagaagaaaatctaaataatttgtgtcaggaagccatggaagttctcatttgggatttcagtgtttctaagtaaacttctccttctttgtcacagtatatgttctgtttatttaaacaggggcctcaaatctgaccctatcggaaactcaaaatggagatgtatctgaagaaacaatgggaagtagaaaggttaaaaaatcaaaacaaaagcccatgaatgtgggcttatcagaaactcaaaatggaggcatgtctcaagaagcagtgggaaatataaaagttacaaagtctccccagaaatccactgtattaascaatggagaagcagcaatgcagtcttccaattcagaatcaaaaaagaaaaagaagaaaaagagaaaaatggtgaatgatgctgagcctggtaggtatttattatctttgaacttcagccatttagtttttcacagacggttattgttcctctttctattactattgtgtgcacatgacatgagaattccctgtactcaccagtatgttagagattagcctggtagctaatggaaacattttattggcagaagyggggagtccatttcaacttttctcaaaatattgaggaatatatttttaatttcactaaccttgaagaaaacctctctcagaaaagactctccttagaattctagaaattttctcttctttttaagttaccttttttcctgcttgattcttcccattttccttccataaattcctccctttgaaaggaatattagttacaaagtatataaagtaggaaacttctgaataaatggaacattaatttccaagtgctaagaatggcaggaggaaaaggaaggaatgttttttgaagatgatggaatttcagtaagctcggatgaaagaatggacattataattgagatttgtataagcagagatatcaaggtaggataagataggggtcagcaaactatccctccttctacctgtttttgtaaataaagttttactgggtcatagcaatgcctatttggttgtgtttatggcaacagagatcatatgacctgcaaagcctaaactatttactatctggccctttkcggaaagtttgccagcccctgagttggaacatcctattcatgtattttacctgaaataagggttttatttagaaagggactttgaacttttccaaacatgcattactgtcttcatgatgcctacacacagaagtcattgtaatcctgttctaaaattattgccttcacaattcttgttttgagtatgccccaggaagtrgtattatttctgctcccaagcattgaatcacaatgctgggcrttttaaccttatgggttttttgtttgtttgtttgtttgtttgttttattatgagatggggtctcactgtgttgtccaagctggtcttgaactcctgggctcaagtgatcctcccacctcggcttcccaaagtgctgggattacaggcagaagccaccacacccarccaccttatgggtacattttaggaactattccagggaaaacaaaataagccatggagaccagctgaagatatctgtggcttttgaacatgtaggtcctacaaagttgactctttcctggaagggtggccgtcaggtacagggaggagaccagtactgagctacagagagtcctgggttgtggtctaagttcttttcaaacatcactaattgccatatagttttatataaacacagcatgtggttaatccatttgacccagagtcgaacattgaaaagagaagtgagaggtaggactgaaaaggtagttggggccacatgaaagttgtgaatgtagaaatgagggtgggaagaagccctgcctttcctcccaccctcatccctgatagccaaggcacagtccagtgtatgtcagccaggcaagtgggttgttgcccttcctttacagtctatctctagtaacatgaagagcctttgatagtgattggcgtgggaagaaaaatgactacttataatgagtttttaaggattatgttaatcaggtatgcttcctttcccctcagtggagtatgtgaaacttataattggtatgtttatactgtttagttgaacaaaagcctaaaaggttttgtcaccaagtctgtctgtaccctgggtttttaaatacaaccactcatttttcaccaaacagaattcttaacaaattaatacagcatatacttagcttttgaaaatatacgtctttatatcagagatcttctgtttgttgatctcatttggawttctattttaaggaaaaattttttcggattttgtcttttaaaaccaaagatacgaaaaaagcaaaaactgaaaacaaagggaaatctgaagaagaaagtgccgagactactaaagaaacagaaaataatgtggagaagccagataatgatgaagatgagagtgaggtgcccagtctgcccctgggactgacaggtaacrtccaggaagttttctagaggtaacttctttaaaatgtgcctctcttagaggattataggtttgaaggttcagttgtgactttcagtttacctgaaaaaagtaactatcaacaagaaactttttttatatctttctgctgctttttctctttatcttctattttgtggtgttttagttctttttgttccctgtttttttccttttgttcattcctgacaccaaatattttatatgcacactagcagcttctaggattccttggtttgtccttttctgagtctcattctatgttgtaataggaaaatgattggccctgtacgaggttaacctcctttggcctttgttcctttataaagttgagtttaggctagaattcactgctcctaaccagatatgtctaggagttacttgagttgtttatttggtttgggttggttggtttgttaaaatgttgaggcccaaccctagacctgcttaatccaaattgcaaacgttttggtagtagctctcgagcagggaaattcgccccccgagtaagaagagtaactcttcctggtttgcccagaactttaacagttttagcactgaaagttctgaatcccaagaayctcctctgtccctagcctactgagaagattggtcatcctaagcctaggagacatttttggttctcagagctaggagcagtctgctgggatctggtgagtagaggtcagaaacactgcataatatcttataakgcacaggatagtgtttcacagcaaagaattattcagcccagatgtcagcaatgccaaggtcaagagtgattggtttacaccctgggcatgtggagtatggggaacccccaggtgattttgatgccttctgctgaaccaccactgtattacttgatacgtaggctcagcctaacattctgtggctgtatctgactcttctgtgtcttgttggagtgagrttaacaggttttttttttattattgacttcacactcagtttttattaatgctcaatgttttcacttttatatcagatttcttaaacatttcatttatctctggactctcattattttccttgttttggtatttttattttatataaattccttggttatacctcctctctaccccttgttttgttatagtatggtctctggactataactcacacagccgttaacagtggagaaacttgaaagatatagggtctttttcttgatattatcacatatgaataattaaggtttagccttttcttactgcgggaagcttttctaagcaaaatagatttaggcaactgtagcaatacttttttaaaaaaaagataaatttgctaatgataaattgtcttctgtttaggagcttttgaggatacttcgtttgcttctctatgtaatcttgtcaatgaaaacactctgaaggcaataaaagaaatgggttttacaaacatgactgaaattcagcataaaagtatcagaccacttctggaaggcaggtatgattaacattgaagcttagatattggcatctatttttagaactagtagatgataaagaacataccagtatattctgttgattttgtactatatgttgggtcatgtatccagcatacattaaaggctttaagttaattactgatgtttgaaggaaagtgttcgaaaggtgttctgcttctgttgtagcacagttctgacttatgatttcagtatataacccaggtgatcaatttcagcactgtagacgtttcttgttcatgttctagccgtagtgcctaaggtgtgtgtatgtagtacgtcgtaaatgagtaggctaaatgtctttctcctttccctttttaatatttagggatcttctagcagctgcaaaaacaggcagtggtaaaaccctggcttttctcatccctgcagttgaactcattgttaagttaaggttcatgcccaggaatggtaagcgttsatctgcttgtttctgccattatttcactagaggtttattgtagctgttacggactcagtggtgacagccacatttagacttctaccatatatcatttttaggaacaggagtccttattctctcacctactagagaactagccatgcaaacctttggtgttcttaaggagctgatgactcaccacgtgcatacctatggcttgataatgggtggcagtaacagatctgctgaagcacagaaacttggtaatgggatcaacatcattgtggccacaccaggccgtctgctggaccatatgcaggtaagagatgtagtgcttgtctcattgtcttgtatgaaacataaactgacaactaatggttgttctttgtcctttgttttgttagaataccccaggatttatgtataaaaacctgcagtgtctggttattgatgaagctgatcgtatcttggatgtggggtttgaagaggaattaaagcaaattattaaacttttgccaagtaagtaggtagcatctgcatttggtttgcaaagtatctgttggaggtagataagagttgttcctatagaaaaactgtactaatgccagaactttaccatagccaagtgaggtagttgtgccaattaacccgaaaggtaatttggaatacaagcatcaaatgtattataacttgatataatagttttgctgttttagaagttataaggcacgttaagcagtcttcacataggtcctgtcctccacctcttgcccattcttacctcatctaacatcccccaagaagccgcagattttttgccttacttgtacataccttggttatagtacttgcaacattatgaactggttataactaagaccatggtttcsttcattatataatttatttttaaaagctttgtcaaagtataattatatctacccatttataatgtacaatttgatgttctttgatttgtttaccactgtgacatcatcgctgcaatcaagaaaatgaacatgtccatcacagtcaaaggtttcctcctgccccttttcaatttctccctcccacccctccttacacgtataccttgtccccaggtgagtattgatctgttttctgctgctagattaggttgcattttctggaaataaagttgctgtgaacagtcatctacaactctttgtagaggcatatatctccttttctcttaagtaaacctaggagtgtcctagttggtatatgtttagtgtatgtttaactttttaaaaaactgccagatgttttccaaagcggctgtaccatttaacattcctatgagcagtgtatgaaagttccagttcctcctattaagtcttgaccatcaggtaatgttagccccaagtttgttctcttttaaagttgtggtattcttgtcctttgcttttctatataaattttagaattggtttgtcagtttctcccccttccctccaaaaaagtctcagatcttgactgagattttattgaatagagattattggaggaagacagtattgagtcatgtaacccataataaggtatatctccatgtattcgatattttctctatcatatttaggggggttcgggatacaggtttattcacatcttttgtcagatttatctctgagtgtttcattaaaatttcaagttccaattgctcgttgctttaatatatacatatatacacacacacatatacacacatatatatgcacacacagttgaattttatattgatcttgtatctagcaagacagttaatcctgtaccgaatgattattcagtatgactttccagatgactgtagccttttggattttctatataggcaatcatgtgcagataaagacagtttcacctctttatttaatttttttttcctgcctgattgccctggccagaacctccagtatggtgctgaatagaagtggtgagagcagacatccttrtcttggttctgatcttaggggaaagcattcagtcttttaccattaactacatatgaagttagctgcaggttttatatagatgccttttatcagattgaggaagatcccttctgttcctagtttgctgaggatttttaatcagaaatagatggtcaaatgttttttttctgtctgctgaaataatcatgttttttctttagttaacatagtgaattgtattggttgatttttcaaatgttgaaccaacctgcatttctagaataaacctgatccatttctagaataaacatgagccattatcctttttatatattgctgaattcactttactaaaattctatttcaaattttgtatatgtgctcacgaattgtattggtccatagttttcttgtcatgtcatgtcaggtttttgtatagtgtaatgactgacttcgaagaatgagttgacatgtaagccctctttttaatttattggagagtttgtgaataattgatgtttttttcttaaatgttcagtagaattcaccaatggaatccatttgggcctggaattttctttacatgaaggttataactaaaatttctttagtagatataaggctatttaaagttttcctattttcttcagttgtttgtcttcaaaggagtttgtccatttcatctaagtcctcaaatttatagacctagtgtttcatgatataccctttttaccttttgtaatatttgtagattctgtagaaacatcatatctcccatttctgatatctctacctagaatatttgtagttgtgaggcaattgtaaagattccctaaaagattggggttatttttatatgtatctgtttcagcacgtagacagactatgctcttttctgccacccaaactcgaaaagttgaagacctggcaaggatttctctgaaaaaggagccattgtatgttggcgttgatgatgataaagcgaatgcaacagtggatggtcttgaacaggtactttttatcaataactgaaaactgtagggatcttacttggtgtttttatgtaattgttggaaggatcattcagaaagcaaatgggttaatgaacttttaaaatgctgtaggtgaggcatgacagtttacacactgtgtttatcagtgctcttgatgaaattacacaagttaggaaatggaaaatgtccacttggttcatttgtatctgtctgcttaaaygctttctagggatatgttgtttgtccttctgaaaagagattccttctgctctttacattccttaagaagaaccgaaagaagaagcttatggtcttcttttcatcytgtatgtctgtgaaataccactatgagttgctgaactacattgatttgcccgtcttggccattcatgtaagtgatgatgatgagctcattgaaaacagggtatgcttattaaatcctatagattgtaggattggaggtattgccctctcctggaaacattgttctgagtagtttgatcaccactagatgatggatcctgtgtgggggagcgctgctgggtgtggaggggtatgaggactttcgaagagtgcaagacaccatcctccttgaggggcttgcggaacagttggggaaataggacataggccaagggatgagctcgaaataaagtagggtaacagttccacaatttgggggttctactgctagtcttcctcaagattccagctctaatggatgtttttatttaattctagggaaagcaaaagcaaaataagcgtacaaccacattcttccagttctgcaatgcagattcgggaacactattgtgtacrgatgtggcagcgagaggactagacattcctgaagtcgactggattgttcagtatgaccctccggatgaccctaaggtaactggcatctttggaatatcttcagaatgactctgcattaaaagttmacttattctcccagttccctgacrgaaactgcattccacattcaaggtaaagatccctactatacagtgactgcagtatttctctggtattgaaaagtacttaaggcttttcagggctcaaacgggctgtgccagaggattgaaaaggatcagtgggacttaagttatgaaaatgagatccttggaatgatctcttaagaacagcagatgcctgaaggaaataaaattgcttaaggaagtagataaacttctgtagtatatgtggtagaataagcttcattgagaagtattttcaacaaacactggattaaagccgttttgatgatgaagcacacataatactcattttattagatcgctgttaatgcaaacatcatgtccagccttttttttttttttttttttttttttttgggcctcaatcattggcctattgggggtgatgtgcacagagcgattgctggcccagctttgtgggggtgtggtgaaggtgtgtgtggcccagcaccgtgggactacaccatctcagtacagacatgcacatactcaggatgcagatacgcaaatgggctcatgtggaagtcactgcgttaactcagattttctttctccaccaaaggaatatattcatcgtgtgggtagaacagccagaggcctaaatgggagagggcatgccttgctcattttgcgcccagaagaattgggttttcttcgytacttgaaacaatccaaggtaaagatctgtacttggagaaagatttctcttggtgtagggattgttagcaagcaacatttctacatgtgtcagaggagtctcragtctggccagtgctgttacaaccattcttatggcaattaagcaagtaaggttttatgtacttctagcccaagaagtgagcacagaaggaactgcccacatggctcggctttctagctctgttacccagcaacacctctgtgtcccagcctctcctttcctgttccctccagccctctttgaaaccttctccactcctttgaagctccctcacacctagtcatctctgcttctgctccccttctttcctcttacctcatgtgaagcagtggggaatccttgttcgctctagcctctgcctcctcccctgccctctrtctcctattcatcaactcttggcctacagtctcttccttgcggttggcgctttaccatctcaaatttctcactgtaaaaaagtaacttcaacsttaaacctgttcttctacccctgcctgcaggagctactgtctgttgcctttcctcagtcagccttactggaaaaatggcttatattcttgccatttacctccctctcagtccctaaccagcctaatttggctttagctttctactatcacaccagaattgaatccatcaggaccctaagtggcctcttcattgctaggccatgtgggggatgcatatcaggccttctcctgcctgacatttacatcctcattggcctttctggcatagtcttgatgataggcttcctctaccctgtaactgcaggcagttccctgaaattgctctacagcttttgcacactttgtccagaatgcttggtttcagctcgcctctgtctttgctgggaagccatcgctgatctcctgcctccttgttcccacagcacaggtgctcatcaggttgacatttctttctttctttctttttttattattattacactttaagttctagggtacatgtgcaccatgtgcaggtttgttacatatgtattcatgtgccatgttggtgtgctgcacccataaactcgtcatatacgttaggtatatatcctaatgctatcccttccccctccccccaccccacgacaggccccggtgtgtgatattcaccaccctgtgtccaagtgttctcattgttcatttcccacctgtgagtgagaacatgcggtgtttggttttctgtccttgcaatagtttgctcagaatgatggtttcccgtgtcatccatgtccctacaaaggacatgaactcatccttttttatggctgcatagtattccatggtgtgtatgtgccacattttcttaatccagtctgtcattgatgggcatttgggttggttccaagtctttgttattgtgaataaacatacatgtgcatgtgtctttatagcagcatgatttataatcctttgggtatatacccagtaatgggatggccgggtcaaatggtatttctaggtctagatccttgaggaatcgtcacactgtcttccacaatggatgaactagtttacagtcccaccaacagtgtaaaagtgttcctgtttctccacatctcctccagcacctgttgtttcctgactttttaatgatcgccattttaactggtgtgagatggtatctcactgtgatttttatttggatttctctgatggccagtgatgatgagcatattttcatgtctgttggctgcctaaatgtcttcttttgagaagtgtgtgttcatatctttcgcccactttttgattgggttgtttgattttttcttgtaaatttgtttaagttcttagtagattctggatattagtcctagccaaaattgacaaatgggatctaattaaagagcttctgcacagcaaaagaaactaccatcagagtgaacaggcaacctacagaatgggagaaaatttttgcaatctacctatctgacaaagggctaatatccagaatctacaggttgacatttcattacttatctttctccccctcaagacggcaagctctctgagggcagagtccatgagttaggyacctattttctctctagcacctggcacaggcctgttgcttttctagttatctaatgagtgataactgatggcagatccatcctgtaggagtttgtggtcatcatggcctccagtgtcacaagcctcaatacaggactgtgggggtattagggcccctcttctgacatggagaaaaggggctgatggcccttctgactagaagcttcaagctgattcatggttgcaaatagtcaggattatagagattcttacagaaaagtgctttactgactgtgtccctatccagttccttgcctttcagaaagaaagaagtgcagattgcctaactcagcagarcaaagatgtaactttcccatcaacattgggagactagaaaaagcagattttcctttctgtcctgagggaatttcataggccggttcatccttccctgtcttcagtacccagtatcggaatgctgatcatcctggtttactaatcttaatacttttgatttctaggttccattaagtgaatttgacttttcctggtctaaaatttctgacattcagtctcaggtatgtgctttttaaacgtttgtgagtaaacaggaaccttgtcccagcactctgtttgtagtgattcactgggcaatcactgtcctttgaagtctaccctgtcctaaagtgaggatcaggctgtgtagtgtataaggtttcttgctattctagttatcaccactctgtgccctctttaaatgttttccatggagtggctttgctctaggatatttaaaatctggtgttttggaggtttttgtttgtttttgtttattaaaaccagtgtttctttctatttcagcttgagaaaytgattgaaaagaattactttcttcataagtcagcccaggaagcatataagtcatacatacgagcctatgattcccattctctgaaacagatctttaatgttaataacctaaatttgcctcaggttgctctgtcatttggtttcaaggtgcctcccttygttgatctgagtatccttttctttaatgaagttatcctgtgactaaggaacaaaagcttgacagaggggcatttggggctttgcagtggattggtatgtgttctggctcagactggaggctccagtgttcaccctggtcgatgtctgcttttctgtgctagcacaggacatagaggttggatggggtaagcagggcttaatcattaggatggggttacagggacaaggcagcttatgccttgagccttcaaaagacaaagaaatttgactgtcaaggagagacagagacagttgtgtgttccaggcagaaacacaggttaaaaaaatcaaaacttcagtgtttgctgaggctgcactgtgcagggtacttaggtgaatggggtgttttgaagctaaagagaggatgggacctttcaaggagttttaatcatcttagaacccctgaaggattttatgcaagaaagtggcaagttcagcaaaagaaaataaaacttaggtgttgcttaagataaaaggcaggagtacttccagttgcttcagttgtgatttataatttgtgcctttcagaagaagaaactgagcagctgaaatgaggcctgtgcttcagtgccataggggtaacttctgagggaactagaggaccaaattttgggtcaccatccccattgtcakcattgagtaaatgtcagctgaaatgaatgtatgtcgagtcctgtggaaggaagagcagctccttcacttaggcattcctaaatcaattccgaagagaaatgatagtcatttgttttgacacaggaggtgtttttttaatgtgctcctaccaacttcctgattaaactcataaatccttattcactgtcatgaatttcatcgtgtggaagaaataattaatatgactattacacaccgaagtttaaaatcatacctgctaatttaagtccacagtcacgtggccactcctaattttctggaaatttattgcataggcttatgttcccacattttcattgttgagaatggggttgtggaggaacagtagtgttcatgccggtttttttctctgtgtagatgttagattggagttcattatcttttttgcttgatttccttaatgtttgcctccagacgtcaacagtaatgaaggcaagcagaaaaagcgaggaggtggtggtggatttggctaccagaaaaccargaaagttgagaaatccaaaatctttaaacacattagcaagaaatcatctgacagcaggcagttctctcactgaacacatgccttcctttcatcttgaataactttgtcctaaaatgaattttttttccccttgatttaacaggatttttgtagactttagaatttggacttacctaacaagagtataaattgacttgggttgcaagcactgagcactgttacttctatcacgtctctcttttatttctgggatataaaacaggctttaagtttcttggttgcccaagggcagagcaaggaatatctggtgtttcttgtgatgataatattttaattttaaatatccctccctcatacaagtgtatgttaccattttaatataattctttttgtayctttccttcttgttttgygaagatttttgtggcatggattgctgtgctcactgctgtaaaaggtgacctagtgtactgggcagctggtggyggtgcagaaaagagtctcaggttattttttgtttttagttatttcttggaccttgacagtatctaatgactcctcctgaaaatgctgcagtataaaagagcaaagagctttgggaaatacctaagaagcaccttaagattagggtggcattgcttttatagattcttgattttaaagcaacagkcctttctcaggtgttgcattttttggagcaaaaactatgggttgtaatttgaataaagtgtcactaagcagttataacgtttgatggctggggggtaggaagaggatggaattgagatgtttgagcctcatktacatcaatagaggtgtaatgtactgcatttcttcatttggtaacataacaaagactttcatacaaagaacgatgatgctcctcattaagatttgtttaattcaaggtggtttggatttggtaagcctttgcactctgtagagtacttagaagacaagggcaacttacttggagttagagccaagctgtcagacggtgcccagcacacattaatgttagcttctttctgagaaaaaaatacctcttccaggccctgaaacaaaaaatacatttgctgtgaagattgaaaatgaacaaagttagaaaaaaaaacagcaaaatcagtgatttagtcagatgagtttttcgttgtaggagcacttgatttctagtgtgttttgtacagtatataactacaagatagtacattttgtagcagttcaaagccaaagttgctagcatcattttgctgttgtgccagttaatcataggatcccattaaataagtgtgctaacatcgaatatagagaaaactggtaaagaacattccagtaggaaaagaaaagaacaatcttccatttctgggcttggccaccaycaccctggtcggacctgtcctggacttccaaccttgactgctgagctcctggcttagcttcttgggttcctaattcctggtgtttaataattctctccacgatcatgtttttctgattttttttttcagaaataatgttttttaaaagacaaaaacaaagggaagaatatttaattactgagcagaagtaaatactgttggyattttgtacataatctaatttttatatgcatgtthatgctttttaatttttttatcaaaaattaagtcatctacctactacttgtaacyagcttgtttcatarcatgttattttcctgtgtcattaaataattacttcaatgttgtwtttcgtttatggatgctttgttgacccttgtttggtctgccaggatttaggttcaagatacctacctgaatgtgccaaactggctgtccctatctcagtatgtcttgtgctcagtagtcttgagattgtttacctctagtatgagtcagtctctagaggttttgtgagaaaagcatataaacaaagtggacagggttggccctgctgtatgagaacttacttcaggtccattagcagcctcatctatgatctccattacctgtagtcacaataagatactttgagaggccacatttacatgactttttttacagtatattataattgttttatgttaatctcagtgtgctaatttataaactaaactttgtcacaggtaatgtataggaaagaacagagagagggttcagtgttgtccacagtttcagacatccactggggatccaggaatgtatccctggaggataagggggaactaccgtattcgctgggtgctgtttgtgattgtagtggcaggatggtccaggctagggacaagagacaaccagacttgaccagcctggccagattcagatatgaaggagccagttactggtatcacgtacagtgagtgaaagcagcaccatctgcaaggctcgtgcacagtaagagcttcatttggtggcaaatgtgagcgtttgacaggtggaattaggtggctgcagccatgaaggttcgaaggcagaatgtgaggtgggggagccaagcacatcactacatgcaggtaagtctttgggtcctgtgggctgcaagtgatgacactgctatgtctaaatttatttagtctcagccagctttgtataaataaaacaagatacccaaaacaggatccctaagttatacagggcttaaaagtgagagctctgtaactagaatgcctggattcaaattccagctgtgccacttgctaacctcagggcctgattcatgagtgaagcaaaagtaatacctccttcagaaggcagtgctcaggacagtgccctggtgctgagtgctytgtccatggtaccggcctccgtgcatcctacgtgaaaaacttgctgccatacagcagcaggtacagaggctcatcccaaaccgtgagccagtctgggctttggcatacaggatttctaacagtctggatctcttggaattctggagagcagacttgggctttggaaagcggtccagtcctgcagcaccttcctaaggtagctgtcaagtatattaatgctgttttcaaggttactgtactgagtatggggtggcaacaacaacagtgtgcgtttggataacctaattcatcataaattaaaagcctgttagatgtcataaactgcagaggacacagaagaatacgcccagatccttcttgggatggatacagattagagaaggtaggcataaacagttgcaatattgttttctaaatgatgtgatagatgcaggcaaatattccagctatttttattaagcctagaaatcctgcatcctcgggtcctagtggactatgattttcttgccccatctctaggagattctgattcagtaggcctttgccagggcagaggtatgtaggtgatgctcacgctcagctaggtttgggagcaaccagactagaacccattcacatacagactcttagtaaatgttttctgctctcatcttgcaaagtgaaagtgcccagcacaggcaatggtgttagtacgttgtagtcattcacaaactagggctgcccagaagagagacaggctgggactttcgagagagaaacagctgtttcatttgaatgcctggtgtgggaagaagaaggacagcctagcttcatggaaccttcttgcaccaaacaaagcctccagatccctccacagtgctccattcaatccctgtccattggtggtggaccaaagaagaaaccaatttgccttggccacatgtctttgagaaaaaaagccactctcccttctgggactcagagcatctgtacctgtaatataagaggggaatgtggaaaattctaactggatgatcacttttctgtggagggaaaaacacattttttgttttaaggggctagccagcatcaaacctttttttgagatggagtctcgctctgtcacccaggctagagtgcaatggcactatctccgctcactgcaacctccgcctcctgggttcaagcgattctcctgcctcagcctccttaatagctgggattacaggcatgtgccaccacgcccagctaatttttgttgttgttgttttgttttgagacgaagtctcgctctgtcgcccaggctggagtgcagtggcgcaatctcggctcgctgcaagctcggcctcccgggttcacgccagtctcctgcctcagcctcccgagtagctgggactacaggcgcctgccaccacgcccggctaatgtttttttgtatttttagtagagacggggtttcaccatgttaggatggtctcaatctcctgacctcgtgatctgcccgcctcggcctcccaaagtgctgggattacaggcgtgagccacctcacccagtccgcatccaaccttttatttggagacaatacctttcaagtactggtgggttactgagatcacctcccatcagacaagcaaaaacgcctcccatgcagccagggtggggctgtgacctgggtttggctaatcacatacatttgcccagagtgaatcagatactaactaataaaacaggagcagaaacagtagatgtagcagctttctcatccagggtccagaggcagctgtgttgggaacaggcagctccagctgtggcaccccgcagcagccgtgctcacaccaggttgagagtgactgagtgtgtgccatgactttgtccagggtcctgccctttagctacctgcccttgttcctgcctattttgcaagcctagttctgcagccatttcatatcctttcaattaattctgtttcagtttaaattactgagtggctttttgttgctcataattagcccaaggatacaataaccgctaaggtctggtttctctctccctctttttgtcaaaatgtccaggttgcttgccaccattcttgtcctccctgcctggagcctcctgcccctcggcacagggaaaattggacattttgagcaaggccaggactttgaaacatctagggcaaggatgcgtcgaaaaaagaacaagtggcaaactcaccacctcgggacaggtcatggggaagctgctctggaggtttgggaggcaggcaaaagcaggatgcttggcatcgctgagagcctctagaggagtgtccacagctgggaaagggggaaccaagggttgtcagacctcccaaggcagcactttctggagtcaggcagaatgtacaggagccttggagcaagtgaattccctgctctgtgcctcagtttcctcatccgtagaatggaaggaatgaaaacacaaggattaggtgtacagtcaggccaagtcagatcttagaaacaagacctaacgacactattatcaggaacatcaggaaaaggggaagaaggtcagaaacaagagttttctaggacttaccggtttctcacaccctctccccaccatcaaaatcatggtttcagaggcattaggccaaaaaactgcaaaagggagcctccttctgggaagtctccggcccttccgcggctcccggcgtctccagcagagggctctcggctgtgccgactcaggacagctgctgcgacggggccggctacgcttgtcagagcagcagctggtgattttggacttgcctttgctggcaggggagcgctatcgagggttcattttatccagcttgaggaaagaaaggtcggagtgtaggggaagagtgggacaaacacgcgacccagtcatgccgagagcatgcgctgagggggacgtggagcgaggagtggggctccaggctgctgaggctccggaccaagtgccccctgcactttcaacgccgtaggtctcccggcagccctggaaggacagtcttacccggacgccacggtggtctcccggcagccctgggaaggacagtcttacccggacgccacggtggtctcccggcagccctgggaaggacagtcttacccggacgccacggtggtctcccggcagccctgggaaggacagtcttacccggacgccacggtgagggaggagaagcgcagagtcagccgcagacgggagggcgatggcctaacccggacgccagcgcggtttgctcagccctagggccgggcgctttcccgctccctgaccgcctcctgttcctccgcaggccgagctgcccttccctccctgctgcccccagggaaggctgctggtgtcctcagatgcgggcaggaggaacccgccagcgcctgagagcctggcccgaaccaggcctggaggtgctggggcgaagacacagaggatgtggcctccatccctggtaacagayggttaccagggcggctttgggtgaggacattgaaaaaggtcagactccctgggagcagcgccctggactccattctgatcacaggtatatttgtgtggctactaagagtaagagcctgggggtgcaggagtgattccagccccctcctacaaagtcatgtgagagggatctgaagaaaatccaggggaaaatgtaccacagcgaggaaatcgccatctaaagggctgaacgctcaagaacggcgttgggtgggctccgcgttggagttgagtcccgaaggatgttctaacagcaaaggggagaaaggaagagagaagccaaggcgtgcgggcaacgtgaaccgcatgagccgaggcaaaggggcagcgtggggctggaccctggagtctgctcctgtctgaattctagtgctgtcactgactagcaaggaacttccctgtgcctcgtggctgtcacatggaaagacagcaccgccatccagcccttataccgtaagggttatatgaactagcactgtgggcattagcagagcatgctgtacactttggtatattgtgagaatgaaataaatcaacaaatgcaaagcaggttttgcataacaaagactaaacaagtgttagttagctcctttcctccttcccgcctgtgaaaatgctgtcttatgatgtcctttaattatttcgtgtggttaagcttcagcttattggccagttcatccttgtagatacaagtatttttaaagcctccaattttaatttcctcacagaccattgctgtacttgtccttacatctacttcatactgaaattttctttctgtttctttatgtctctgcatctagaccagtggttcccaattgaagtcagttttgctcctcagggcacacttaacaacatctggagacatttttaattgtcctgaccgagaggacaatgctactggcatctagtggacagaggccagggatactgctgaacatcccgcagtgcacaggacgcctgcaacacagattatccagccccaaacgtcaatagtgccggagttatggaaccctaatgaagacaattcttgaaggcatagactgaatcttatttatctttgtttccctcatgtctcacaagcagagtatgagttcagcaaataggagttgaacagaaatcaggaggaggtgctgattgacaggaaaaaagaaagatttagtttagagctgagaattcagctggacagccataggggctctggcatggagactggaagtcagaagagaatttgcagcaagacatttagagccatttatccagccatcataattttattgagtaactattttgtgtgaggcactgtactggatgctttggcaacagagataagcaaggcaacccctgtgaataaggcactcctggtctacacacagtgggagaaacatagaaattcatctcttctgagcggagcctgtgggaacccagaggatggacacccagcgtggtctgaggaatcatgggccaaaacaggag

SEQ ID NO: 94540 - DNA, 33919 bp, Homo sapiens
  misc_feature (1)...(33919): n = A,T,C or G
aataattttatatacagcaaaactagccttcaaaagtgaaggtgaggccgggtgcggtggctcacacctgtactcccagcactgtgggagtctgaagcaggattgcttgcgcccaggaggaccagaccagcctctacagaaaaattttaaaaattagccagacatggtggcacccacctgcggtcctagctacttgggaggctgaagtgggagaactgcttgagcccaggaggttgggggtacagtaagctatgttcaaaccacagcactccagactgggtgacagaccaagaccctgtcccaagaaaaaggtgaaataaagacattctgagatttttaaaaagggagaataagagaattattgctagcagacctctcctaaaagaggtactaaaggggccgggtgtggtggctcactcctgtaatctcagcactttctgaggccaaggcaggcagatcacctgaggtcggaagttcgagaccagcctgaccaacatggagaaaccccatctctactaaaaatacaaaattagccaggcatgatggcacatgcctgtaatcccagctacttgggaggctgtggcagaagaatcgcttgaacctgggaggcagaggttgtggtgagccgagattgagccactgcactccagcatggttgacaagagcaaaattctgtctccaaaaaaaaaaaaaaaagaagtactaaaggaagtccttcagcctaaaagaaaaggacactagaacaatatcttgaattcaccagaaggcatggagcactagaatgatgaaggcagctaaatgtaaaacactatatatttctctttttttttttttttttttgagacagtgtcttggtctgttgctcagactggagtgcagtggcacaatcccggctcactgaagcctccgcctcccgggttcaagcaattctccttcctcagcctcctgagtagctgggactacaggtgcacgccaccacacccagctaattttttgtatttttagtagagtcggggtttcaccaagttagccgggatggtctcgatctcctgacctcgtgatctgcccacctcggcctccctatatttctcttttatactttatatttttctctcttttttaattttttaaaaaacaaggttgtttaaaccagttataacacattgctgggtttataacatataaagatatatatataacacaaaggaagagcaagggaagggtagtaaagttactgtattttaccagaattttcagtattgagctgaaatatactgtaataagttaaagctacatactgcaatccctagacaaccacacagaaagtaactcaaacatataactaaaaggaaaaaacccttcaactttgggatcaggataatacatacatacacatacacaaatgtaacacagaaaaaggagttaaagaagccaggcgtggtggctcacgccagtaattccagcacttggggaggccgaggcaggcagatcacctgaggtcaggagctcaagaccagcctggccaacatggtgaaaccctgtctctactaaaaatgcaaaaattagccagtcatggtggcatgcctgtaatcccagctacttggcaggcttaaaacaggagaattgctttaacccgtgaggtggaggttgcagtgaactgagatggtgccactgcactccagcctgggcgacagagtgagactccatctcaaaaaagaattaaagagaaacaaagggacaacaaagatgagaaatatagaaaacaagtattaaaatgtcatccatatattcaaccatatcaacaattacattaaacatgaatggactaaatattccaaagggcacagactgtaaaactgtataaaaaagcaagattcaactatatgctatctacaagagatcctttagattcaaagacacaaataatagagtgaaagtgaaaagatataccatgcaatcaagaatcacaagagagcaggaatagctatatgaacaacagtcaacatggcctttttccccaagttcttcctgcatacatttaactcagcatagactttaatagtagtattaatattagaaacataaaggaacattttatgatgataatggctatatcaatacattatgaagatttagccattataaatatatacactgctaacattagtctcaaaaacagaattgaaaggaaaaatatacaattgaaaatccatgataggcccagtacagtggctcaacgcctgtaatccccgcactttgggaggccgaggcaggcagatcacttgaggtgaggagttcgagaccagcctagccaacataatgaaatgctgtctctactaaaaaaaaaaaaaaaaaaaaaaaaattagctggatgtggtggcacttgcctgtaatcccagctactcaggagccttaggcaggagaatcgcttaaacctgggaggtggagcctgtagtgagccgagatcatgccagtgtgatattgagtcttgcaaatccgttaacatgttacaatgtcttatttagatctgtaatttgcttcagcaatgttttgtggttttgagtgtataggctttggacttattttattaaattcaatatcttattccaaatattttattcttttgatgttattgtaaatgacacttttttttttttgagactgagtctcaccctattgcccaggctggagtgcagtggcacctcccaggttcaagcaattctcctgcctcagcctcctgagtagctgggatttttagtagagatggggttttgccagtttggccagactggtcttgaactcctaggctcaagtgatctgcctgccttggcctcctaaaatgctgggattacagccatgggccactgtgcccggccataatttttgaattttttttttttggtagagatgggtttccgccatgttgcccaggctgttctccaaccctgggctcaagtgatactcctgcctcggccttccaaagtgctgggactataagtgcaggtgtggaccaccgtgcttggccttttttttttttcttttttttttttgagacagggttttggctctgtcactcaggctggagtgcagtggtaccatcatgactcattgcagcctcaatgtcccagcctcaagcagtctttccacctaaccctctcgagtagctgggactacaggcatgcaccaccacacctggctagtcttatttttaatttttgtttttttaagtagagatgggggtctcactatgttgctcaggctggtctccaactcctgggctcaagtgattctcccacctcagcctcccaaaatgctgggattacaggcgtgaaccgccatgcccagcagaaaaattgtcattggaataaagtctggggttttgttaaaagttttatatcggccgggtgtggtggcccatgcctgtaatcctagcactttgagaagctgaggggggagattccctgagctcagggattcaagaccagcctggacaatgcagtgaaaccctgtctctactaaaatacaaaaaattagctgggcgtggtggcgtgcacctgtagtcctggctacttgggaggctgaggcaggacaatttcttgaacccaggaggcagaggttgcagtgagccgagatcacgccactgcactccagcctgggcgacagggcgagacctggagtgcaggcacaattatggctccctgcagccttgacctccccaggttcaggtgatcctcccacctcagtttttctatttttagtagagccctccacctcccgggttcaagcaattctcctgcctcagcctcctgagtagctgggattacaggcatgtgccaccacgacgggttaatttttgtatttttagtagacacagggttataccatgttgcccaggctggacttcaactcctgggctcaagtgatccacctgtcttggccccacaaagtgctaggattacaggtgtgagccaccacacctggccagcagtttcttaaaaagttacacttaccttaaaacccagcaatccactcctaagtatatgtctaaaagaaatgaaaacaacaggctgggtgtggtggctcacacctgtaatgccagcactttgggaggctaaggtggtagctctccagaccacccagggcaacatggtaaaaccccgtctccactaaaaatacaaaaaaattaaccgggtgtggtggggcacacctctagtcccagctacttgggaggctgaggcaggagaatcacttgagccccagaggcaaaggtttcagtaagccgagatcgtgccactgcactctagcttgggctacagagtgagactccatctcacacacacacacacaaaagaaatgaaaacaacaatttgtacatgagttcaaaacagaattatttatttcccaaactagaaacaatccaaatgtctatcaacagataaatggataagcaaatgatgacacaattgcattaatggaataccactcagcaatgaaaaggaacaaaccactcatacctacaacacagatgagcctcagaaacgtgatgctaagtgaaagaagccagaccaaaaaaattatatgctattattccatttctatgaaatttctggaaaaggcaaaaaccatgcaaagtagatcagaggttggctgggggtgagagcagagactgactacaaataggcccaagggaacgttttggggtgatggaagttttctataagtggattatggtgatggctacacaacagtataaattaaaggtcatccaaatgtgtacttacaatgtttgaattgtatgacatgtaaattatctcattaaatctgtattttaaaaaaagaactgtgctgtgaagtttgacatattttaaagtaggatgtcttagccgggcatggtgttgcatgcctgtagtcctagctactcaggaagttgaggctagaagattgctcgacctcaggagttcaaggctgcagtaagctatggtcatgccactgcactccagcctgggcaacagagcaaagacctggtctttataaaaattaaaaaccggccgggcacagtggctcacacctctaatcccagaactttgggaggctgaggtgggtggatcacttgaggttaggagttcgagaccagcctggccaacatggtgaaaccctgtctctactaaaaataaaaacattagctgggcatggtggcacacacctgtagtcccagctacttgggaggctgaggcaggagaatcgcttgaacctgggaggtggaggttgcagtgagcccagatcgcgccactgccctccagcctggagacacagccagactccatctcaacaatgacatcaaaaaaaggccgggcacggtggctcacgccggtaatctcagcactttgggaggccaaggcgggcggatcacgaggtcaggagtttgagaccagcctggccaagatggtgaaaccccatctctactaaaaatacaaaaattagctgggcgtggtggcgggcgcctgtaatcccagctacttgggaggctgaggcaggaaaattgcttgaacccgggaggcggaaggtgcagtgagctgagatcacaccactgcattccagcccgggcgacagtgcgagactccgtctcaaaaaaaacaaaaaaaatctaaaactcaaacttctgaataacaatttcctcctagcaagaagggactcagtaagataagaagcgctgcttggctactttgcaaatgtctggcttaagatggctggttttttgtatctgcctctgcatttaacctggtccatctcgcgggtcacatagcctctacaaaatgagaaggggttcaataccgttaactccgggcctgggtaaaagactcaagtcctgaccccatcatactccaaccaatacataccccgcctgcgctgtctgcgcctgggtctcttcaaccgcagtgagcggtcgcacggctccacatcagggtcgccctgaggctcagccttccccggccccattccgagtgcgcacaggactgaacgagcacgcccggtccctgctccggagcggaggacacgacgcggacccgcacggtgcaccgcagtgacctgaggaaggagcgacgggcgctcgcgccmaaggcgtccgagtgcctggtaaactgtaaagcgcggtcctgcgtgagttgctatggctacagctgcgccaggcggacggcctgcaggaccgaggtgcagctgggacgagcggaaagctctgcgcgtgggcggggagcccggagcctcgccggggcaatgtcatctaggtgctcggcgctccactgatccggccccsgggggtgggcgggcacgtttgcctcggatggtctaacaggcgtcggggagagccaatggtgtggcttcatggctccacccccttccattcgattggccggcgccgaaaagccgggcgtgagcggccgcagtttctggagggagccgctgcgggtctttccctcactcgtcctccgcgcgtcgccgctcttcggttctgctctgtccgccgccatggcccagtgagtgactcgccaggggcagcccggctcggcctcagcgggcggggaactctttgggggtcgagatctccctcgttctctccgacgcctcccaccctgggggtcgcctgagctcacttggggctctgtgaccctggccctacggcgtctcgggcccagagctccttccctgcgggcccggccccctgccctctcggccgcgcaggcatggggcggggcgggtcccttcgagggccagggaggaggcgcggccaggcctcgccgagtctgcagggacacctgcgggacgcrtgccagcgggagccgggcgcgagggcggggctgggggccgcctgcccggccgaggctctgcagcgtgcgcgcccggcttctgggggcccgcgggaggcgcggaggaaagtgcagactcccagtcacggccaaatgtggaaggaccggacccctgggttgcagcgcgtcgagcggtgctgactctttcctttgttctgtttctgcctctctagagctgacatcgcgctgatcggattggccgtcatgggccagaacttaattctgaacatgaatgaccacggctttgtggtaagcggcgtgggcgcnttgtcttctctctggttyccgggcgctttagccgaggccggcgataggtttgggagcttacgggtctcctggccgtgctttgctaatgtgctctgttgctgctcgtggcatttttgtatggaaaggagaagcaccctgtaggcgtgggcgggccgatccmgaacttagtcctgcggagygtgcctgtgggtccgtgaggttcacagcccgaatgaacgaattagtgtcttaagtagagaagaagggtgcgggaggagaacccttgctggctgtgtagagctctaacttgattgcctgatgagatctggggagagtgaaaatgtttcttctaaatgttaaagtggcttagacgccaggatgatcaataacaacagatagagcctgttgaaccggccagttcctggatttgattttgagtcctaacacgttgggtgtggattctacctgacacaccgggggtagttggccttcgcctcggttgtccgccgttttcatcctactgaggtgacataactttacagtgagcctcccacagctgggggaagaaaaggcaaaggcaggtctgacctccccagaacttgggttgaatggaaaggtcattgttactttggccacagtctgaaagtcttgtgtgtcctggatctcctactcaggacttttgtccttctaggtctgtgcttttaataggactgtctccaaagttgaygatttcttggccaatgaggcaaagggaaccaaagtggtgggtgcccagtccctgaaagagatggtctccaagctgaagaagccccggcggatcatcctcctggtgaaggctgggcaagctgtggatgatttcatcgagaaattggtgaggccagctgtgctctcagctgctaccacgatagcagctgtttttggtttcttcctttagttctccttcttttaactctagagatttttttttttcaatttctgctaagctctgaccaaatgattgcttaactgttgcagtgttggttaacttgataagcgcttatgaagtaactttgtcctttggtggtagtaattctgagaatactaacagacatttcaataaacattaaggcggggcacagtggctcaggcctgtaatcccagcactttttgggaggctggttcagatggatcgtttgagcccaggagttcgagaccagcctgggcaacatggcgaaaccctgtctctacataaaattaaaaaattagctgggtatggtggtgtaagcttatggtcccagctacaagcttatggtcccaggttcgagaccagcctggccaacatggtgaaaccccgtctctactaaaaatayaaaaattagctgggctttgtggctcatgcctgtaatcccagttactcgggaggctgaggaatgagaatcrcttgaacctgggaggtggaggttacagtgacctgagattgtgccactccagtttggcgacagagcgagactccgtctcaaaaaaaaaatgaaaataaaatcaagatctccttagggaatcctagggaactggatgcttatttttgtaccaaacaatttgttggctttascaggtatatcttttttggaagaaaaaagtaggggaaccagtggaaataatgtgtttagatacccaaaataattctatagtaacaactctgaaaaaacccaggcactcccatttagaagaaatgttttgctgtaagcagtgcagtgatagctcaggggaggctgagcattcctttctagaggagtcgtgtcaacagtggggttgtttccacagggagaaggatttgtaaccagtatgccactgtttttcaatcaaatgacctagaaaggaagaacactgagtttaaaaaaaggacatactaaattttttgtgtggcaagctgcctgtaatcagtttcagacagagaaaactgaaaaatggtggattattcttcagtataggaaaatactaagtaatgttaactggagccttgtagggggaagattgaataatataatgaagcccaggctgggcgcggtggctcacgcctgtaatcccagcactttgggaggcagaggtgggtggatcatgaggtcaggagatcgagaccatcctagctaacacggtgaaaccccatctctactaaaaatacaaaaaattagccaggcgtggtggtgggtgcctgtagtcccagctacttgggaggctgaggcaggagagtggcgtgaacccgggaggcagagcttgcagtgagccgagatcacaccactgcattgcagcctgggtgacagtgcgagactccgtctcaaataaataaatwaatwaattaattaattaataaagtaataataataataaagcccagcctggttggtgtgctgtaggtagatattcatgttcaaggctctgtctcttcctgacctccgaactgttgtcataaaatcattcattcatacactaaaccatttgatatgtatttactgaatccccactctcttctagacacattatagtcagtgtttaatctgtatacttacttaaaaatagaaatggggtcttgctatgctgtccatgctggtctcaaattcctgggctcaagcgatcctcctgcctcaacctcccaaagtgttgggattacaggtgtgagccactgagcctggtcagccctaaacttttaaatagtgtgcagctctggccacagagaggattattgaagattaagtaggctgggtgcgttggcctcctgccaagccaggaggcttttagcccaggagtttgagaccagcctgggcgacatggtgagactccatctcaaaaaaaattttttttttttgagacggggtctcactctgtcccccaggctggagtgcagtgttgcgatctcagctcactgcaagctccacctcccgggttcacgccattctcctgcctcagcctcccgagtagctgggactacaaggcgcctgccacaacgcccggctaatttttcgtatttttagtagagacgaggtttcaccatgttagccaggatggtcttgatctcctgaccttatgatccacccacctcggcctcccaaagtgctgggataacaggcgtgagccaccgcgccyggcctacaaaaaaaattttaaaactagctgggcattgtggttcaaggagttcaaagttgcagtgagtcatgttcacaccactgcaggagttcagggtttcagtgagccatgttcgcactcctgcattccaagctgggcaacagaacgagactctttttagactatgtttatttggaataaattcttgtttgttttaatttgccaaggtatgtttcatttttggtccatcttaatgctggtgtctggttacaggtaccattgttggatactggtgacatcatcattgacggaggaaattctgaatatagggacaccacagtaagtgttcttcagtccagattcttccaggttccgagaacattctagaaaaaagtgtcagcatcgcatatgtgacagtagggtgaactgccctgtggtactgatttttttgagattactactgatacaatagttctcagcctttttttctgttaagacacacttaacagaagggccgggtgtggtggctcacacctgtaatcccagcactttgggagacggaggcaggtggaccaagaggtcaagagatcaagaccatcctggctaacatggcgaaaacccgtctctactaaaaatacaaaaaattagcctggcatggtggcatgcgcctgtagtcccagctacttgggaggctgaggcaggagaattgtttgaacctgggaggcagaagttgcagtgagccgagatcatgccactgcactccagcctgggcgacagagtgaaactccatctgaaaaaaaaaaaaaaaaaaaagacacttggtgggtgagattctcagtcacacatacaactcaaaggatgactaactcagatacagcaggctgagaattacgttttaactcctccccttccccttccaagtaatccatgatatgtcagtctataactggtttagaaccactcctctaatggtatcaaatgctgagggaattcctgtgtgctctgaagtgctgaatggcattaagttgtattamacctactcttcgttgagtcttattcaaggtcttttccagtaaaatgccaatgtgtgtttggcttaattattttactttggggatgaggtaggtatcgtgaatgtccatagttgtattgttttgttttttaactcmtacacataggggattaactttcctgagtcatcagttattcytagatccttgggtcatttcctgtaaatgtaggctctccattcctatcttatacttcctctcatttataagggaaacatttttgggtagcataatgaaacatggaagcataatgaaacatggaagcataatgaaattatttttctgtccttcagagacggtgccgagacctcaaggccaagggaattttatttgtggggagcggagtcagtggtggagaggaaggggcccggtatggcccatcgctcatgccaggagggaacaaagaagcgtggtgagtgccatcagcactgtgcccatctctgtacaagggagctggactttgagaacgaataagccaggagcagttctgccaccctgatctctgtggtgccctgagtgtgacagctgggagatgctggcaatttcttttatctagacattttgttgctttgatatagtatatgtgcacaatcctcttttgccttttttcttctgttatttctatcaagactgatacctgacgttctaaataggctttttttttttttcccgcccaggcaggagtgcagtggtgagatcttagctcactgcaccccccgtctcctgggctcaagcaattcttgtgcgtcagcctcctgagtagctgggactacaggcacatgccaccatgcctggctaattttttgccttttagtagagacagggtttcaccatgttaccttgggtggtctcgaactcctgaccttaggcgatctgcccgccttggcctcccaaagtgcagggattacaggcatgaaccaccacacttggcctctaaataggctttaaggaagcagtttaggtaatgttctgtgcaatgtctggatgtaggaataaggtctgcctcttttagctgatatataacccaaaagtaacttaatgtgataatcgtgggtaacaggctgggcatagtggcccatgcctgtaatcactgcccagcactttgggaagctgcggtgaatgatcatttgagcccaggagttgaagactagcctggacaacatagcgagatcctgtttctacaaaaaagtaaaacaaacatttttttaattaaaaaatataaattggccgggcgtggtggctcacgcctgtaatcccagcacttcgggaggctgaggcaggcagatcaccaggtcaggagatctagacgatcctggccaacatggtaaattcctgtctctactaaaaatacaaaaattagccgggcatggtggcgtgcgcctgtagtcccagctacttgggaggctgagacaggagaattgcttgaacctaggaggcagaggttagtgagccgagatcgcgccactgcacttcaccctggcgacagagtgagagtttgtttcaaaaacaaaacaaaacaaaacaaacaaaaaatacacacacacacacacacacacacatatatataaataattgtgggcaatccgatatatatataaataattgtgggcaatccgcttgccctggcctcccaaagtactgggattacaggcgtgagccaccgtgcctggtctgaaatatgattctttaaggctgggcatggtggctcacgcctgtaatcccagcactttgggagactgagatgggaggatcacttgaggtcaggagttcaagaccagcctggccaacatggtgaaactctctactaataatacaaaaattagccgggcatggtggagggcacctctaatcccagctacatgggaggctgaggcacaagaatcacttgaacctgggaggcagaggttgcaatgagccgagatctcaccactgcactccatcatgggtgacagagcgagactcggtctcagtaaaaaagaaaaaatgattctttttttgagacggagtcttgctctgttgcccaggttggagtgcagagtgcagtggcgcgatctctgctcactgcaagccccacctgccaggttcacgccattctctcgcctcagcctcccaagtggctggaactacaggcacccacgaccacgcccagctaattttttgtatttttagtagagacggggtttcaccgtgttagccaggatggtcttgatcccctgatctcgtgatctgcctgcctcagcctcccaaagtgctgggattacaggtgtgagccactgcgcccagccaaaaataatttttttaattacctttctggtgaatgagtctggggattctcttcagtgtgttattaataaaacacagaagtagagaggcctttctgcttctcagaagtttaaacagctgtgtgtgcagtggcttgcacctgtagtgccagctattcaggagactgaggtgagagaactgcttgagcccaggtgttcaaggccagcctggacaacatagcaagaccctgtttcttaagaaaaaaaaaaaaggtttgaaaatacttatctcgaagcacctgcacagtgagcagttagaaaggcaaccagcagacaatgcacgtaaaagtatttgacatatggagtgctccagttgtttccatcagttctctttcctcatactgtggtggcagaagtacaaatggcacctttaccagaaggacactgtaaaagttcagtgaagctctgcggtttccggtgtggctgtcttcatccctaatcctaaatgttaactttgcaaccctgtaagatttcatgtctgtaccagaaactttttgtgaggaagccttgactggccattagggagcagaacagtgagggaaagtctcaagagtaatatatccgcgtgctgagctgtggaaggaatgaacagcggcctttctctgaatggtaatgtagctctcaaaaacgctgcctggttcttaatccaaatgtccagaaccattctgtgcctggcagcacacatccagacaaatgaaagagggtctcttcacttgctaaaagccattataaggagaaataaagaaaagggaaaaaattaaaagaggatctctaaaggaactttcgtattgcctgctgtttgcaatcatactgtctgctgctgctgcartagaaatttctgagccgggtgcgatggcttatgcctgtaatttcagtgactcaagaggctgaggtgggaggagtgcttgatccgaggagttcaagaccagccacatcaacatagggagaccccatctctgcaccaccaacaaaaaattagccaggcatggtggctcacgcctatggtcccagcactttgggaagctgaggtgtgaggattgcttgaggccaggagctcaacaccagcctgggcaacatagcaagatcctgtccctacaaaaaaaagtttttaattagctgggtgtgatggcacacacctgtagccccacctacttgggaggctgaggcaggaggatcacctaagtccaggagtttgaggctgcagggagccrtgattgtgccactgcactccagcctgggcaacagagtgagaccctgtctctaagaagacatttcttctggtgctttggtgatgcttctgctcagcctttctgtctgtagtctcagtccgatagtccagtctgctttgagggcccaccaggacctggaggaggggccagtttcagtcaagggtctgcagttgaccttgagaacttagcacattcattatctttttgtgggcacttccacctcccattagaaagaaaaagatgggcccagtgcggtggtggcttatgcctgtaatcccagcacattgggtatccacggtgggtggatcacttgagctcaggagttcgagaccaatctgggcaacatggcaaaaccccatctctacaaaatccaaaaaaatgagctgggtgtggtgtcacatacctgtagtcttagccacttagggggccgaggcaggaagattacttgaacctgggaggttgaggaggctgcagtgagctgagatcacaccactgcattccagcctgggtgacaacgtgagaccctgtctcaaaaaaaaaaaaaaagaaaggaaaagataggggttggtgtctatgggtatgttggtgtctatgggtatgggctctcagcccgtctcttctcattaactgaaccacactgtttctttacacaggccccacatcaagaccatcttccaaggcattgctgcaaaagtgggaactggagaaccctgctgtgactgggcaagttctgggctactctttaaagccaattggcaacatgggcgtgtctaagtgatsaagtgcgtggagaaaggccaccgtggtctcccaggggttagcttggtgacataaacgtctcgatctttgattgctagaatagccaacgcctagaatgcatgcctgctgttcacatctttgtatcttagctgactgttcatagccttgaggttgatattaaaagcagccttctataattcatctaaaagatgaattctttaaaaaggaataggatgaagtgaaataagattttttcgagccatattatttcatggccaaaggaaagaatgtcagaatcaaaagtggcgtttgcttgcatgggtgaaaggtggaagattgaaggtactgttgctgtgtcaacattccatgaacgtggaaaattccccatcctgtagtgtgggattcaggcattctgtgcttgaacaaagtaacctgtggacttgcaccctcactgaatatgaaggaggcctaacctagttcatagtacagtggtgcgatcttggctcaccgcaacctccacctcccaggctcaagcaatcctcctgcctcagcctcctgagtagctgggactgcaggtgcatgccaccacgcctagctaatatttgtattttttgtagagacggggtttcaccatgtcacccaggctggtctcaaactcctggactctcaagtcatctgcctgccttggcctcacaaagtgctgaggttacagrcatgcgccaccatgcccggcctcgtgttgctgttaaagtaaactttatctcatattgtagttcagccatgctgtggatggaaaaaagcattaggctcaggagacctgagtggcagttctggctttccataaacttaactgtgacatcaggcaagccacgtcccttcatggacttcagtttccttatctgtaagatatggggttggattacatgatctccaagctctcttcagctcctgattccctttaattttatatcagcaattttaatgtgaattttattattcaattttattttatatgaaatcaatgctgaggttgaaataaggactcaggcctttgaggaatccgggaagccctccctcctaggcctgccagtgcttggtggctttggccacagcagctcacttgtccttaccttttcaccagtggttggccattgagctcagtcagaatctgcttagggtagaaagaggctggtgctgggactgacgtaaagagctgagtaatcttctcattagtgtgaaggattggaaagggacctctgttccctgacagtagattactgcggtaaaaggccgggtgtagtggctcgtgcttataatccagtattttgggaggatcccttgagcccacgagttcaaggctgcagtgagcagtgatcatactactgcactctggcctgggtaacagagagagaccctgtctcttaaacagaaaaaaacaaaaagatcactgcaataaaagtgagtggtagcaacttttttttttttttttttttttttttgagacagtcttgctttatcgtccaggctggagtgcagtggcataatctcagctcactgcaacttccgcctcctgggttcaagcgattctcatgcctcagcctccattgtagctgggattacaggcatgtgccaccatgcctggctaatttttgtatttttggtagagatggggtttcaccatgttgcccaagctggtcttaaactcctgacttcaagtaatcggcccaccttggcctcccaaagtgttgggattataggcgtgagccaccgcacccagcctgcaacttttttttagatacacacacttaggacaaagtcatgaagagaagcacagtccttgcccctacgtgtgttgatcaagcaggccctccttagttcatggctgaagtggcaggaagggtaaggtgaagtaagatgttagcagccatgttactctgtggccagagtgtcaaaatcagaagtcagcaggggcagcaatagaaacatggacaaggccaggcgtggtggctcatgcctggaatcccagcactgtgagaggctgaggtgagtggatcacctgaggtcaggagtttgagaccagcctggccaacatggtgaaactccatgtctacaaaaattagctgagtgtggcggtgtgctcctgtaatcccagctcatcaggaggctgaggcgttagaattgcttgaacccaggaggcaggtgttgtgctgagccaagatcacaccgctgcactccagcctgggcgacagagcgagactccgtttcaaaaaaaaaaaagaaacacggacaatggagtcctgatgtgagcgtcagttatacaactgacggtccaggtggtgacagccaggagagagactgcccaggtcatccaaacacctggcctcctgggcaggtgtgtccctgtcatggagctgggtgtagatgactgagagtttgatgccatgaactgtttggctctcgtcactccctttgttccagttcttgacaactaaataattttcggataatctggcttcccagttgcttgtctatagggccagaatgtgttgaccggactaacatttgtaaccacgaagatccatagttaaggttttcatcctacattcattaackggtattctgattttatacatcttgccagcttataaataaagatctggtctttatttataaatataaatataaatataaatataatgatggggccttggagggactcctttctgggcttacaaggttgagaccttggatctagggtcattttacttttcagtagccattaggaacaactacaatacatttatattttgaaaaaaaacaagtgatttaattggccaatatattttaacctctagttgctagaaaagtggtaactttgggaaaaagaggactttttttcttgtgggtgggggctgggaaggtggggagttgctttgaatgatgagaaagagtagaaaatacaggctagagagccataagtattgaaagtgaattcagggactttgagaaaccttgagaagaatgagtctagaattagtgttaaataatattgtactggactgaagcttgctttgaattgctatatgattcttgtatcaaaaatgctgtactcattttatacttgttattttttgtgtggagaggtagccttgccagggatgttggcatgaaagctgatgtggacttctctgatgtgtcgcctgtttctctgaaggcctcttggtgcttgttgtcctgacaggtgggagatgagggagcaggccacttcgtgaagatggtgcacaacgggatagagtatggggacatgcagctgatctgtgaggcataccacctgatgaaagacgtgctgggcatggcgcaggacgagatggcccaggtgaggccccggcactgcctctgtgtccgktctgcagggagtgctcactttgccacagacaccgaatcttttcttcattcctatccccttggccattcgggtggcctgcatggactcagcctaatttgagggaaactgttagtaataggcytatacactatgctagtcagtcactaagcwgaaagtccccacagagtctgggtggttatcatcaccaccatttagcgtagcttacctggtgtcaggcactgtgtcactccacatacctgtcccatttactcccacagttgtcccacatggcagatgcagcagaagctttctttcctgatcaagttgggattggctttttgatagttaatctgaaaagtcagtccaagtagggaagctgaagcatttcccccaacattttattatgamaatattcaaccatgcagcacagaagtttgagagttttacagtgaacacctggatacacacctcctcctttctcccatccacaggttcctgtacttgctttagcaatgtctgtccatcccccaccaatttcatcttattttttggatacattcaaagtaaactgcaggtatccatacttttgttttccctaaatactttagatgaatgtatctttatcatgaggtaaacatagattttaactgaaaacataggaaaggactttcattcacccgccattttttggagggccaaggccttctcgttaagtatggtttgctgatgcgctttctagtcgtgtcttaccatctagaatttctagtttcagttatttccaatgggatgtgatttacagactctagcaaggcatacagtatagctttccagattttttgttgttttcctcctagttttttattcatgtcatcctcacttactttgactattgtttgtttcactggattgctgttaattgttctttctaaaacattaccttagttttctttcacagaaacagtgctattctttttgtgttcattttttattggtatatataatacttaacgtgttcactcagcaaacacacgagtgctttactatatgccaagcatgattctaaatgctggggatatactagtgaagaaagcaaagtgcctgccctcccggagctgggaagacagacagaaataaatatacaatatcaaactagttagcgatgactgtgagaacgaagagtaaactgggacaagatccggtgattgcagaaggcttctgaggaggcgacastgcacagagacctaagtgaagtgaggagcccttgcctctgaggagacaacacttctggtggccagaaattcagtataaccaggttcagaacaaacacaactgactctgggttagcataaaactcaaccagcaggagcagaagtccccaggcagacgcgagcagagcctgctggcaaccgtgagcattggtcagcgtggacattggacaaggggcttccttgctcagccctcattcctctaacatggttctctcctgtgttctgcatgtaggcctttgaggattggaataagacagagctagactcattcctgattgaaatcacagccaatattctcaagttccaagayaccratggcaaacacctgctgccaaagatcagggacagcgcrgggcagaagggcacagggaagtggaccgccatctccgccctggaatacggcgtacccgtcaccctcattggtaatgttatgcttttcacatgggccctttcgtccactattctgatcttgatgtctggaggacagatacagactggtctttagagaatctcttcagccctctttagctttcagagtgccttttgctctttcttgcgttgaagaaactgacagtgtgagagaggctgacgctgcttttgattctcttccttgtagttcttatctcattcgtacaaactgtgaggtaaattcagaagtgactgtccttcctatccagttttatctttggaatattttagcattagtgatgtaattgtagtcagtgatctaagattttatttatgaggcaggtaacttgagtaaaatttttcatagaaaagttcatgaataacagggccgggcacagtggttcacgcctgtaatgccagcactttgggaggccgaggcgggtggatcatgaggtcaggagattgagaccatcctggctaacatgatgaaaccctgtttctactaaaaatacaaaaaattagccaggtgtggtggcacgtgcctgtagtcccagccactcaggaggctgaggcaggagaattgcttgaacctgggaggcagagtttgcagtgagctgagatggcaccactgcactccagcctgggtgacagagcgagacttcgtctcaaaaaaaaaaaaaaattagcaggtgcctgtaatcccagctactcaggaggttgagccatgagaatcgcttgaacccaggaggcagaggttgcagtgagccaagatcatgccactgcactccagcctgggcaacagaatgagactccatcccctccaaaaaaagtttgcgaataacatatgcttgtgtactcagaaattattaaaaatttacttttttcccctagatattaaaaagataaaaattacctatccatttgagtcctcgttgttttgctaagttccttctccttcctcttttagaagaaagccactatcctgaagttggtgtgtatcctgcccacttgttttatatcttacattagtgagctaagcatcaaactcagaaagataaggaaataatataaagaaataaacataaaacgagaggggattaacaatatcaaaatcttggccgggggggtggttttcwgtgtgtttgtttgttttttgagacggtgttgtgctctgtcacccaggctggagttcagtggcatgatctcgggtcactgcaacctccacctcccgggttcaagtgattctcctgcctcagcctcccgagtagctgggattacaggcatgcgctaccatgcctggctaatttttgtgtgttattagtggagacggggttttaccatattggtcaggctggtctcgaactcctaacctcaggggatctgcccgcctcggcttccaaaagtgctgggattgcaggcgtgagccaccatgcccagcaaaggtggttctaagagtaaaatacatagacttctggcaggaatgaaaaaggagaacgaaggatgcctctcgtggttaatgagaggctgatctttgcttctggcagattgttctcactatattaaaacagaattgggccaggcgcggtggctcacgcctgtaatcccagcactttgggtgaccgaggtgggcggatcacgaggtcaggagtttgagtccagcctgaccaacatggcgaaaccccatctctactaaaaatacgaaagttagccaggcatagtgacccgtgcctgtaatcccagctactcaggaggctgaggcaggagaatcacttgaacctgggaggcggaatttgcagtgggctgagatcgcaccactgcactccaggctgggcgaccgagcaagactccgcctaaaaaaaaaaaaagaagcatctcaaaaataataaaacagaatttttcctgtttgctcctctggatacaggttgcctttctctcccttgactcttctccccttttgacctccctgttcattgtgcctcgccctattgaactgtgtggtgtaaggcagagtaaggaggaaagtcggtggtttctacagttccgtgctgtatagaaggaagttggctgcttttagccgatctgagccataacataggtgaggagggaggggccaatagctaggagcaatttattcatcacggactcaagtatatgtgtaagtattaggatctcagaatcctactctcctcctgtggatccatatacctcttcccccagggtggctgggcccaccccctgctgggagccatcattatttgtgaactaacagggaagtcttccagctgccctctccccctctaacaggaagggtttgcctcatagcctgttgcaccagtcatcttacaaagcttccttctagaaatgctaagtcatcctgtgtgtgcatttgggccaggagagaggtagctgcttttgtgtgtttggagtagggttagcagtctcaagccatagctgctcctctttcctcagaaataaagtcctctgttagttccctgagattttacttcattttgtctatgggggaaaaagtggttaaagagtcatttattctaactataagttgtcagttgagcaagtcttttataaggaatactttctgaaaatactaaatgtcttaatattaaaatactacattgactttttaattcaaatgaagtaaagtggttaaacttgaatgattacggctatactgaaaaccgtaaaatataaaaacctaacatttttttgagaggtgagtccgtaaatgtgacttatcaatgtaaaatcttcaaaaaaaaaaattaaggtcctctaaattgaatttgaaattttactcatggaccaacactgagtattctacataacagtggtttttattttattttactggttttagagacagggtctcactgtgttgcccaggctggagagcagtggtgtgatcatggctcactgtagccttgaactcctgggctcaagtgatcctcccacctcagcctgccaaagtgctgggattacaggtgttagccaccttgcccagccataacagtggtttctatctcttcattttccctcaaaactcccttttgaatttcatgttaatctttgtgattgaatactcatgtttgtattggaagattgtcttaagagttttagttatcaaattaactgtttagagcttcttataaaagttccttccgatccatgtcaacttttgtggcctaaggttgaaactttcagctctttgtataaacagactttcctgctccacctttcttctggttgctgtgcgaactttggtaattttcatgcgcatccgtgtgaaaagaccaccaaacaggctttgtgtgagcaataaagctttttaatcacctgggtgcaggcaggttgagtccgaagagtcagcgaagggagataggggtggggccattttataggatttgggcaggtagtggaaaattacagtcaaagggggtttttctcttacgggcagggccgaggggtcacaaggtgctcagttggggaggttctgagccaggagaaggaatgtcacaaggttaatcgctcagttaaggtggggcaggaacaaatcacaatggtggaatgtcatcagtaaaggcaggaaccagccattttcacttcttttgtgattcttcacttgcttcaggccatctggatgtatacatgcaggtcacaggggatatgatagtttagcttgggctcagaggcctgacagtaatctgtttcctcttcccgatctccccatgtaggagaagctgtctttgctcggtgcttatcatctctgaaggatgagagaattcaagctagcaaaaagctgaagggtccccagaagttccagtttgatggtgataagaaatcattcctggaggacattcggaaggtgggacacagtccctggcagtggtctttgttggtcctgcggaaggcagtgggggtgggrgttgtggtgggagaacactcgaggccacaggatggcaggtggaatgaagttcagccttgacttggatcttgacttacaatgttttcctagaatattggcccttctgggatctccactgctgatgagaataagactggtagacataaggcggtcactctcctaatggcaatcctagtaggtctctgtgtcactctttaggcactctacgcttccaagatcatctcttacgctcaaggctttatgctgctaaggcaggcagccaccgagtttggctggactctcaattatggtggcatcgccctgatgtggagagggggctgcatcattagaaggtaagtgagaggcagcccagggtccgacgggaaggactcacacggctgtgsagaagtgcgatcttaggacacttagcttgagcagtttccagggatgggcacttagccccatcactggacactggcacaagataggcttagattatgtggttcccttcttcactgtacctcagttgctgtaactagattgtccacactacacctttttttttcttttgagaccaagtttcgctcttattgcccaaactggagtgccatgatgcgatcttgactcactgcaacctctgcctcccgggttcaagtgattctcctgcctcagcgtcctaagtaactgggattacaagggcacgccaccatgtccggctaattcttttgtatttgtagtggaaacagggtttcaccatgttagccaggctggtctcgaactccttgccttgggtgatctgcccgcctcagcctcccaaagtgctgggattacaggcgtgagccactgcgcccggctccgcattacacctactacactacaccttttaaagtacttctgtgaactatcgtgccctctggccttgcctcttgggaattttgctctgtattttcattgaaaatgccaaatcatagaaaacgtagcatttctacacatgacgttacatcgttctcatgttggctgaagattcatttgatgaatctgatttttctgaagtagatgattctggtgattcagatgattctaatattagttctctttagaaataacgccaagaatagtttttatattttattttcatattgaaaatcgtcagattttcttcagcctcaaaaagcgtgtttatgtaaaattaaatgagcgctggcagcgagctgcactttttttctaaacaggaaaagggttaacagcttgaagaaatgagaaatgtaactttgtttcactagggtatacatcggcttccagcttacttccctgttagagttaagattcattgcatttggccgggcgcggtggctcacacctgtaatcccagygttttgggaggccgaggcaggcggatcacgaggtcaggagatccagaccatcctggctaacacggtgaaaccctgtctctactaaaaatacaaaaattagccggttgtagtggtgcgtgcctgtaatcccagctactggcraggctgaggcaggagaatcgcttgaacctgggaggtggaggttgctgtgagctgagatcgtgccactccactccagcctggtgacaaagcgggactccgtctcaaaaaaaaaaaaaaaaagactcattgcttttttccccccttgattatttcagtgtattcctaggaaagataaaggatgcatttgatcgaaacccggaacttcagaacctcctactggacgacttctttaagtcagctgttgaaaactgccaggtatgtagcctagggctggtgccatggttactctacctccctggggccatcagttgtgatgtttggttttttgttttttttttttggttttttgtttttttgagacagagtctcgctctgtcacccaggctggagtacagtggcatgatcttggctcactgcaacctccgcctcctgggttcaagcgattctcctgccccagccttcctaagtagctgggactacaggtgtgccaacatacctggctaattttttttttttttttgtatttttagtagagatggggtttcaccatgttggctagactggtcttgaactcctgacctcgtgatccgcccacctcagccttccaaagtgctgggatgacaggcgtgagccaccgcgcctggcctaaccatcagtttttcatttacccacattgatrtgaatgaaaatctatccgcgtcaccaggggcagatcactaatctctggccgtgcgttttgtgctcaggactcctggcggcgggcagtcagcactggggtccaggctggcattcccatgccctgttttaccactgccctctccttctatgacgggtacagacatgagatgcttccagccagcctcatccaggtaagcctgtggagcagggattaacctggctggcccctsgggggcgtgcgccatggactgtcctgaccaacctactctctcrtttcctaggctcagcgggattacttcggggctcacacctatgaactcttggccaaaccagggcagtttatccacaccaactggacaggccatggtggcaccgtgtcatcctcrtcatacaatgcctgatcatgctgctcctgtcaccctccacgattccacagaccaggacattccatgtgcctcatggcactgccacctggccctttgccctattttctgttcagttttttaaaagtgttgtaagagactcctgaggaagacacacagtttatttgtaaagtagctctgtgagagccaccatgccctctgcccttgcctcttgggactgaccaggagctgctcatgtgcgtgagagtgggaaccatctccttgcggcagtggcttccgcgtgccccgtgtgctggtgcggttcccatcacgcagacaggaagggtgtttgcgcactctgatcaactggaacctctgtatcatgcggctgaattccctttttcctttactcaataaaagctacatcagactgatgctctttctccagattcttagtctcacctcggccacatggagccattatccccattggcagaaaratttttctttaaaaaaaaagactagaataacacaagaaaccmcatttaggattatgcttcmctcagaggaggcaggcagggaggacmcaccaggggctttaawacmctgggcatgttttctttctccaattgggcaatgggkacatggacgttcmctgtaacgkgctttttctttcgtctttttttttttttttttttttttgctcctggcaarctgtgcgtgacattctttatggctttttgtatgtcaaawacttcatactaaactttctagagaattaaactttaatgatgggctcagcttggtctgatttatttcctttcccacacctgtctctacttgctctaagccaggcccagggattttgaacaagctaagccggctccttaaactaggcttttcactttatcttacttactcagagaagataaaacctgccagtgatattgttgtgtggcctggggccagtgtgactgttccctgcagcggtttgacttcatgatgatttccctggagtgttaaagtcctaagagttgcctaagaggagcgagcagcgcctgtgcctcgacagctggtgtctacagtgtgacctctgacctctcggctaatgtcagtgaaggagacaattttcattaaatcaccaacttttaatttatttttcttttttttgagacagagtctcgctctgtcacccaggctggagtgcagtggcgtggtcttggctcattgcaagctccacctcccgggttcacaccattctcccacctcagcctccagagtagctgggactacaggtgcccgccaccactcctggcttatttttttgtatttttagtagagacggggtttcaccatgttggtcaggatggtcttgatctcctgaccttgtgatccgcccacctcggcctcccaaagtgctgggattacaggcgtgagccaccgtattttaaaattttgtttagagatgtggtcttgctatgatgcccaggctgatgtcaaacacctggactcaagcaatcctcgtgcctcgacctcccaaggtgctgggattataggcaggagccaccgtgccctgctaccaactttttaaactctgcctagatgtgagtacttcgctagatcagcccccacgcacccctcctgccctccctgtacatttaagagaagcccgagtagccgcacgtgacgggatttttctttaaggcttgtcaaaggcactgttcgagggggatcttttcacctggctctgaggctgagggatggacactgctggaatggagagagaacagcaagaggtcagaggctaagtgtcaaagggcccacgatgtttcaaacagtaatgatcagaagggaatccactcagcccctttccgcttaccttccaaaaagctgtgagtggtggagtttggtttcaaatccagccctccttgcttactagctgttagactttggggaaattatttactatctgtgttctcagttttctcatttgtaaaatgggaaataatagcacctgtgtccttgaggctactttggggattcagcaagggaagatagagcagtgcctggcacatagtaaatacctacaccagtggcagcaaggctgggtgcgctggctcacaccgtaagcccagcactttggaaggccgaggtgggaggactgcttgagcccaggagtctgagaccagcctgggcaacatagtgagacccccatctctacaaaaaataaaaattagctgggcgcagtggtgcacacctatgatcccagctaggtggcaggctgaggtgggaggatcgcttaagcccaggagatggaggttgcagtgacccatgaccacaccactgtactccagcctcggtgataaagcaaaaccctgtctcaaaaaaaaaaaaaaatagtggcagcaattactaccattgagtgtgcctgacccctggacccctggagcagtggtggtttttttttagactgggtcttgctcttgcccaggctggagtgcagtgattcaatcactgctcactgcaactttgaactccccgaattcaggtggttcctcctgtctcagcctcccgagtcgctggttctacgggcatgtgccaccacgccccactaattttttgtattttttgtagagacaaggtctcaccatgttgtctaggctggtctcaaaactccagggctcaagtgatgctgctcccacctcagcttcccaaagtgctgggattacaggcagaagccactaccccctggccagcagtgcgtgctgtttgtactgagagaaaccagatgttacctctcagcaccagtggtgaatttgctttgcaccccagtcttcaaaaggtttctggtgggggtgcctctgtgtgctgcgcagcaggtgtagaggttaagaaaggtcagagcttctcaaactaacctgttacaactcccccactcccaccaccacccccgagattttgaaaaaatgtagattctgattcggtagaatcctgaaaatggctcttcgtggggtggagccccatgttctgcatttctatcttttttttgagacaaggtctcattctgtggcccaggctggagtgcagtgtggcactatcatggctcactgcagcctcaacctcctgggctcaggtgatcctcccaactcagcctcctggctagctgggactccaggtgcacaccgccacgcctggctaatttctaaactttttgtagagatgagctctccctatgttgcccaggctgatcttcaactcctgggctcaagcgatcctcccgcctcagcctcccaagtgctgagaccacaggcatgagccaccacgcctggccctgggccccaatcttggctccgccacaaattcagccttacttcacaagttagttaacctctatgtgcgtattttctcctctatataaaagggatgatgataacacccacctcacagagccgtcttcccgactaaacacaaggcacttgcaccagagccaccacacactgagcactatgtaaggtttactgtttattacctgcctcctaaagagaggctgccaaacaattctgagtgtggaaggaggtggaaagaggggttttgcccttagccaagtcagtcctgttcagtctaaccactaaaagggacagatctggtggcttctttgaggtagaaattataggcccctaatgatgtctgccacaactctgctttactggggacacaaaggtgtgttatacagacaagggtcagacaaggaaacaggagttttgttttcacttttgagacagtctcactctgtttcccagctggagtgcagggcgcgatctcggctcactgcaacctctacctccctagttcacgcagttctcctgcttcaacctcctgaatagctgggattacaggtgcccaccactacgcccggctaatttttgtattttagtagagacagggtttccccgtgttggccaggctggtcttgaactcctgacctcaaatgatccacccgcctcagcctctcaaagtgctgggattacaggcacgagccaccatgcctggccaagcagaaggattgccaagcaaagagactttagggaaggatttgcaggggttacacgttctttgaggcagatgtggagcccatcattttggaaggggtgggagccttcagcacgctgttcagcatgcgggcgaatgcgtctgctcactctgttaaatcttgtatgctgtcacagttgctgcggactggtgtgtaacaaaccaccccaaagtcagtggtgtaaaataatcaccatttaaattttcttctaattctgtgggtcatgaatctggaaagagcatggtgggggacgggggaggcagaggcagcttgtctgctccacaatgtctggggcctcagctaggaggactcgagagcaggggtggcaccatggctcgggggcgtggagtgtcctctctcattcatctcgcggtggatgctggctgttggctgggacctcagctagggctatgagctggaaaaagttcatgtggcctcatcacatggcctcaggccagagaaacatcttgtttgttggcccagggttctcactaaggaggcagaagcacacacgtggcttttaaaaacccagctgtgaatgttacatggcaggattatagccatccaaaatcggttccaagcaagccgcaagtcccccagactcaaggggcagaggattagactctacctcttgatgggggagtatgaggttctagaaaagcacatggatcaggagacattgttcttgccatcttcgtaaattacagtctgccacatatgctgcccctgaaaaggaaaatctgttacatagcagagttgggaaccggcactatttggggcttttcctgagggtctcatatagtatatatactactagctaacattgagagcatatgccaggctctgtaactcattgaatgctcgcagcaccctctgaagtaagcactattactatccctaatttagagatgaagcacactgatattaagtaattcgtccaaggtcagagctactgaagaactggaattgaaccccagagatctggtgccagagtccatacacttaatcatgaaactgacctgtcggcgtgcacagttcatcgccccactcattcagtcattcggcatgtttatggtacacctaccatgtgccaagcattgtgctaggtaccctctgtcggggtgagagaagtccaaagtcctgacctcatgtgcttacaggatacatataatatttaacgataattatttttaaatttttatcttctcttgaataaacctatgaaatggagattgatttttttttttttttttgagatgtagtctcactgtcacccaggctggagtgcaatggcatgatcttggctcactacgacctccgcctcctgggcaagcgattctcctgcctcagcctccttagtagctgagattacaggcgtgcaccaccatgcctggctaatttttgtatttttagtagagatggggtttcaccatgttggccaggctggtcacaaactcctgacctcgggtgatccacccgcctcggcctcccaaagtgctgggattacaggcatgagccaccacgcccagccaagattgatttttgtattgacattttacagtgcagtttttttttttttttgagacggagttttgtggggaaaagaaagatcagattgttactgtgtttgtgtagaaagaagtagacataagagactccattttgttttgtactaagagaaattcttctgccttgagatgctgttaatctgtaaccttacccccaaccctgtgctctccgaaacatgtgctgtgtcaactcagggttaaatggattaagggctgtgcaagatgtgctttgttaaacagacgcttgaaggcagcatgctcgttaagagtcatcaccactccctaatgtgtccggaattggtgggttcttggtctcactagctccaagaatgaagccgcggaccctcgcggtgagtgttacagctcttaaggtggcgcatctggagtttgttccttctgatgttcggatgtgttcggagtttcttccttctcgtgggctcgtggtctcactggctcaggagtgaagctgcagatcttcgcggtgagtgttacagctcataaaagcagcgtggacccaaagagtgagcagtaacaagatttattgcaaagaacaaaactgccacagcgtggaagggaacccaagcgggttgccactgctggcttgggcagcctgcttttattctcttatctggccccacccacgtcctgctgattggtagagcccagtggtctgttttgacagggcgctgactggtgcgtttacaatccctgagctagacacaaaggttctccaaggccccaccagagtagctagatacagagtgtcgattggtgcattcacaaaccctgggctaaacaaagggtgctgattggtgtatttacaaaccttgagctagatacagagtgccgattggtgtatttataatccctgagctagacataaaggttctcctcctccccaccagactcaggagcccagctggcttcacccagtggatcctgcaccaggctgcaggtggagctgcctgccagtcctgcgccatgcgcccacactccycagcccttgggtggtcgatgggactgggcgccgtggagcagggggccacgctcatcggggaggctcgggccacacaggagcccacggagtgggtgggaggctcaggcatggcgggctgcaggtcccgagccctgccccacaggaag

SEQ ID NO: 94541 - DNA, 116609 bp, Homo sapiens
  misc_feature (1)...(116609): n = A,T,C or G
nnnnnnnnnnnnnnnnnnnnnnnnnnnnnnnnnnnnnnnnnnnnnnnnnnnnnnnnnnnnnnnnnnnnnnnnnnnnnnnnnnnnnnnnnnnnnnnnnnnnnnnnnnnnnnnnnnnnnnnnnnnnnnnnnnnnnnnnnnnnnnnnnnnnnnnnnnnnnnnnnnnnnnnnnnnnnnnnnnnnnnnnnnnnnnnnnnnnnnnnnnnnnnnnnnnnnnnnnnnnnnnnnnnnnnnnnnnnnnnnnnnnnnnnnnnnnnnnnnnnnnnnnnnnnnnnnnnnnnnnnnnnnnnnnnnnnnnnnnnnnnnnnnnnnnnnnnnnnnnnnnnnnnnnnnnnnnnnnnnnnnnnnnnnnnnnnnnnnnnnnnnnnnnnnnnnnnnnnnnnnnnnnnnnnnnnnnnnnnnnnnnnnnnnnnnnnnnnnnnnnnnnnnnnnnnnnnnnnnnnnnnnnnnnnnnnnnnnnnnnnnnnnnnnnnnnnnnnnnnnnnnnnnnnnnnnnnnnnnnnnnnnnnnnnnnnnnnnnnnnnnnnnnnnnnnnnnnnnnnnnnnnnnnnnnnnnnnnnnnnnnnnnnnnnnnnnnnnnnnnnnnnnnnnnnnnnnnnnnnnnnnnnnnnnnnnnnnnnnnnnnnnnnnnnnnnnnnnnnnnnnnnnnnnnnnnnnnnnnnnnnnnnnnnnnnnnnnnnnnnnnnnnnnnnnnnnnnnnnnnnnnnnnnnnnnnnnnnnnnnnnnnnnnnnnnnnnnnnnnnnnnnnnnnnnnnnnnnnnnnnnnnnnnnnnnnnnnnnnnnnnnnnnnnnnnnnnnnnnnnnnnnnnnnnnnnnnnnnnnnnnnnnnnnnnnnnnnnnnnnnnnnnnnnnnnnnnnnnnnnnnnnnnnnnnnnnnnnnnnnnnnnnnnnnnnnnnnnnnnnnnnnnnnnnnnnnnnnnnnnnnnnnnnnnnnnnnnnnnnnnnnnnnnnnnnnnnnnnnnnnnnnnnnnnnnnnnnnnnnnnnnnnnnnnnnnnnnnnnnnnnnnnnnnnnnnnnnnnnnnnnnnnnnnnnnnnnnnnnnnnnnnnnnnnnnnnnnnnnnnnnnnnnnnnnnnnnnnnnnnnnnnnnnnnnnnnnnnnnnnnnnnnnnnnnnnnnnnnnnnnnnnnnnnnnnnnnnnnnnnnnnnnnnnnnnnnnnnnnnnnnnnnnnnnnnnnnnnnnnnnnnnnnnnnnnnnnnnnnnnnnnnnnnnnnnnnnnnnnnnnnnnnnnnnnnnnnnnnnnnnnnnnnnnnnnnnnnnnnnnnnnnnnnnnnnnnnnnnnnnnnnnnnnnnnnnnnnnnnnnnnnnnnnnnnnnnnnnnnnnnnnnnnnnnnnnnnnnnnnnnnnnnnnnnnnnnnnnnnnnnnnnnnnnnnnnnnnnnnnnnnnnnnnnnnnnnnnnnnnnnnnnnnnnnnnnnnnnnnnnnnnnnnnnnnnnnnnnnnnnnnnnnnnnnnnnnnnnnnnnnnnnnnnnnnnnnnnnnnnnnnnnnnnnnnnnnnnnnnnnnnnnnnnnnnnnnnnnnnnnnnnnnnnnnnnnnnnnnnnnnnnnnnnnnnnnnnnnnnnnnnnnnnnnnnnnnnnnnnnnnnnnnnnnnnnnnnnnnnnnnnnnnnnnnnnnnnnnnnnnnnnnnnnnnnnnnnnnnnnnnnnnnnnnnnnnnnnnnnnnnnnnnnnnnnnnnnnnnnnnnnnnnnnnnnnnnnnnnnnnnnnnnnnnnnnnnnnnnnnnnnnnnnnnnnnnnnnnnnnnnnnnnnnnnnnnnnnnnnnnnnnnnnnnnnnnnnnnnnnnnnnnnnnnnnnnnnnnnnnnnnnnnnnnnnnnnnnnnnnnnnnnnnnnnnnnnnnnnnnnnnnnnnnnnnnnnnnnnnnnnnnnnnnnnnnnnnnnnnnnnnnnnnnnnnnnnnnnnnnnnnnnnnnnnnnnnnnnnnnnnnnnnnnnnnnnnnnnnnnnnnnnnnnnnnnnnnnnnnnnnnnnnnnnnnnnnnnnnnnnnnnnnnnnnnnnnnnnnnnnnnnnnnnnnnnnnnnnnnnnnnnnnnnnnnnnnnnnnnnnnnnnnnnnnnnnnnnnnnnnnnnnnnnnnnnnnnnnnnnnnnnnnnnnnnnnnnnnnnnnnnnnnnnnnnnnnnnnnnnnnnnnnnnnnnnnnnnnnnnnnnnnnnnnnnnnnnnnnnnnnnnnnnnnnnnnnnnnnnnnnnnnnnnnnnnnnnnnnnnnnnnnnnnnnnnnnnnnnnnnnnnnnnnnnnnnnnnnnnnnnnnnnnnnnnnnnnnnnnnnnnnnnnnnnnnnnnnnnnnnnnnnnnnnnnnnnnnnnnnnnnnnnnnnnnnnnnnnnnnnnnnnnnnnnnnnnnnnnnnnnnnnnnnnnnnnnnnnnnnnnnnnnnnnnnnnnnnnnnnnnnnnnnnnnnnnnnnnnnnnnnnnnnnnnnnnnnnnnnnnnnnnnnnnnnnnnnnnnnnnnnnnnnnnnnnnnnnnnnnnnnnnnnnnnnnnnnnnnnnnnnnnnnnnnnnnnnnnnnnnnnnnnnnnnnnnnnnnnnnnnnnnnnnnnnnnnnnnnnnnnnnnnnnnnnnnnnnnnnnnnnnnnnnnnnnnnnnnnnnnnnnnnnnnnnnnnnnnnnnnnnnnnnnnnnnnnnnnnnnnnnnnnnnnnnnnnnnnnnnnnnnnnnnnnnnnnnnnnnnnnnnnnnnnnnnnnnnnnnnnnnnnnnnnnnnnnnnnnnnnnnnnnnnnnnnnnnnnnnnnnnnnnnnnnnnnnnnnnnnnnnnnnnnnnnnnnnnnnnnnnnnnnnnnnnnnnnnnnnnnnnnnnnnnnnnnnnnnnnnnnnnnnnnnnnnnnnnnnnnnnnnnnnnnnnnnnnnnnnnnnnnnnnnnnnnnnnnnnnnnnnnnnnnnnnnnnnnnnnnnnnnnnnnnnnnnnnnnnnnnnnnnnnnnnnnnnnnnnnnnnnnnnnnnnnnnnnnnnnnnnnnnnnnnnnnnnnnnnnnnnnnnnnnnnnnnnnnnnnnnnnnnnnnnnnnnnnnnnnnnnnnnnnnnnnnnnnnnnnnnnnnnnnnnnnnnnnnnnnnnnnnnnnnnnnnnnnnnnnnnnnnnnnnnnnnnnnnnnnnnnnnnnnnnnnnnnnnnnnnnnnnnnnnnnnnnnnnnnnnnnnnnnnnnnnnnnnnnnnnnnnnnnnnnnnnnnnnnnnnnnnnnnnnnnnnnnnnnnnnnnnnnnnnnnnnnnnnnnnnnnnnnnnnnnnnnnnnnnnnnnnnnnnnnnnnnnnnnnnnnnnnnnnnnnnnnnnnnnnnnnnnnnnnnnnnnnnnnnnnnnnnnnnnnnnnnnnnnnnnnnnnnnnnnnnnnnnnnnnnnnnnnnnnnnnnnnnnnnnnnnnnnnnnnnnnnnnnnnnnnnnnnnnnnnnnnnnnnnnnnnnnnnnnnnnnnnnnnnnnnnnnnnnnnnnnnnnnnnnnnnnnnnnnnnnnnnnnnnnnnnnnnnnnnnnnnnnnnnnnnnnnnnnnnnnnnnnnnnnnnnnnnnnnnnnnnnnnnnnnnnnnnnntttggatggggacacagccaaaccatatcaagtttgaatgttccctccaaaactcatgttgacccttaatccacaatgtggcagtattgagaggtggggcctttaagagttgattggatcatgagggctctgccctcaatggattaatccacacatggattaatggattaatgggctatcatgggagggcactggtggctttataagagggagaatctagcatagcacctgagcatgctcagccacttcagaactctgtagagagtccccaccagcaagaagtctctcaccagatatggccccttgagcttgacatctcagcttccataactaagaaatacattcatttctttataaattctctgcttcataccatacatacaaaaaatccaattctgtcggatttatgatttaaatgatgaacaaaatttgaaatgtttgaagcagcctgggtgcattggctcatacctgtaatccaagcactttgggaggtcgaggtgggcggatcacttgaggtcaggagttcaagacgagcttagccaacatggtaaaaccctgtctccattaaaaatacaaaaaaattgccagatgtggtaatcccagttattcgggaggctgaggcaggagaatcacttgaacctgggaggtggaggttgcagtgagccaagatcatgtcactgcactccatcctgggcaacagagggagactccatctcaaaaaataaagaaaaaagaaaaaaaaaggctgagcgcggtggctcacacctctaatctcagcactttgggaggcccaggtgggcacatcacaaggtcaggagattgaaaccatcatggctaacatggtgaaaccctgtctctactaaaaatacaacaaattagccgagcatggtggcaggcgcctgtagtcccagctactcaggaggctgaggcaggagaatggcatgaacccgggaggcagagctttcagtgagccgagctggtgccactgcactccagcctgggtgacagagtgagactccatctcaaaaaaaaaaaaaaaagtttgaagcaaaatacaggagaatatctttatggctctggtgtaggcaaggatttaagatatcaaaagcataatctctgaataaatttgactatgttaaaatttagaacttcttttaagcaaaaaggcaaaaccaagagtgaaaacataagcatcaaacttggagaaatatttacatataatcaataaatggttagtattcagaaaataaaaagagtttctgtagccaaaagtaccatttatgaatctacttattgatggatgttttctgaaggtcttttgcccagagaaaaaatagtgcattaaaaagcttctgtccgtccaggtgtggtggctcacacctgtaatcccagcactttgggaagctgagataggtggatcacctgaggtcaggagtttgagaccagcctggccaacatggtgaaaccccatctctattaaaagtattaaaaacctagctgggcgtggtggtgggcacctgtaatcccagctactcaggaggctgaggcaggagaattgcttgaacccaggagacagaggttgcagtgagccaacacagtaccactgcactccagcctcggtgacagagggagactctgtctcaaaaacaaacaaaaaaaaaaacaaaacaaaaaaaccaaaaaacttctgtcccaaacaaacaaacaagcaaacttctaaaaatcaaatagaatgcctgggcctcacgcctgtaatcccagcactttgggaagctgaggtgggcagatcacctgaggtcagaagtttgagaccagcctggccaacaaggtgaaaccctgtctctactagaaataaaaatttagctgggcatggtagcaggtgcctgtaatcccagctacttgggaggctgaggcaggagaatagcttgaacctggcaagtggaggttgcagtgagccaagatcatgccactgcactccagcctgggtgacaagagcaaaactccatctcaaaaaaaaaaaaaaaatcaagtagaaaacaacccccaaaaatagtggcaaatgccatagcacttcatacatttcatagaagaaaaaatataagtgcctaataaagatataaaagaatgctcagggaaatgcaaattaaaaccatactgaggtagcatttgtaccccttagatgcatacctcttagatggccaaaaaattaaaatttaggtggtattacttttacactgttggtggcagtgtaaattggcaacccctttttggaattacattattatatttataatatatgttctatataattatataacatttatttcatattcatattaaacaagtatatttatgaatatatacataattgtgtatatgtatcatatatatttatatatgtaattacataatttatgaaaatcaatcctgttcctggagaacataccccccaaaaaaacctcttgcagatgaggactgggaagcaagtacagaaatgatcgaaacagtacaaatcaggggagaatgcgcccaagacatggagaactgataatacattgtggtttatccttgcaatggaacactatatggcagtgaaaatgattgaaatagagctatacacatcatcacagacaaatttcagaaacaacgctgagtgaaaaagtaagttgcagcagaatacatgcaatataattgtattttataaaattcaaaagccaagttttgaatatactttcttagctataaatgtgacaaaactataaagaaaagcacaggaatgatcaacataacatggtgattgaggagggacacacaggggcttcgatagtactgtctctgttcctcaagttggatggcagattcacaggtggtcatttcatcatgctttcatgttatactcattatatgatgactatattataattatactatatgttatgcatattatacattatattatacatattttgtatgtaacaatgtttcataatattttaaggaatgaatggaaatgggcacataaatgtagatatgcagtgcctcgtcgttagtagagtctcagaattatcagattccaagataattcctacacaaaaacaagcaaacaaatggcatgttatcttgaatgaaaagaccatccatattctaataaactgagacaatcaagtagggaatccctcttttaaggttggcatttgttgtatgcttggaagtgatttgaagcagaaattggttgtgaataaatcttctccttattaataaaacagaagcttgtttttaatgtcatattatccctgccaagaaattaaaaatcctggaggtaggctgggcatggtggctcacacctgtaatcccagcactttgggaggccaaggcaggtagatcacttgaggccaggaattcgagaccaacctggccaacatagggaaacctcatctctactaaaaatacaaaaaatagctgggcatgatggcaggcacctgtatgtagtcccagctactcgagaggctgaggcaggagaatcacttgaacccagtaggtggaagttgcagtgagctgaggtcacatcattgcattccagcctgggtgacagagtgagactccatctcaaaataaataaatwaataaataaaataaataaataaatattaaaatcctggagatagtattacttataacctcaatcatttattaatcaacctaaatttaatccttgattttataatatctttctatagagttttgttttggttttgctttgtttttagaaaaggcaggtgcatttaccttcttaggggatgaccattggtattttaaaaaataatacatttgctgagaattccttaaatttttctaatttccactagccagtgatgacattgtcccttttttgcagaaaagtttggaagatgatgataccaccacagttcacaccatgttgctaaaaacatttttcgtttgaccatttatacatttggttctaaagaaggtgttatccttagattcttggatctaacaaatatattttttttttttttgaggaatctcactctgtcacctgggctagagtgcagtctgtgatctcagctcactgtaacctccaccttctgggttccagggattctcctgcctcagcctcctgagtagctgggactacatgtgcccgccaccacgcctggctaatttctgtatttttggttgagatggggcttcagtatgttggccaggctggtctcgaactcctgacctcaagtgataacgcccgtctcggcctccgaaagtcctgagattgcaggcatgagccaccttgcccagcaagagtatgttatcttaagattcttgcctcattactattcttaaaattgctctaaaacttgcttaaacaatcagatttaaattatgtaaatacagacaacaaaactcttaattgtaaaggtgcttttaaaattcatgcatttatacatggcatgcaaattggctacaaattgggaagattttattctaagtaaccaaatcttaaagagctaaagcaaacctgctttataaaatacattaattcaaggactaagcaattcctgaaaacagactgatttactgtgcttcttaatatttcctcaaactagaatatgagtgatggtggtagaaggaggaagtagctcatacttggaggaacaaacagctgctggaatatgcttgtggtttagagcttctttgaaaaatcctgttaactgcaaaagaaaggaaggactaatattttccatgatttcagtaacatctttatgaagatactccttttgaatgtggtacagaaagttagaaaacacttaggcatggtatctggcatagtgcccccaagggagcatttcataaacagatggtctgtggcttatgatgctttgacttaaaatttttcaactttatgatggttccaaaggcaatgcacattcagtagaaaccatacttcaagtccccatacaactattctgtttttcatgttcaggatgttgttcccataaattacatgagctatttaacacttcataataaaataggatttgtgttagatgattttgcccaactgtaggctgatgtagtgttgagtatgtttaaggtaggctaggctaagctctgatgttcagtaggttaggtatattaaaggcacttgacttatgatattttcccttcctaataaacacatcgtaagtcaagaagcacctgtatctgatagaggtctacctttaccaatttaaattgacaaatttaatattcctgtcttgtttttaaattgaagaacaatagcagatctgaaataaataccgcagttagctttgcattttgactatttattgaacagttcagagggcaaggtagcaaagagaaacgctctgagtgtgtctttgattgccagctccttaattgtcaacaattctacagtggctttcctgtatttttctgtgcttttttctgttctcttctctgctttggagtcagaaacttcagttcaaatccctgccgtgacaacataacaatctatcagcctgtttcctccttcataaatgatggctataatttccatctcacaggatttgtaagtgtttgaattgaatgaggtaatgtattaatacatactacttggttcaaaaataatatccgtctctttccacatgcttcttagaactccagtgccacgatggacaaagtgagccactttcttcactgtccaatatcaatttgggaatggcagcttgctgcgtttgtattttcagatttagttaacattaccttccatcagtgaaatagaatacttaatctttattatgtattcctctcattttccaatatctttaaagttattttatcactattttaaaaatcaatcttgtgaacttttgcttttgcatggaggaaagtgggattggtcaaacattgaaatggggtgattggttctttaatttctctgtatttagtcctacacctaatagcttcaagctctctcctaggaagacaggactctgggtatgtccaaatgagtaaacactcttaatgacttttctctgtcgtatgccataatatctttttgagtgttccagagaactgaataaaagtagatctctccatattaactaaatgataatggctaacatctgtgtggtactttgcatatatagtgttttcacatataacactcattcattaatttgttaagtatttactgagctctgccatgtgctttgcctctactagacatcagagtatagtataatgaagtactccttgaccttgaggtgtcatcataaattgacttcccaagaaagccttctcctcctgctttgttaagtcactcctcccttcttattgtctagtaccatactctgtctcctttacaatattttctgtgctgatctccttaaaggtaggggttgtgtcagtttctgtcacgtctgtgaggtcctgactgtaagacctaggtattgctaggcccaaaatgggcacttaaaatcagttgagtgagtggaagaatggatgaaggcaacatgctcataggaaagagacaggctacagattcattgctacagaatgtgatgggtactaaggcagagaggtgggttaagggcattgtgttagtctgttttgagctgctgtaacagaataccacagactgggtaatgtataaagaacaggaatttgttttctcagaggtctggacgctaggaagtccaagatgaaggcactggcaggttcatttatctggtgagcgtctagtctctgcttccaagatggcatcttgactgttgcatccttgaggagtgggggaagaatgctgtgttctcattccatggatgaatggataaacaaaatgaggtatagatttacagcggaatatgattcagccttgaaagaagtgcagttcttatatatgctacaacatagatgaaacttgaggacattatgctaagtgaagtaagccagtcacagaagaacaaatattatatgattctgcttatgtgagacacctagaataggcaaattcatagagacggaaagtagtttccatggggtgggggtaggggagaatagagttagtgtttaatgagtatagactttctgtttgggataatttttttaaaagttcagggaatggatagtagagatggctacataacagtgtgaatgtacttcacaccactgaattgcacacttaaacatggttaagatggtacatttttttgtgtattttaccaaaagaaaaaaaaaatttagggccaggcaaggtggcctacatctgtaatcccaacacattgggatgccgaggtgggaggatcacttgagcccaggagtttgagacgagcctgggcaacatagtgagaccccatctcttaaaaacaaatggtgggtgcctatggtcccagatactcaggaggctgaggtgggaagatcacttgagcccatgagttcaaggctgcagtgatctgtgatcatgccactgcgctccaacctggaaaacggagtgagaccctgcctcaaaaaaaatttgtatgataaagcacagaccatgtatataataaagatacttcagccatttgaaggagtgttgtgttctcaagccaaagagagaagcacatattatccccaaaaaacacacagttagcaaagcatccagggaagctggaagtgctggtgtttggtggctgaggttagtagatgtgactgctctgttcttggcaccccatgggtacttatcatcatcttcttagccaccactgacagggtcctgcttgacagactgaccctgtgctgtgtatatcacatacattatcactgaatttttgaaacaccttataaagtagacattattccaatttataggaatttaatacctttctgaaatttgctaagtggtgcagccagcacttaaagcctagatcagcagactccaataatgaagtattttcctcagtatatcccaaggatagcttttaagaataattgtatggacaatctggagtaaaaggaatatgaatttcttcatttaggttcagcaagatgccctgacaagatgaccacaaatgcaggaatgttggagtggtagttaatatttagatgagaaatcattaaagagtggaatagtaatgtgagtttctggggctacttcagtagggcattttggagctgattgagggggcaaaaattaaagccagaaagctcagtggggcaaatgtcatagtggccacagagaaacaaagtttcaaaatgagatgctaagtgagaaacagcaactgagacaagaagtaatgtttccaggatcacaatgggcataaggagaattgttcttttagactctgggtgagcttgcagtaatccaaggatgggtgatttaggccactgaactctggctctaagtacagctctaatccctaaactttcaccaagagggatcaggagaagaaaggggaggaggggagtcaggtgtgccacatatctgctactgaaaaatgcctggatgggaaaggagtttgaaatgttgtcctaaaatgaagtttctgagttagatgggctgaattttaccatgtgttcactgttattactgtgtaaaatcaagagatttaaatgagactaagatctaattagctttctgagatattgaaaactgagaacctggctgggcatggtggctcacgcctgtaatctcagcactttgggaggctgaggcaggtggatcacctgaggtcaagagtttgaaaccagcctggctaacatggttgaaactctgtctctcttatcagtgagaaccaaacctgagtctgcagtcttagggcaggggcccagacaatgacaggggctcttctctttgagacttgtcacctagaactcattgtcactggaagccagagcctaaatgacactatcagtttccttgggttacaagaacaagttttcattaattaattaattattcatttattttgagacagactcttgctgtgttgcccaggggctggagtacagtggcacgatcttggctcactgcaacctctgcctctgggttcaagtgattctcctgcctcagcctcccgagtagctggcactacagccacatgccaccacacctggctaattttttttattttcagtagagacagggttttgccatgtttcgaggctgggcttgaactcctgacttcaggttatccgcccacctcagcctcccaaagtgctgggattacaggcgtgagccaccacgcctggccaagtctgagtttttactggggaagccaagtagcagttcagggacttgtggccaccaactgtctctgagattcaaggtctattctttctactggggactgagatgggcggataaccatgcagacttaaggaggagtcatatgaatgattcagcctgggaggaagtctgagctagctataactggaggaataatttccctctgtaggaattcctgctctacctacttattataggagtaaagtggtcatgatttaaacagtcttgtctatacctgttatgttataaggatgtgttaatggccctatctgctaagagtgagttgttcttaaaaataaaataaaaattagtaaatttatacacacactatttgttatgcaaatcctaagagtgatgttccaaaaaaacaaattttggaagtaaataagtatataaataggctttttttttttttgagatggagttttgctcttgttgcctaggctggagtgcagtcatgcaatctcagctcactgcagcctccgcctcttggattcaagcgattctcctgcctcagcctcctgagtagctgggattacatgtgtccgtcaccactcccagctaattatatatatatatatatatatatatatatatatatttatatatatatattaatatatatatttatatatatttatatatatatatttatatatatatatatatatatattttttttttttttagtagagaaggggtttcaccacataggctaggctggtcttgaactcttgacctcaggtgatccacctgcctcagcctcccaaagtgctgggattgcaggcatgagccaccgcaccaggcctagaaaggtactttagatagtgccagagttgaggatttggcctgcgacttactgtagttgccacactgcagtttccacactgtggccttagaacagtcttatccagtcctgaaaccccagtgccttggaaacatcaggactggtcagaaggacagtaagtcctcaaggcatcagcctctgctcctcctgacagattgaggggtaagtattccaagctctctgcaggacccataacctggatgtggacaccaagtcctgctaggatctgcttccagaagagttgatcccagtcatgaaactgtcctgatgccttcatcctgtatcagcctcgtgagtagccagtagctgggaccacaggggcgcaccaccacacctgcccaatttttttttgttgagacgggttttgtcatgttgcccaggctggtctggaactcttgagctcaagtgatgtgcatgcctcagtctcccaaagtgctgggattataggcgtgagccaccacacgcagccaaatttgtgatcttttatgcattgtttctctcatgtagcatgttttcaagttttatccaacttgcagtgtattaatgctgaataatactccattgtgtagatatactatatttttatttttttaattttatttttaattggtacacaacaaatatttgtacatatttatggggtacagatgatatgttgttacatgcatagaatgtgttatgaccaatcagggtattaaaggtatctgccactttgagtatttgtcatttctgtatgttggaaacatttcaagtcctcttttagagctattttgaaatatactatacattgttgttaactgtagtcaccctactctgctatagaacattagaacttattccttctgtctaactgtattaaccaaccactcttccctgccaaccgacacacacttcccagtttctgttatctggtatttttgtagagatggggttttgcgatgttggccaggctggtcttgaactcctgacctcaggtgatctgcctgctttagcctcccaaagtgctgggattacaggcatgagccaccacgcctggcctttttttgatgtttattccacattgtgtcagtcctcacacgtctcctgggatccatctgacatgtaatctgttggttttccagcagtaataatttcacgtaaaatcctaaatctgacctgaaatattttctcttctcttgttgattatctttaaatcaactattttgatatactgagatattaactattttgatatactgagatataattcagttggttcatgactgtgccaatagctctatttttatatacaaatagacatgcctaaatccagttgtttttttttgtatgtacattttatttaattaatttttaacttttattttaggttcaagggtatatgtgcaggtttgttatatatgtaaattttgtgtcatgggggtttgatgtacggattgttttgtcactcaggtgataagcatagtacctgataggtagctttttgatactcaccctcctcccagcctccaaccctcaagtaggccccaatgtctgttgttcccatatttgtgcccatgtgtactcaatgtttaactcccacttataagtgagaacatgaggtatttggtttcctgttcctgtgttagtttgcttagaataatttttaagctggagctggatggcctccaggcttttaggcttttagactggattgctgcaaagggcatgatcttgtttttattttatggctgcatagtattctatggtatatgtgtgccacatttttttattcagttcaccattgatgggcacctaggtaaattctgtgtctttgatattgtgaatagtgctgcgatgaacatatgtgtgcatgtgtcttcatggcagaattatatttatattcctgtgggtatatactcagtaataggattgctgggtcacagggtaattctcaagttctttgaaaaatcaccaaactgctttccataatggctgaactaatttacatacccagaagtagtgtataagcattccctttcctctgcaactttgccagcatctattttttggctttttaataatagctattctgactggtatgagatggtatctcattgtagttttgatctgcatttctctaggattagtgatgttgagcgttttttcatgtttgttagctgtgtgtatgtcttttgagaagtgtctgttcctgtacttttcctgtactttgcccctcccttttttttagtgaggttgtttgttttttgcttgtaaatttgtttcagttccttatagattctggatattagacccttgtcagatgcctaatctgtaaatattttttctcattctgtaggctgtctgttcagtctgttgatagtttcttttgctgtgcagaagctctttaattaggttccacttgtctgtttttgtttttgttgcaattgcttttggcatctttatcatgaaatcttcacaaggtcctatgtcagaatggtatttcctagcttatcttccagggattttatagttttaggttttacatttaagccttttatccatcatgggttgatttttgtttgtggtgaaaagaaggggtccagtttcaatcttctgcatatggctagtcagttatcccagcaccatttgttgagtaggaagtcctttctccatcgcttgtttttgttggctttgtcaaagatcagatggttgtagctgtgcagctttatttctgggttctctaacctgttccattggcctgtgtgtctgtttttgtaccagtgccatgctgttttgctcactgtagccttgtagatggtttgaagttgggtagtgtggcatctccagcttcattctttttgcgcaggattgctttggctatcgtccacatagctaatcaatcacaagttgtgctaattttttctgctgtttctcaaatctgtgtctcctctcaattcttactaccaccctggtttttcaggccctcaacatctctcacctaagctgtgtagtaccctcctaactgatccctgacacttcagtgttgctctctctcctcaccactgaaagacagtctacataaaacaaaattatcatgagacttccctttttaaaatccctttttgactctctattgcctattaaataatgcctgtacttcttaatatactgtacaggcatctcctattactccctgctctacatttgttattgcagtaataggtaaatgtttataatttcccctgaagtccctctgctattcaatgcttccatgtatttgttcattatgatctttttctctgaaattcactccccactgtttctcctggtttcttatttattgtccttcacacccaagctcaagcatggtctttttcagaaaacctactttgaagttccagagtggaccaagggccacttttaatgttccccatagtgttaaactctatcatttcactttaaacatacttttaaacctgcttcctgagtgtaaagtttgttataattttaatatttgtatttttctatgtctttttcttctctttgtggtttctgttgactcctgcttatggtagtttgactcttcaactctgttaaattttagaattacctcatatttgtctaaactttaactttgggtatcctgagagagtggaattgagatgatttgcctggtttatgcttggttctggaagtagtaccaatcagaatccattctagtttgatttattggtttgaggtttcttggactatgaatatggtataaattcaaattccagcctaagagtaaagctgtttagaaaacattagggaagacttagaattattaatgtttttaaatctactgcctgcagactgatttgcttattggttcattgtcatatccttccaactttgtcttttctactaaatatatagccgattttggtccctggatttatatggaggtctcagactcagttccctactttgtcaggtttaaatcctgttagtcagttaaccagaaaaattctagatccccagcattgctgaacagattcccaggaatgtgtcagagcatttcaaagtcccctattgacatctcattcccagctttttaaaaaagaaagtattttgacgttcctattcattgccccgattcctatttgctaccgcaggcagccacaatgttaactaacaaagctctaggtttttggttttggcacacttccagggcatctctggcttctatgttgactgatgactttagtttcacctctagattgtgtgtgcatgtgtgtaatcattttgtacttccttcacattttgcgagttcagaaatatatttaaaagtgtatttggggctgggcatggtagctcatgcctgtaatccctttgggaggctgaggtgggacgataacctgaggtcaggagtttgagaccagcctgaccaacatggtgaaaccccgtctctactaaaaatacaaaacttagctgggcatggtggcatgcacctgtaatcccagctactagggaggctgaggcaggagaatcacttgaacttgggaggcagaggttgcagtgagccaagatcgcaccactgcactccagcatgggcaacagagcgagactctgtttcaaaaaaataaataaaaaataaaaataaaagtgtatttggaagtgatgtcactaaaaatggcaagctaggaaccttcaaaaattcctttattcataaaagcagctgggaaaaataaaagcaactttttcaggtctctggaacatatccaaaggcttgctgcaatcttgggagcatttattcaagaatgtaagctgaattttggtgggaatattgagctttgtagtattcttactttatgctcattatatccttccagctccatggtagccttgaaaaccaacatcctacaattttggtgaaaaacaagctcctgggagccatagaaaggaacaaaagggggttgggactcattcaaagccttattcccagagaaacgtcattatgggacctgactaggaggtccaaggaagaccccacgcacaaggctatctttatttggcctgacttagagctcccccagcctttgttcatatttgttgaagaaaatcagaggcaattgctgaacataatgtctacatggggtatagataagttgagatacacaatatgctaacaaaaaatgtaaacaaaggctgggcgcagtggatcatgcctgtaatcccagcactttgggaggccaaggagggtggatcatgaggtcaggagatcgagaccatcctggctaacgtggtgaaaccccgtctctactaaaaaaaaaatacaaaaaaattagctggacgtggtggcaggtgcctgtagtcctagctacttgggaggctgaggcaggagaatggcttgaacctgggaggcagagcttgtagtgagctgagatcacaccactgcactccagcctgggtgacagagagagactccatctaaaaaaaaaagtaagcaaaacaaagaaaaaaacaaatgctgagagtactaaacctgcttgctgtcagaagacatttctattcatgtcttccacctacaaatttaatgtatttcccatctcaactaagtacttatcatgcactgtagctgtaacttttgcagcttttgacagcaaaactggcacaaatgtctttgttcttcttcacaattttatgaatggaggatttttccttactgtaaatcttagcaacctcagcctataatatttttcttttcttatgatgtcagagactttcacctttttgcttaaaggaagcacactgtggcttctctctggcatatccaaattgccaggataattaccattgcatattgggccaattatgaagtgaaataagggttacttgtataccacccctgtgatgccatgacagtcggtgtgataatcaagatggctactaagggtctaatgagacttattaatcaagaattctatatgtagcaaaaatatccttcatcattgaaggagaaacataaggcattaagtatcttaggacatttaagacattcctcggtaaacaaaactaaaaaagtttgttgcttgaagaaatctctataagacatactcatgggagtcatttaggctgaaaggaaagaatactaggtagtaactcaaatccacatgaggaaataaagagctgagaaagataactatatgagtaaatataaaaggcggtataagcataaagcaattctcataaatgggttgatgaacatagagtatatgaagatatggtttataaggcattaacagcacaatggaagagagagggaatggagctacacaggaaaaagtttatatatactgttgtaattaaattggtattaatatgaactacatagttataaatcaacatgttaattgcaatatccagggcaaccactaagaaaacaactcaaaaatgtagtaaaagaaatgacaaataaataaaaattttacactataaaactatttagcataaatcttactttatcaatgattgtattaaatggaaatttctctccatttaaaaggaagaaatttgcagaatgaattaaaggacatgatcctactatatgctgtctataagagacatgttttagaccaagactcaaatagataaaagtaaaagtatagaaaaagataaaacaagcaaacagtaaccaaaaaactaactaaataaataaagagatggaatcatgataaaaaatcagaaaaaaaggacttaaaggcaaaaatttttattaaaaacaaaggacattttataataataagaggatcaatccatcaaaaacatataacagagccccaaagtacatgaagaaaaaattgacagaattgaagggagaaacaattcagcaataatagttgaggacttcaattccccacttccattaatagttagacaattgggcagaaaatcaataagaaaatgtaagacttgaataatactataaaccaactagatttaacagatatctatagcattcttcatcccccagcaacaacagagtatacagtctttataagtgcacatggaacattccccaggaaagaccatatgctaggcaataaaacaactctcaataaattttaaaagatttaaatcatacaaagcatgttctcaactgcaataaaatgaagttagaatagtaagagaacaaaatttgtgaagttcacaaatatatggaaatgaaacaatgtactcttaaataatcaattggtcatagaagaaatccaagagaaatcagaacatattttgagataaatgaaaacaaaaattccacatctcaaaacttatggaatgcagctaataccatgcttaaagggaaatttataggtgtaaattcttacattagaatggaggaaagatctcaataaataatttaactttccacctaaagaaactagaagaagaagagcaaactgaaaccaaagcaagtaaagcaaggatataataaattttagagtgaaaataaataaaatagcaagcagaaaaacaatagagaaaataaaaccaaaagttatttgaaaaggtcaacaaaattgatagctagcctgatcaagaaaaaaaaactcaaaaatgtggtaaataacttaggtaaataacaacaacaacaaaaaacctaagcccttagataatctgttaaagattatgaaaaaccaacagctaacattaaacttagtggtgaaagtcttaaatcttttctcctaagatgaggaacaagacaaggatacctgcttgctttttctgttcaacattatactggagattctagccaggataattagacaaaaaacaaaacaaaacaaaaccaaccacagaaaagaaagaaaaagcatctagattggaatggaaaaagtgaaactctattttttgcagataatgttttatacagaaaatctaaggaacccacaacaacaacaaacctgctggaacaacagttgagttcacaaaagatataagatcaatgtgcaaaaaattagttatatttagaaacattaacaatgagtaggctcaaaatgaaattaaggaagtgattttatttacaatagcattaaaaaataagaccaatacaaaagaaatgtaagactacaaaacattattgaaagtgattaagacctaaataagtggatacacattcggtatttattgaatggaagacattactattaagatgacagcactccacaaattgatctacatattcaactcagttcctatcaaaatcctagcttctctttttgcagaaattgacttgctgatctaagattcatttgaaaatgcaagggactctgaataaccaaaacaatcttgaagaagaacaatgaagttgcagaatccacactatattatttcaaaacttactataaagctatagtggttaaaattgtgtaatactagaataaggatagatatgtagatgaatggaatagaattgagagtccagaaggaagtccatacatttaaggtcaattgattttccacaagggtaccaagactattgagtggaaaagaacagtctcttcagcaagtggtgctggaacaactggatctccacatacaaatgaatgaagttagatctctttctcacatcatacagaaaaattaacctcaaatggaagaaatatctaaatgtatgatcccaaactatgatcttagacaaaaatgtaggtgtacattttttatgatattgaattagtaatgatttcttttttttcctttccttttatgtggaacaggaaagctaggggggtttagagttgtcttactgcttttcccctatgtcagacaaggccctgataaagcagtttttctttagagcaggtctttcacccagagaatagaatgccctgggcatatttcaaaatggttgctatacccactcactctctctatcctccaattagggtgtattttgaaatggttgcttttgccttttccttgtgtaaagagcctgaggaaattttcttcagccttcatcatgagaacctggtggggtttctggaagtaaaattcatgaaagtatgaggggcccccaagacgggactccaacaagtttttaactctcaagctagtccacactcagccaccagtaaatttattgattaccatttaagtgttcctaccaattactggctctgtggcttctgctctcaggtaaactgtggttttctatagtcacccatctctttagtgtttgaggaagtggtttccctgtgacctctattctcggacagatctaagaaaggttgttgattttcagtttgattatctttttttccattgtgaagatgggagtgatgacttccaagttctctacgtgttggagtgggaactggaagacctaattaacttcttaagaaactgtcaaactgttttccatagtggatctagcactttacattcctggcattgtatgagagtttcagtttctctctttgtcaacacgccatctttctaattttagatattctagtaggtatctagtggtttcttattgtagttttaatctgcatttctctaatagctagtgatgatgaccattttttcatttgcttatttgccagttgcaaatctttattagtgaagtatctgttcacatattttgcccattttttaaaagttgggttgttttcttacaattgaagtttattttttcttatactcaaaattttaattgccacataattaattgtacatatttatgaggtacaatgcaatgtttcagtacattttacattgcataatgatcaaatcatggtaattagcatatccattgccttaaacatttaccatgtctttgatgtaagaatattcaaaatcctctcttctagctagaatatgagtgtattttaaatgtacaactatttgttttctcacaatcctataaaatgatagcttgagtcaatgagttatccccccaagtcctatcaatcttgtcgatttttgtgaaatttaatattgtctagaaaacactaaacaaacatagttattcagagaggataactgagccctctggttattctctctaacccacaaaggaagctgaacatttgatgtaaacttcttcatcagagtaaataataagaatcccctccattatatacaaaagaaaaaataactggagagatagtctctgttctgaggttattatgctgtggtctttggttttggtacattctcccccaccccatgcccttctccctcatctttaatgagtgtctgtatgtatggcagaacagtatttttttttattattatactttaagtttcagggtacatgtgcacaatgtgcaggttagttacatatgtatacatgtgccatgctggtgcgctgcacccactaactcgtcatctagcattaggtatatctcccagtgctatccctcccccctccccccactgcacaacagtctccagaatgtgatgttccccttcctgggtccatgtgttctcattgttcagttcccacctatgagtgagaacatgcagtgtttggttttttgttcttgggatagtttactgagaatgatgatttccaatttcatccatgtccctacaaaggacatgaactcatcatttttatggctgcatagtattccatggtgtatatgtgccacattttcttaatccagtctaccattgttggacattttggttggttccaagtctttgctattgagaacagtgccgcaataaacatacgtgtgcatgtgtctttatagcagcatgatttatagtcctttgggtatatatccagtaatgggattgctgggtcaaatggtatttctagttctagatccctgaggagtcaccacactgacttccacaatggttgaactagtttacagtcccaccaacagtgtaaaagtgttcctatttctccacatcctctccagcacctgttgtttcctgactttataatgattgccattctcaaagaacagtatgtttttaagtctctgccatcttgggccaagctcgttctattcctcactctacaagaatcacaagagcaccaggattctgtttgggttgccatggacacagcgttcttattacagaactgacttattctcaatacgagataaagacctagaggtgaggtctctgcgcaagggagtcccatctcatcctctgccctctctgttggctaatgttgtcctctcatcttcatcaggagaattaaaatcatgtaaagttttggcggggaaactagatggtggtctctgggcccatagactggaaagtttgcttatacccagctggggggaccactaatttacattcatttcccctcccagggaccttacagagtccccttaccctcagggtactgggggacaaccagtgggtgtaaggtcaaatagcaataaccttgttacttgccaggaattgagtcaagatttgatttaacaagcttggttttgggaactaaaaaatgaaaaaaggaaaagccgtaatcttgaaaggcaacaagagagaaaactgctaacaggatcttgattaaatttctccctcttagagaatgttgtaccaactacacaagacctcagacttgtgttattctagcagctgaacacagaccaggctcttctgactggcaatggctctgaaagcagtctggtctataggtaagcaggtccagggcttacagggagaaactcccagaaatccagctctgctttgggttgccccagttcatgtccaaagatgtgcttgggccacatctctggagcacaaggtggtagactgagagctttgatatttctactcctactgcagatgagctggtgtaactctgaaggtatggaatttgctgttgtctgtgacccagcaaataaaaatagaaaaataattagatagaaaaataatagaaatagaaaaaatttaaaaaacaaaccaagcctcattctatgcctgttaatgtccttaaaaatatgacattttaggcagtgtgataatatgcatatagtggtcactttaatctttcctacaggggaggcaggttgccctaatggtggctgctctgttcgaggatggtgagctagtgttcatttcaggaagccactccacagagatggccaccaaaagggcttcagtgatctcatctcaattaacacctgaaacattgttaattattacagtgaaggtcacaaatgagtttttattagtgaaattggtagcttacaaagcagcatgatggatgttacaattatacgacattttaaggtctgtgaatcaactaacgtgttttggagacagcccacccttgcataagcaggataaaggtgtatgagggtggcctgtagtgtatatttagagacgacatccaaggcttgatcctcatatggtcctatctccaggaasgtttaggaagattttggcctctgaaacattaggaatctgttgagattgaagctttcatgcttggagcacctaaagtgcagaaagcttacagaagcttatgtactgtgcctgtttgctactgaatgttttgttaaatgaatatctgtatgtgtggtagatttggtcggagacctacttttcattataacctggtagcatgattataaaggtgtagctaaccttcacctaactcaaacttctgtggtttctcctatctaccaaaaagcatttaagaattctgcatgaccacttacttcagtttaggacagtttgcaattctcaccttccttagagggcaatttagctagttacttattcatgtcccatgagggaagtcattctgtgtcccaaagcagcttatcaaagtattatttcaggattcatttaatactctccctgaaaggagttcaggtaacatctatggatgtctcctgccctttttggagattagtttcccaaggaacttgcttagcaatccttgcttgtcacctgaatctggagtaatttgagtgtcttccagttctcttcctcagtagaggatgtctgaaaaatgtagtaatcatttaataagggtgcttatgtcaaaaactcaaattcttacctttttgatgttttgaacattttccccattatgatttattagtgtattctgcatagacaatccaattattcatcctgctgaaaagtagtggatgcctatagatgcctttctttttgtaaaaggtattgtttttcctgaaacctggatgaatttccaggagccattcaaggacatgagaacacccacttagaacttgaaaggttcccctcatggccctcagaccaggctaatgagatgcgataatttgaactctggcactcctttcctcacaggctgaaagactagcacaatattaatgtctatctgtgcttaaaggttggagctattgatcagagtccaaaattagtttgtgtaggagaacttttcttaaagacataaaaagataccatttaatatattgtttccaaaatgtgtttctcacacatttccactgtaagaaagaggttctgtggtcaaataagttaagaaacctcagcacactcttagagaatcccagtttttatcagcagcaaaaaaatgcatgtgatcagtttcttaaacttatttaaacgtttgaaaagttagaaaattgtggtgaagagcattaattcttgagtcttgggagtgtattaccttgatgagaatgtttgtgtatttgaaattaaaaatgtgtatcagtttatattgccacatactgatttttatggcataatatatggtgtasagagcaggttgtttaaaaaccaatattggcaaaatgctgaatattcaacatggttttatgaagttgacagatgtggagtgtattttgcatgtgtcttaacttacagatgaggaaatgaagttgcagagagattaaattagccaagccaggggttttggtgctagtaagtcttgatattgtaaaatgtagccatataactttaaaaaaatgaatccagaaaaaaagaaaacaaaatcattgtaaacacataatccactttaagttcacaaaatgttttaaacataattaaggctatgcttgacttacctacttgtttatttcctaccaaggatgaccaggaactagccattgatatagaaacattcattattcttacattttctttcttttttctgtgtcctctctctctctctctcacagacacacacacasacacacacacacacacacacacacacacacacagtctcagaagtactagtgctgtatcctgaaattgttttagttcttgtcaaaattcctccgattttattttttgtgtcttgaaatactgttgaaattaacatcctcattgccttccaaaatatctgactttatttttttgtatgtgatttttactctttggtagagttatggattcactaacagattctgctttatgctctgacaactatgaccacaatgggtgagttgacttatctaagtggtaaaaaatactgggagcatcaatggcaataacagctttctatcagagactttaagcatctttggtaacattgtttttgaaccagagtggaaaaaataagatcaggtcagaagagggatgcttggtactcaaagattgtttgtgaccccaagtaattagcagccaaaaccttaggaaactgtcagaatgcctgtgtatgagactctgtcaggagtgatccaaaagagttagggaatcctacttggagaaagaaagtggtagcattggacaggccccagaggagccctcagcagaaagaaaggagctaagagaccctgtatctatccctcacccttcagagctggtgccccgaactcaaagccatcatcacattggatggagcccctgcctcatgtttagtcacttgatcctgattgaggggaagcaaagatatctgtgactcatgaagagcatgaaggtggtggagggacttgataattgggaaatcaaaatgggcaagaatagtgtgtgcctacaaatcggacataaatttgaagcaaatttaagttaaatttgctgccacacatgatgatcaggttcagtaataaagaattgtatttaaatcttgattcattaaacttttttgagagtcctaaacagtttttattaccaacacataaagacttctttctagagaaaaatcaagtaccaggtgccaaataacagatttacctgagaatttttaggaacaacacattgcaatttgtagcgcaatcatagccaatttgaatcaaaacaaaacaaaaaaagtcgtgtatgcatttatgttgtttcttrctatttacctttcaatcctttgcactgacsccaatgaattgacatcagaaatctgtgctggagtcaacaatgaaaggtgatgtcataatakatattggagatgggaggaattcaggtttttgaaattcagtctcagaattattcatgggaaaatagttttctggacactgattctaaaattctttctaaaaagttaggtcttaagtaagctaattcatatttaccatattttttagatcaaggaattttgttgttcacataaattggtcatatcattgctccatgtggcaaatctctaatatatttttgcatttgatgtttgaagtaaaatgcagcaaccttacatagagctttataataagcttcatgtgttcaaatataattggtacttttataaccgatgctgttgtgttttacttagaatgttatttcttatcgtaagattaccaatatagtccccaaaatatttttttatattttgaattaattgtctacatttaaataaaacaagagctgctgctgttgttactattcccttttaacrtctccccaaattagtgttttattckgtacactttatgagatggcagcttaacaatacccttaatatggcccaaggattctacaaaaggaaatgctggtgtgtttgtcaaaagtgttttctggctgggcatggtggctgaagcctgtaatcccagcactttgggaggctgaggcaggtggaccacgaggtcaggagttcaagaccagcctggccaatatggtaaaaccctgtctctactaaaaatagaaaaattagctgggcgtggtggtgcatgcctgtagtcccagctacttgggaggctgaggcagaaggatcacttcaatccgggaggcagaggttgcagtgagctgagacagcaccactgcactgcagcctggatgacgagcaaaactctgtctcaaaaaaaaaatgtttcctgtgcagattatctattcacacttgcagatttgaagtttactaagcatgtgtgatatctaaaagttcattcgaagaaaaagttccaatgccaaaaatgtttaaaagtgggatataggaagatgatgcaaagatggaatctccaaacatttccattttcaccaggaggacttaatagaatgtctaacagctacttttagatatttttgaaatgtgagaggggttagttaacacaaagtagactgtgagattaaaatgtctattcattctaaaatctcagcattcactttcttattgtcaagttattcatcagactcttttcagagacaacctaaatgcaagctcttagaatattacaacatcttttatatgagatgacaggaaataatttcatggctttttaaaggatagatgagggatttgaataccactttcagattaagtaactcctctattgaatactacactgttttacagttcatatctctatcatggttgagaggtattgccagatttattcactgacaagtaaatattattcagtttataattagtatccactttgtggggagatactttcagtctatgttaaaactatcttcaatgttcagtatcctgttgcacataaaactttcatgcactaattttagcattcattgatttttatgtgaatcagttgtaactgatcattacaaaatggtgatttttttttaaaaatgtagtttttctgtgtttaataagcatcattctattataaggagagctattcctacccctatttattcactattactatgaacttataaatccttaacattatgtcaatgaattacaatcctttctgtcattatttattttgatgtttaaatggtcccatatttggccaatgggactccctaaaatctagcccgtttgtccttttgacttgacatgttcccatcactttttgagcatttccccagccctggaatcagccatttacccaaagaacctgatgtcctttggaaaccaatattttgcatttggtatgctcattgccattggctcattgctacttgtaggcctttttaatatctagatgagagtacagatatacatattgacatatgcagatatatgcatatatgcaacaattttaatgtgtttaatatacagtatatacatttatatgtgttctgtaaactatgtattattgttttgcctatatgtttttaaatttacttaaatggtattaagttgtatctcattttgttagttttttgctgagtaacataagattattcttcttgtgcataccttttgttattgcttttaactggtatgaaaaattccacagcatgcatcccctagtgaggaacacatatatggcttcctaccatttgccttcacaaagagtgccgctaaatgattatccttatgccagacccctatagacctatttgagtatttctgtaggaatatgaaacaggacttgatgggccatgggattgcgtattttgaatttgactgaatactgcctattgctctcacaatgcttataccagtctgcatctcatgaayaatgtatgatggttcctacacatacacattcacaacaacacttgacattatcaaactttctaatttatataatcagtctaataggtcataacatattgcattatgttttactttgaatttatgtgataacttatgaatttgagcattatttttttgttcttatagcatttgggatttcttctgtaatggtccattcatgaacttagaccatttttccgctagtattcctatctttgtcttgttaatttacatgtgctgtttttgaatattttatattttagaataagttaatcaaatttcttttaaaatcatgtttaattttcaaagtgattatgttacatttgtaaacaatatagcaagaattccctctttttagtaacattaaaaacatggtactattgtttggagatttgtagccccaaactgcatgttgaaatttgatccccaatgttggagggggcctaatggaaggtgtttggaagataaatagattaattccctccctgggagtgagggtgagtgagtactcactctgttagttcttgcaagagctggtggtttaaaaagagaccagcggcttcccccaccttgcttcccctcttgccatttgatctctgcacgtgttagttcccctttatcttccaccatcaaagggagcagcctcagaagcagatgttggcatcaggcttcttgtgcagcacacaactgtgagccaaataaacctcttttctttataaattacccagcctcaggtatcccttatggcaacacgaaacagactcagattcatggaatcccattcaaaagtttggactatcgctttatgtattcaaatcatccttcatgtcaattttagacattgaagttatgttctctaatccgtcatctgcctgttagctttggcattgttgttcttcattctctttatgacagaactttttgccttattattttacttttgaagtttgaaattttcccactttcagtctacaaaggtaatttctaatcctcatagttttaatttacacatttaatgctttaatctacttacagtctacccttaaatatggtgttaggtrgggatttggtttcatttktctcccartggtaggctgattttccaagtaccatctatgaaacaggtcatcctttttccttgtttatataatcatcatcaatgacatatatcyacataagtttatctctgagctcaatattttgctccattgatacttatggcatccctacacctttttttattaccatgattagttaagttattaatggagcctttrtatgttgacgtagattttgtagtaagtatgtcaatattctaaaaaattttgtaaaatacctatgtgggccctgtggtgtttgggagagggaaggggtttaaatactaggttgatttctttgttacttgagtattctatttctatataaatatattttcttgyactaatgttagtgttttatatttgtctaggaatttttccattccatctaagttttcacatttattagcatataattgaataatctcattttaaaaaatgttagttgtgttctagttatgctcccttcttgtacattttatttggatattcactctgtttgttcttgattattattgccacaggtctattgtagtaatcttttcaaagagacacacttttgttttgttaatcttctccacggttttttcttctccagttcagtgtcgtatgcttacctccttatgttttgcttccttattactccatagactttgccctgtgctccttttccaacctctctacttaaatgtgtactctttgcttttaaccatcttgacttcttattaatgcttatatatcggtaaattttcttctaaatattccttcattgtatcctacaaactttgtcatgttattatcaatcagttcttagtatataaaatattttgtgatatcccttttaacataagaggtattcagtaatgtgtaatttagtttcaaatgtgggttttttttttaaaagctaatcatattacagtatattcagagaacagcaatatgatattgatcctgtggactttatcctgtggaagctttctttatggtacagagagctatgatgttggtctgtccttgtgccctcataagtcttttgctctatctagaaggtgttagaattttctcttagtctccattagatacttaaagctgatttatttcttctttcttgaattctgggaaatttatcatcataaattttcacattttattttgcatttttagttttcatttcttcttagatttccatattctagatgttagatggctgtttttatcctctctaacattcttcttttctctaatgtgttcgctttattcttttctactattttctgggtaagtttctcaatcaaatcttctaactctaaatttattagcttttcacaggtacccaaactactatttatccctcaacaatttatattttttttgacagtcatacttttacagttaaggctttctgttttattttttcttaggactcccattctcatttcatatttccacatcttcctttgtgtcctcttatcctkaagaatatttgtcatgcttactttaaaatcttggtcagggtgttccagtagttttgctacagtaggtatgctgttgttcagcttgttgtatttctttttcagtagttgtattcctcaggtatctaatcatgttggtttgtgaacacagattttttgtggctattggctactctggtcatttgtattggggaaggactgaagtacaatctcagtctgctgctgttcttgcaacataattattaatggcacccactttttcctttcaaaagtgtcctggtttgggcaggaattatatagtcagtctgactgaaatctaggacgtaagctgcgtcattgtcagtaagtttaaaatgaagagaagtgatgcgccccagggtagagagtctcaggaatcatgaaacactgaccaggcaactcctctgggttgtgaaaaggaaaaactttagacaaggtaaatttaagagtttaatagtgcaagaatgattcatgagttgggaagcttttaaaatcagaacaggttctgagaactgcaaactggcaatgtggccagacagcattatggacagaaaatggaagtgaggtccagaaagagctttgttgtttacaactggttacagctggatgttttgtcttatttgaatcagtcagccacccacagttgactgaagctcagctgctgtaattgactgagacagagctatctgttacaagtgtatattctattcataattatgctgttagtttacacactaggttagcttgcagtttgttgcataaggactcaagtacagaggcaacctcagggaaaatttatttaattaaacaactgtatcaccttgaagctccttaacaaagcagcattggaggagacaatctctctggtttgtaacctgggctttggagatggaggcaggtggaggagtgaaggcccaaggatggctcttcagcccttccctgttttcatcagccagcctaatgctctcctaattttactgtaactactcctgggtagttgctgttgctgtctatggagacaggcagggatggtcactattgtttccaaatggctaaattgcatgtgttgtgttttgttttgttttgctttgttttgttttgttttgttttttagaacagctagtttattagttgtagggttattgtagctaatttgaataaaaattaagcctacaaattcacatgctgtttgattatgtacaatttagtttaattctttagctctgacccaaatgaagtgatatcactaacccatgatggagtcctcagtgaaagtgaaatgatatcactagcctataatgaagtcatgagtgaagggtgttgtgtgagtgtgtgttcataaaaatacacccaaatgttaactatagagtttctgggacactgtttctaaagtactggtagtttcagcttctgtatgtaacatccttttcttttggggtctagttggatacaagataaatagatcacaagaagtctacttcttcttcctagctgagttgactattagccacaacttttagaaaactgttggattgcctgtgtatgagattctaccaggttgggctatattagtttctagggctgctttaacaaagtatcacaaaccaagtggcttaaacaaaaattaatgatctcatagtcctagagactagaaatctgaaattgagattgtcagtagggttggctttttatgaaggctataaggaagaatctgatacctctttgctagcttttggtggttgctggcaatctttggcattccttggcaggtagactcatgtctagagtaactgcagctatttgaccaaaagtgtaagtccaaattgtgtttttatctgaataatatgcgtttataattccccagcccacagccaattgagttgatggtagtaacctatgatagagccacccatgaaatgtgaattaaaaacaaagatttatatacatgtaagtgtatatatacatatatacacataagatacatgcatgcatacacatacacacacagaaacataaaacaatgaaagagaaagagaagttgatatttgtaaaattcactgtcaggcatatccttggaaatacagagtatcttttacactatgtctaaatcttctcactgtaggatctatagataaccttctatttttttttcagaccaaattggataaaagaggatgaagtcatgaaagggatgcttcttcctcttagtatatttgtcactctaagttagtagtatccaatcccttaggaacctctgaggttttccacttacgagactgtcctactactagagtgggccaaagggagagagaatcctatttggagcaatggggaggtaacaggtgacagggaggagtgaggcacacagcaaaaagaacagagttcatgaaaccgtaatgggttcctcaccctctagagttctaccaccatgtgaggctggtgccccaaaccaaacccaaacccacaatcattttgtagggagttcctgactcaggcctacagctacatggtcatatcttctgggcaggaaagatagccatgatgggtgaaagtaaagaagtgacagaaggacttaggaatcaagcatttagatggggtaagaggcatgtttccttacagactgcagttacattagaaataaatgccactggcaggcatggtggctcatatctgtaatcccagcactttgggaggccaagacagctagatcacttgaggccaggaatttcagaccagcctgaccaacatggcaaaaccctgtctctactaaaagtacaaaaattaggcaggtgtggtcatgtctgtaatggtgcatgtctgtaatcgcatctactcaggaggctgaggaaggagaattgcttgaacctgggagacggaggttgcagtgagccaagatcgcaccactgcactccagcctcggtgagagtgagactccacctaaaaaaaaggatacacctagtttgaattagtgatatacacatgaatatttaaatattaaccagatagtacattatagggtaaatgtagctgtttgatccaaaaagtaagtttagaattacatgtgtgtccaactatctacgtttatattcctttagcctgcatacagaattgacatcaataacctatgatagaaccaccaatgaaatgtgaattataaaatatatatacacaaatatttaaagaaatatatatgcagttatacatacttctgtcaatctagacacacaaacacagggagagagagaaagggagagaaagagaaaagagagagagaaacaacagagagaaagatgaggattatgttcttactctcaggatcatccatggccatacagaatgtcttttacactgtttataaacctcctcactataggccctgctggccccttatccagctttttgattaaattggataaaaaaggaacagggcaaaaaagggaaacttcttgttattgtcttgtcacccttagtagcaggcacatacttaggaaagtcagatttcctgtgtatgagacatactagagtggaccaarggaagaaaaycctatgcagagcaacaagcgagtagcagtggacagggagcagyggagcccttagggaaaaamaaacagagctaatggccctggcagagttcctcacacccagagctctaccaccatgtgaggctaacactacaagcccacacccatcatcacattgtatggggcagtttcttgaccctgtgtgagagcagaggagacagctatgatggtgaaaagaaggcactgatgaagggattttagtgtcaggaaatgagatgaggtcaaggggatttgtatatagaaactgcagctgaatttgaaataaagtaaaccaccaaatgcttagtttgtgcttcatttagttgtaaagaactaaacatcgcttgtgagtaattcaaaccagaaagtgaagtctaggatgtcatattggtgttggacgatacatatatatatttaaattctgtagcactgccaagtctaaattcaaatcactaccctggaatggagctatcagtgaatagtgagacagaaataaatcaatatagaggctgtgcacggtggatcacgcctgtaatcccagcactttgggaggccgaggcaggtggatcgagaccatcctggctaacatggtgaaaccccgtctctactaaaaatacaaaaaattagctgcgtgtggtagcgggcacctgtagtcccagctactcgggaggctgaggcaggagaatggcatgaacccgggaggtggagactgcagtgagccaagatcatgccactgcactccagcctgggcaacagaggcagactccatctcaaaaaaaaaaaagaaaacgaaataaatcaatataggtataaggatatatgaacaagggaggaaacaattatataccatttatatatacctatatgcattcatattaaatcaaggcatgcacccacaggtacwgcagagaaatataaaggttgagattagggaagttcccattcaaggacattaatggaaaaacaaaaaactttgacacatgtgtttatgtgatctcactataggatatgaaggtgactttatgtcttgaatgaatttagataaaagatgaccacataaaaagaagaatgatttttcttactagtctgtttgatactcttgagtaaaaataaaaaataattttcagactgcctatatgttagaccttactataatggctgaggacagcagagaatcctctttggaaaccggaaaggacagcagggacggagagtagtgaagacctcaggagaagagaaaaaagctaacaacgcttgaactgtttttaaccctgcagaactctgccacaatacagggtggtactcaaaaccccaaataccatcatattggattgtgtccttgactcagacctgcagttactttaccctacttgtggaccaagagagacaatcaagtgaagaagtaatggagggctttcaaggcagcacatttagtggaataagagggctgactacctccacacaaaagtttagtttgaaatagctgccaccacaaaggctgtcacacattggtactgaggtcataataaagaggtttatttaaatctgaaagcattactattttccccagtctaagatgttggttgccatcatataaatcatcctttctaataaaaaaatggcatttcagaaccaaatagtgctatgcacatgaatagtcagaacttaactggtttatgtgcagagtaatgaaagctagttttaccagaaaagtaaattttgaattgtgtctcctgtctgactrtattcttttgwcgtcctctagtccacccacaaatgaattatcaggtgtgaacccacaggcaagtatgaatgaaaggtgagttatgcgtaagtgtttctttctttatctaattataactgagcatagtagtattcacacacacaggcgcataaacaaatatatccatccatccatccatgcatccatctgtacacacttctctcaaacacatccactaacaaacctatgcacacaacggaaacatacaacaaggagacagacggacatttgtggaatttattctgagaagcctgcatggccatagagagtggtttttaacaggatttccaattcttctcatagtagcctttgtaggtaacattgcatccttttctaatggagtgatataaaaagcagcaggtcataggagagctgctgcttcctgttagtgtatttgtcactgttagttcctagtaagtagcwkcttaaaggactcaaatttcctgagtttgagagcctaccagattgacagaagggaggagaaaatcctrttcacaacatggaggagatagcagctgacaagaagcagtgaagccctgggcagaaaagaacagagctaatagaacatgaacttgtctttcacactccagagctctgtcaacatatgaggttggtgctaaaacataagcacaagcacacaatctcattggatgcagcccttccttaggcccacagctacttgcctgtgtcccatggacaggaaagactagcatgatgggtgaaaggaaagacgtgatggagagatccaggaaatgggccatagatgggattagaaggaggaatgcctacacagtggagttgaatttaaaagaaattcacccacaaaaggctgtctgtcatgcattggccagctccagtggtagagagttttggtgaactcttgagtcagtgagtcttagatacgtgtaaagtatgtgctgcaagcatataaattatgatgtgtagggtaaatggcatggcagattccaaagaaccaaatacacacatgacttctgtaatggtaaggcaatttacaggttgaaaagtagttggaagttcgggtgcggtggctcaggcctgtagtcctagcactttgggaggccagggtgggtggctaacgagatcagtagttcaaggccagcctggccaacatggtgaaaccccatctctactaaaaatgcaaaattagccagatgtggtggcgggcacctgtagtccctgctactcgggaggctgaggcaggagaattgcttgaacccaggaggcagaggttgcagtgagccgagatcatgccactgcactcaagcttgggtgacagagtgagtcgaaacaaacaacaaacaacaacaacaaacaaaaacaataaaccaaaataaaagaaattggaattattttgaactgaaaaccttaagtctaggaagttacatgttgtcttagtatgtacatgttaagttctttggcatggccctgtgtgttaattgagagtaccttccagtaggctggccaatgcaccatgtaatatcaaggaatagagttatacatgtatctatgcatatacaaacacatacatacatgcattcrtacacacaagagagtctgagtagggctattgagtgtgacaagcatccatgggaacaaggagttcccttgaaactatttctagagtcttctcagaatgagctttgtatgcaatattgttttttggatggaggtaggaaaatggggaggaactcatagagggaggctttttatgttagtgtttgtcacattacctttatgtgagaatgagactgtgctagtagtgtggaccaagggagaagtgaatcctgcttgcagtgagaaggagataggagtggacaaagatcagagaaatcccagccaaaacaaagaaccgagctaataaccctggaattatttcaccccctccagagctctgctgttatgtgaggctgactgcctttgcccatacccaccctcacatgggatggagccctttcttgaggcctctagctacttggccacaactcttgggcaggaaagacaactaggatgggtgaaaagtgaggaggtgattggaggtgatagagaatgaggaactcagatgggattataagaacggagactcagaaactaaatttgaactagaattaaatgctctccaaaaatgctgttacaccttgaggtgtagatacccttacttaatctgcatgcatcggtatgttcacagcctaaaattctcactgttggcatatgaaacctcatttctaataagacaaatgccatcccaggtcaatttagtgatatacatacatgtgaataataaaaatgtaactggggaatgacacatagactaactatagctatttgttgcaaaaccttagaattaagcattgtgtctgactctgaccatatttgtcctctagtcccgatccgaatgacctggtgggagtcatcactgagcgcggccccagtgacaggtgagttataaaagatgtacacatgaccaggtgcaatggttcacacctgtaatctgagcactttgggaggctgaagcaggcagataccctgaggtcgggtgttcgagaccaggctggcaaacatcatgaaaccctgtctctactaaaactacaagaactagccaggtgtggtggcagttgcctctaatcccagctactcaggaggctgaggcaggagaatcttttgaacctggggtagtggagtttgcagtgactgagaacatgccactgcattccaccctgggcagcaggagcgaaactttgttgcaaaaaagaaaaaaaaaaaaaagatgtacacacacacacacaaaacagtgacagagaaagagaccgagattggtgggattaactcccagatgtgttcatgataatacagggtttctttgacacaggttctttatcatctcactatatcatgtatagataacttccacatttttacattgtttagaaaaaaagaaactgactatagagagaggcttccatctgttactgtcttgtcacccttagtaagtagcaggcaaatgctttggaaaagcagattttctgtgtaccagacacaccagagtaggccgagggaagacagaatcctgtttagagtgaggagtaggtaggagtacttggggaactgtgaagccttcggcagaaagcaacagagctaagagccttggaggtgttctccaccctccagaactctgccaccatggaggctggtgctccaaacctcaaatcaccatcctattggattgtgcccctgtgtcagacctctagttacctgaccctttttgtggggcatgagaaaccaccatgctgagtgaacataaggagctaatggagggccttttaagcgggacattgaatggaataagagggctgactacctacaaactggagttgagtttgaaataactgccaccacaaagtctgtcacacattgggactgaggtcataataaagaggtttacttaaatcgggaatcattactattttcccccacctaagattttggttgttgccatataaatcctcatttctaataaagagaaaaagacattccaggttccaatagtgctatacacatgaatagtcagaaattaattggtttctgtctagagtagtgagaggtaatttttccaaaatataaattcagaattatgtcttctctctgactgtattctcttattatccgctagtccacagacaagtgaatttaaaggagcaacaaaggaggcacctgtgaaagaaacgtgagtaatagatagttaaataaagttacccatcagcataagtgtgcatagaactatacacacacacaggcacatgggcaaatatatccatccatccatccatccatccatccatccatccatccattcatccatccatccacgcttctcttcaccacggaaactacacaaactaatccatgcacacaatggaaacctaaaataaggagaaaggaaactgatagacatttgtggaatttactctcaggggcctgcatggccatatagatttttttttaacagagtttccaattcgtctcattgtagcattttttagtaactttgcatccttctttgatgaagttgtataaagaggagcaagtaataggagagttgcttcttcctgttagtgtatttgtcactcttagttcctagtaagcagttttttttatcggactcagatttcctgagttgagaccctaccagattggcccaaggcaggagagaatcctatttgcaacacggaggagatagtggccaataaggagcagtgaagctttgggctgaaaagaacagaactactggaatgtgaacttgtccctcaccctccagagctcagtccacatgtgaggctggtgcccagacccaaccccaaaccaaccacctcactggatgcagccctttcttaggcccgcaactacttgcctatatctcatggacagcaaagactagcaagatgggtgaaggatggaggtgatggaggcattcaggaagtcagcccttaatgggattagcaggctgaccacctgcacagtggagttgaattgaaaagaaatttaccctcaaaaggctgacatgccctggtcagcttcagtggtagagaattcagttaaatcttgagtcactgagtcttggatagatgtaaaatgtgtgctacagttatataaagtatgatgtgtagggaaaatggcatggcagattctaactaaccaaatgcaccagaattctgtaaggttcaagcagtttacatgttgaaagttaattggaactgtttttcactgaaaacgttaagtctgggagttacatgttgtcttactatgtatgttttaagttctttggcactgctgtgtgtgtgaaatgaaagagtgtcttgtggtagactggccactgcaacatatgaactacagaaatacaattatacatgtatggatgtatatatggacacacgtatacatgcattcatacccacaacatgcagaaagattgagattcgggatattgactctcatgagcatccatgtgaatgaggagttcccttgagactagttttagagtcttctcaggatgagctttgtgaagaatattcttttgttatttggatggaggcaggaaaatgtggaagaactcacagaaggaggctttttatgttagtgtttgtcacttttagtttctgtgggaatgagactctactagtagtgtggatcaagggggaagcaaatcctgcttggaaccagaaggagatagcagtagacaaagagcagagactccctggcaaagaagagaacagacataatagccctggaagtattccctaccctccagagttctgccactatgtgaggctgccactatgcctgagcccatacccatcatcacacagaatgcagcccttgcttgatgtcttctgctacttggccctaactcttgggcaggaaagacaactaggattggtgaaaagtgaggaggtgattggaagtgaatgagaatgaggaattcagatgggattataagaaggagaacttacaaactaaagttgaactggaattaaatcccctcaaaagagctgttacacattgaggtgaagatacagtcacttcccctagatgcatcgctatgttcacagcctaagatattcactgttggcatagaaaaccttgtttctaataaaaaaaagtcataccaggtcagtttagtgatataagtacatgtgaatatttaaagtgtaaccagaggggaataactcatagagtaactgtagctatttggtgcaaaacatttagaattaggcgtcgtgtctgtttctgaccatatttgtcctttagtccccatccaaatgagccaatggcagtcatcactgatggaggcatcaaggacatgtgagttttaaaagatgtactcacacacacacaaacataactatgacagagagatagagacagacagagagagagagattgagattagtgggatttagtctcaggagtgtccacagcaatagagtgtctgtgacacagtttatttatgttctcactgtagcatgtataggtaaatttccacatttttacagttgttttggaaaaaagagaaacagactacagaaggaggcttctgtttgttactgtcttgtcacccttagtaagtagcaggcaaataccttggaaactcagatttctgtgtatgagacataccagagtgggccaagggaagagagaatcgtgtttggagtgaggaggaggtaggagtacttggggaactggaaatttgaagccttcagcagaaagcaacagagctaagagccttggaggtgttctccaccctccagaactctgccaccatggaggctggtgctccaaacctcaaatcaccatcctattggattgtgcccctgtgtcagacctctagttatctgaccctttttgtggggcatgagaaaccaccatgctgagtgaacataaggagctaatggagggccttttaagcgggacattgaatggaataagagggctgactacctacaaactggagttgagtttgaaataactgccaccacaaagtctgtcacacattgggactgaggtcataataaagaggtttacttaaatcgggaatcattactattttcccccacctaagattttggttgttgccatataaatcctcatttctaataaagagaaaaagacattccaggttccaatagtgctatacacatgaatagtcagaaattaattggtttctgtctagagtagtgagaggtaatttttccaaaatataaattcagaattatgtcttctctctgactgtattctcttatcatccactagtccacagacaaatgaatttaaaggcacaaccgaggagacacctgcgaaagaaacgtgagtaataaatagttaaataaagtcatccgtcagcataagtgtgcatagaactatacacacacaggcacatgagcaaatatatccatccatcgatccatccatccatccatccatccatccatccatccatccacacttctcttcaacacatgtacacaaactaatccatgcacatgatggaaacagaccaaagagaaaggagactgatggacatttgtggaatttactctcaggagcctgcatggccacagagatttttttttttttaacagagtttccaattagtctcattgcagcatttgttagtaactttgcatccttctttggtggagttgtataaaaaggagcaggtcatatgagagttgcttcttcctgttagtgtatttggcacccttagttcctactaagcagttttttaatggaactcagatttctgacagaaattaattggtttctgtctagagaaataaaagctaattttccaaaaaagtaaatttagaatcgtgtctcctatctgactgtattcttttatcatcctctagcccacacacaggtgaatttaaaggagcagccctggtgtcacctatcagtaaaaggtgagttataaatacatgaagacacacgtttgcataagagtgcatagagctatacacacaccaagcacatacacaaatatatccatccatcttcatccatacacactttggcaacacatttacacaaacaaacgcatgcacaaaatggaaacacaaaacacggtgacagatggacatttgtggaatttattctcaggagcctgcatggccatacagagtgttttttaacagggtttccaattcttctcattgtagcatttgtagataactttgtatccttttttgatggagttgtataaggagatcagttcacaggagagctgcttcttcctgttagtgtatttgtcaccctcagtttctggtaggcaattttttaagggattcaggtttcctgagtttgagaccataccatagtgttccaagaaaggagaatcctatttgcaacatggaggagatagcagccaatgaggagtagtgaagctctgggaaaaaaagaatggagctaatggaacatggacttgtcccacacactcgagagctctgtccacatgtgaggttggtgcctagacccaacccaaacccaccacctcattggatgccgctttcctcaagtgcacgggtacttcactgtgtcacatgggcaggagagactagcatgatcagtgagagtaaggaggtggtggagggttttcccagtcatgtgaaaacctctcctggaaataaatcataaaggtgtaagtaatatggaaaacctgattcaagttaattatagtgtaatgctcaagaaaccttgtaaaatgaatgagattttacagaaggaataaaaggattgtgtttaatcaatggctgattaaggaaacatctaggtgagaattctgtggttgctcattaagcaacagcatgtgcgttttgtacgtagcattgatttttaagccaataaataaatttttaaaagaatttgttttataggatattggaggcatgggcaaattaaaatgtatttctattattattattattattattttagatgaaggcttgctgttgcccaagctggagtgcagtagcgcaatctcggctcactgtaacctccatctcctgggttcaagtgattttcctgcctcagcctcctgagtagctgggactgcagtcacgtgccaccatgccagactaattttttgtatttttggtaggggcggggtttcactatattggccaggctggtcttgaactcctgccctcgtgatccacccgcctcagccttccaaactgctgtgtttacagtcatgagtcaccacacctggctaaaatgtatttctaatatgtacatatgtttaatttatatataattaatctctgattaactgaccattgataaatgagtctctgttaattgttggacttactgggcttatgtggtaggatttgcataccctcacttattatatatgtatgtatttcatatttatggaaaatctactccttttggtgcaaaaaaatgtatttgctaatagtgtcaaaaaagagaaattcattatatgtctatgtacctttttactccatcagcactgccttcagtgaaatgacaactgtaacacatgaaaatttgaggtttaagtaaataaaaagctagatgtaaacatatatatgtaaatacacacacagagacacacacaaaagtatacatgtagaaaagagagattcagatttcggaagttcattgtatggagcatccataacaatacagagtgttttagacactgttttctaaagtcttattactgtagtatctgcagatacatttctttcttcaatctagttggataaaagaggaataggtcttaagaggaatgcttcttattcctattccattggtcacccttatttagcagcaccctgaaaccttagaaaaatatgagaacgtgtgtattgtatgacactctactagagtgagccaaaagaggcaacaatcctatttgatgaaaggaggaggtaacagtgggcagggagctgaggagctctcaacagaaaagagcaaagctgatagacccctggtctcttcgtctgttaccacatgaggctactgccccaaaggtaaacccaccctcagattgtatggtggccctgccttgggtctgtagttacttaaccctatctgaggggcaggaaagacatcgatgatcggtgaagagttactggtggtatttgaacgtgagaaggcagaaaattacaagggcaagcaagatgggtgtttacaaactaaagttgattttatgtaaattttgccagaaacagtaacttggggattaggtttaggagtaaagaaatgtatataaacttgattcattaagttttttttacaggctgaaaaatttcattacaaacatctaaaacctcatttgcagagaaaaattaaataccatgtttcaaataaataactgattaatgtccatttttcagggtaactagattataaattgtggaatagttattgctaatttgtatcagaaaattaagtctaggataacatgtggagtcttgctatgttcatttttaatcctttagctattaccccattgaattaaaaagagtaatgtgtggtagagtcatcaatgatgggtgagatttgaaaatacggagagaaagaagagaggcgtatattaagattggtaaaattcactcacaaatgaagtaataaagaactgcacttaaattgtgattcattagattgtttgttaaggcccaagagcatctttacataatgtaaggttttcttctaggaaaaaatgatatattaatagtagattccaaatcattgacatatacattttcagagttcagccagtttataaatgtagagcaattgtacataatttcaaccagaaaagtatgtctctgaagtcacttgacctgatgtgtacatttttaattgttagcactggcccggataaaatgacatcagtaatctttcactactttgatatatctttgatataactcacctttcattggtggtgtcattgaaaactactgatgttattaatttgggtcagtgctaaaggatatatctacacacacacacacacacacacacagacagacagatataacacacatgtatatatgtgtgtgtgtatatatacagatatatcttttagctatatatgtagtatatatagatatataaaaatgtatttatgtgtatatagatatacacatatctatatacatgtctacatatgtgcatatttaaatgtgtgtatatatatctgtatatacatatcaatatatagatatattatttagcactgacccaaattaataacatcagtagtcatatatatatcctttaatatatatgagcatgtgtatatatatgtaaacatatatgtatatatcctttagcatatatatgtatatatacatatatatagtttatatacacatatatatgtgtgtatatgcaggtatatcttgtttttattgtgctttactttattgcccctcaaatattactttttttgtaaactgaaggtttgtagcaaccctgcattgagcaagtctcctggttttatttttccaacagcgcgttctcactttgcgtctctgtcacattgtaataattcttgcaatattccaaactttttattatcatatctgttatggtgatctgtgatcagtgatctttgatattactattgtagttgttttggggcaacatgaaccatgtccatattaagatgacaagcctaatcaatgacatgtttgttttgactgctccactgactagccattcccccatctttctccttctcctgggacctccctattccctgagacacaacactattgaaagtaggccatttaataagcctatgatggtctctgagtgtcctagtgaaaggaagagtcacatgtctctcactttaaaccaaaagctagtaatgattgtgaggaaggctagacttcttgcaccagttcagccaagttgtgaatgtaaaacaaaaacaaaaacaaaacaaaacagaaaagccaaaatacttcttaaagaaaattaagactgctactccagtgaacataaaaatgttgagaaagcaaaacagtctgattgctaatacggagaatgttttagtggtctggataaaggatcaaaccagccacagcattcccttaagccaaagcctaatccaggacaaggccctcagtctctttgattcaatgaagcctgggagaggtaaggaagcaacagaagaaaagcttgaagctaaaagattggttcgtgacgtttaaggaaagaagccatctccatcacataaaagtgaaaggtaaacagcaagtgccgatgcagaagcagcagcaagttatccagaagatctagttgagataattgatgacagtggccaaactaaagaacacattttcaatgtagacaagatagccttttattggaagaagatgccatctaggacttttatatttagagaggagaagtcaacacatggtttcaaatcttcaaagcacaggccaattctctttttaggggctaatgaagctgatgactttaagttgaagccaataatcattgactcttctgaaaatcctggggcccttatgaattatgctaaatcaagcaagatgggtgactagagatgcctggtgctcatctcccctacaagaaagaaccaaggcaagaaatacacatctaagatttgattagagtattgaagggatagtcctggagtgcagcaaaggagtggagacacgyctgtggtgatggraagttgccacagyatggaagcactccgcctgtgccgccccttctgccccatctggattgaattggcccagagacaggagggacttctcattgcaggttgaaggtaagcagaagatccccaccagccccactgccatcacaaacacaaagtctttacaacaggagaatctcacagtctttgcaagccctcaggccagtttggagtattgccaaaaattgacacacctgcatgtcctggactaggagtacaagatgaagacttcccacccccagagacttaagctgcagcaacacagcaccatcatgagaccagagtcatctcttgagtgtgccctcctctgggggccagtagccagtctgcctctccagcactggagctttatcttcagtacaccaagcccacatgggtgggttaaagccacaatcccggctgtgtggaggttggacccaggactggctgtaactcaagtaatgcagagcagggaaatcaacccccaccaccacgcttccagacagaggaataatctgcagtcccatccagggtaaattcactcttaagacaggcaaaccactacatgccctctcccaagtgggagacgcccctaagcctctgagcagctgatacacccccaggtcaacagagtgactatgagcccatgcaaggaaacagccttgcaggccccatccaccacagacatgctcctggcctgcccaggagccctctgcctttaataagggcctgagaaacagtcccacaggctgcccccagcaggaacaccactgagtgggccttgcacctgtgtctcagacctgagagacaagcagttgtgtatgcccaagtctgagggccgagaaacaaccctgggagcttactctggccagcagactgtcaggccaactaagcagccacatacctatgtcccagcttgaggaacagccctttaggccaccccccacagaaacactcccaggccaactaagcagctgtgcaaccttgcatgagcctgagaaatagttctgtatccattcccagcagatgcacctccagaccagccaatcagccatgaatgcccatgtcctggacctaagaaagagctccatgggctactcccagaagacatgcccttaggccagccgagcagcctcgtgtccacatcctggctcatagaagcagtcccctgggcttcccctggcaggcaccacccaggccagctgagcaacagtgtgcccacatcctgagctagaacagctctatggactacccccagcagtcacatccaggacagctgagaagtcatttgactgtatcccaggcctgagaaacacccctcttggccagccctggccaagataccttcagtccagcttagcagctttgcagctatatatttggcccatgagtttcccccagcagactggccccagcccagatgaacagttgtgtgcccacataccaggtatgggaaacagcccttcaggccactcctggagtgcatgcttccaggccaggcaaacagctgtgtgcctgcatcctgggcctgagaaactgtcctgcaaagcgcatctggcagtcatgccctggttgagcaactgcatccccatgctcctggctagagtgacagcatcatggccagccgcataaagccatactccatgttttctgacccattgtatgcctgcacacacccctaccctgagaaacagccctgtgagcccaccctggcaaggctgcaccaccatcactacaaacttccttaacctagtccactgagtaacttgcaaattttactagtgtggatcacagctgaataaactacatagagactacacttactgcatccatgtagaaccaaggccagtataccccaatgaactgacatccaagacccattcatacaaataaattcatacaagtaaatctactccataaaattggaaaaggtgactttttcaccagatgcatagaaatcaatttagaaacacagcaaccgtgaaaatgcaagaaaacatgtcacctacaaagggaaataataatgatccagtaatagaacccaatcataaacatatgaaatgacagaaaaaagaataatcttagggaaactcagtgagatgtaagttaatacagatagacaagtcaatgaaatcaggaaaacatgatttgaaagagaaattaagtaaggatacagatataaaaataaccaaacagaagccctaagagctaaacagttcagtggatgaaatgaaaaaatacaatcaatggctttacagacaagaacaagcagaagaaatcgtttctgaacttgaagacaagtcttttgaaataacacagacaggcaaaaagggataaaaaagaatgaaaaaatcctacaggatttataggacaccattaatttgatcaaatattcatattatgggcattccagaaggaaaagtttaaaatagcaagagaaaagtaacacacttataatggaatccccattagactaacagctgatttcccagcagaaaccttaggctagaagagaatgggatgatatattcaaagttctggaagaaaaaaatctttcagccaagaatattatacccagcacagctatcctttacaaatgaagaagacataaaatctgtcatagataaaccagaacaaagataattcatcaccactagaccagccttacaagaaatgcccaagggagtcttacrtctggaagtaaaaagatgataaccaccatcatgaaaacatgaaaaactttaaaagtcactgttagagtcaatacataaaggagaaagagaaaggaatgaaaccttatcactacagaaaactaaccaacttcaaaagtaaactggaagaaaggaataaaacatatacgaaacaaccagaaaacaataaaacgttggaagtaactcctcatctaccaataataactttgaatgttaatagattaaataccccatgaaggatatagacttactgagtggattaaaaaataagacccaactatattttatctaaaagaaactcactttacttttaaagaaacacatagactgataatgaagggatggaaaaagatattctatgcaaatggaagccaaaagtgagcaggaatagctatactgtatcagacaaaacagagttcaagttaaaaactataaaaattgacaaatgagattattatgtaataataaagggttcaattcagcaagaaatataattgtaatatgtgtataattgtaaatatgtatgcactcaaacaccagagcacctagatatataaagcgaatattactagatttaaagagggagatagaccccattacaaagagagttggacacttccgcatcccactcaatctcagcattggacaaatcgtctagacagaaaatcaacaaagaaacatcaaacttaaacttcaccatagaccaaatgaacataaataacaaacatatacagaacatctcacctaacagctgcagaatacatattcttttcatcagcacatagaacattatccaagatagaccatatgttaggctacaaaacaagtctaaacaaatttttaaaaattgaaattctatcaggtatcttatcttaccacaatggaataaaacagacattcataacaagaggaacattcaaaactatacagacatatggaaattaaacaacatgcccttgaattacaacaagtgaagaaagaaattaagaatgaaatttaagaattccttgaaacaaatgtaactagaaacacaatataccaaaacaggagacacagcaaaagcagttattaagaagtatgtttttagcttcatctatgtccctacaaagacatgaactcatcattttttcagcaaactatcgcaagaagaaaacatcaaacatcacatgttctcactcataggtgggatttgaacaatgagaacacttggacacaggaagggggacatcacacactggggcctgttgtttggtagggggaggggggagggatagcattaggagatatatctaatgtaaatgacgagttaatgggaacagcacaccaacatggcacatttatacatatgtaacaaacctgcacattgtgcacatgtaccctagaacttaaagtatataaaaaaaaaagaagtatgtttttagcaataaatgcctggatcaaaaaaactagaaaactttcaaataaaccactgaacaattctacctcaagaaactagaatagtaagaacaaaccaaaccccaaattattaaaaggaaataaataatgaagaccaaacagaaataaacaaatttgatgcaaaaattacaaaaggttaacaacaaaaagcaggtttaaaaaatatcaacaaaccatcagctagactaattaacaaaaagggaagacccaaataagtaaaatcagaaacaaaaaaaagagacctcataacagatatgacagaaataaaaataattattagagactattatgagcaactccacaataaatttgaaaacctagaggaggtggacaaaatccttgacctatacgacctaccaagactaaaccaagaagaaatagaaaacctgaacagaccaaaaacaagtaaggagatttaatccgtaataaaaaggctttcaacaaagtccaggacctgacggcttcaccacttaatcctcacttgtgaaaggaagagtcattttctacagcaaacttcagtgttgtcctattttaagaaattgcctcagccactccaaccattggcaaccaccactctgatcagtcagcagccatgaacatggagaaaacgccctccgccagcaaaatgactatgacttgctaaaggctcatgtgatcattagcattttttaaccaataaagtagtttttaattaaagtatgtacataagttttttgaacataatgccattgcaaacttaacaggctacagtgtaggttaaacataacttttatatgcacagggaacccaaaacatttgtgtgagttgcttaatgcagtttttgctttattgcagtagtctggaatgaaacccacaatgtctttgagatatgtctatacacatattatttatatattatatatccatatacatattcttttatatatctttatatacatatatatagaaagagacagagagagaagataaaaagatgcaaaattcagtgttgggagtatccatgaggaaagagtttctgattaatgattgtaattttctttcttaaatattaggtcttccagtgagctaagtcatgtttactatatcctttagattcatgggattcttgttattcaaatatatttttcatcattattttgtgtagcaaatatctaatgatatatttttgcatttttttttgtggctaaagtatgttagaacgactttccaagtttaaagttgaaggtgctgaaaatgttgcttcatatgagtaagtcagtttgaagtttgaaaggagggagccattgatggatctcttatctttagttaaacagggcttccgctgaggcaagaaggaaaaagggaaactatggaaagatatcaaaatgtatgggtgggagggtacaccgtatttactccagttgaattcttagacaagcattattttgaaaaaaaaaattccatccattcagaaataaatgttcttctagcttgaaaatgtaaaaagtattcttagaggaaattaattccattaaaagtttttttttaaaaaagacaggaatgcagaatgctacttaactcatcaatagtgaatgtttctcatttttactggatatggtgtgattcccaattttgtagatttttcctatgagcaaatagtattgatagcaaaagcaaacatattttgctgactaaagacctctttatggtcattgggattttattcttatttgtttctaatctcactagagtacttcctgttgcactgacctgaaggcattttatcatgtactcactaatgaaacaatacattcttaaactggcttgtgtctgaactgcagacatattcaggagatttttcttctgcttctttcttgcccagttgtataaccattcactagcttgtgtcaatgctggagaggaagtactgccatcgatgaagttaactcaccatggttgtaagctgttggtgtctaaacaaagattggaaacaaagagggcaaatacaaatagttcttcaaattaccctgaatttgccactgagttaaactgtgtgtctgcagattagctatacgttttctgtaatgaagctgcccagggctgaaacaaaattagacagattaaacaaggtaaacatttccttctttccctactccaaacaaaataaagcaggttttcattttattttattttcaaattacaaagtctcattacatagatgtaggaggaatttgcagtagtccctgtgagaaatgctggtgtttcataccagggagatgatactggatttatagtaaaagctggctttggcctcatgtattcattcacctgatactcagcaagtcactaactctctttgactttcagattattcaaatgtaaactggctataatgcaatctatgtactggatattgtattgtaaaaaattagtaataaaatgaaaataacatgcaaaaatactttgaaaactctgtagttctgtaaataggttttattctaaaaactgaaaataaygtaagagttcattaaaggaaaatcagaaaatacaatcaacaaatctacccacatatagtcattcttaaactttggtgcttgcacttctaagttccttaagcatatttttttttgtttacagatatgagaccatacttattcttttgtaaataaccttattaatgacatcatggctatttttttgttaatatatattcatgtgcacttacagcattatttgtaacagttgtgtaatatttcatggtgtagatgtgctataattcatttaatagtcagatattgctgaacaattaagttttttacaagtttttaactgttacaaaaatgaatttatttgaggctaaatctctgtatattgttggttatttgcttgttataaattctcagaagtggaaattctgtgtcaaagggaatgattgtgacgctattgatattgatatgtgctttaacatcaagatgcaaagtgtacatttctcccctcccacacttaacactagccatcattgatttctctgatattagtaaatatatttgttctaatgcacgttctttgacacaccttcatttatccttttctgtctttggactgaaaagttaaatctattgatcctttttctattttatgtaatataagcaatttctcccaggttgtcttgcttttcactatataaaagcatttaatcctcatgtaatcaaatgtatctatacttttctttgtgattttgcctttaatgttattctcagaaagtccttcttaccccaagattttaaatatattcaccaacatttctgttttgaatttattttcttcatttaaataaaatatctgccctgaatttactttgtcttaaggtataaaatgtagaaatttacttttctcctaagtgactcatagttttttcagcatgaacatgtcatccccatgtattgtccttaccctgttttagtgatctagagtgagcaggaagaccagagtcactaaagtgtttttcgtgctttgcatcatggccacctccctactcccagagtctgcacaagagaaaaatgtgtctagtgggagagatagcacctgccttcaatacaaatcccatttcgttaaacatggtcttgttagtgtcaggtagcttccaccttctactgttgaaaaatgacatcatgttcatagttaatatttatgcttttaattcaactttgataataatattggaactttcagtgttataaggtttagtatctcatatctttctctctctctctttttttttgagccagagtcttgctctgtcaccaggctggagtgcagtggtgccactcagctcactgcaccctccgcttcccaggttcaagcgattctcctgcctcagcctcctgagtagctgggactacaggcacgcaccaccacacccagctaattttttgtatttttagtagggatggagtttcaccatgttggccaggatggtctcgatctcttgacctcatgatccacccaccttggccgcccaaagtgctgggattacaggtgtgagcgacagcgcctggcctctatctctttatttttgaattgtcatttaaatttagtttttgtctctcgtgtatagcatgtaatgcctttaatttcaaagttatctgagagtatttctcaatatgcaatatgagagtaatatgtttgtatttatgatttctgatatgtttggttttatttatcatctttttctttattaaaaatactttgatattttctttgtaaatttgtctatattttgctattaattgattttgtttttatcccttgcattttttgttgatatacaagtcagaagcccatttctagtctatcaatgtttatatttaaatgtttagaaaacataattataccattttttccatcaatatagagaataaagctgaacttrtacctgtgaaagataagaaatgcaacctgcctttacttctatcttcttccacaccttgaatcctagtgtaagaatgcctaaaaattcaaatcaatactattattcatgattttttattattcatctttacttttagaatcatttatttacattttcacctgctacttttttttttattattatactgtaagttctagggtacatgtgcacaatgtgcaggtttgttacatattcatgcatgtgccatgttggtgtgctgtacccattaattcatcatttacattaagtgtatctcctaatgctatccctcccccatctccccaccctatgacaggccctggtgtgtgatgctccccttcctgtgtccaggggttctcattgttcaattcccacctatgagtgagaacatgcagtgtttggttttctgaccttgcgatagtttgctgagaatgatggtttccagcttcatccatgtccctaaaaaggacattaactcatccttttttatggctgcttagtattccatggtgtatatgtgccacattttcttaatccagtctatcactgttggacatttgggttggttccaagtctttgctattgtgaatagtgcagcaataaacatacgtgtgcttgtgtctttatagcagcatgatttataatcctttgggtatatacccagtaatgggatggctgggtcaaatggtgtttctagttttagatccttgaggaattgccacactgacttccacaatggttgaactagtttacagtcccaccaacagtgtaaaagcattcaatttatccacatcctctccagcacctgttgtttcctgactttttaatgatagccattctaactggtgtgagatggtatatcattgtggttttgatttgcatttctctgatgaccagtgatgatgagcattttttcatgtgtctgttggctgcataaatgtcttcttttgagaagtgtctgttcgtatcctttgcccattttttgatggggttgtttgtttttttcttgtaaatttgtttgagttctttgtagattctggatattagtgctttgtcagatgagtagattgcaaaaattttctccaattctgtaggttgcctgttcactctgatggtagtttcttttgctgtgcagaagctctttagtttaattagatcccacttgtcaattttggcttttgttgtcgttgcttttcttcacctgctacagttttatgctacattaacaattattatttagacttacctaatttttagtttatattatttaccatcttttctctgttagttatcttccttatttctgtgttcttcattttgattcattgctcagctcactcaagcactttgagtaattgtttttaggaaaggtacatggaggctatgcttcgtgttgcttcatgttggagtgtctgtctgttgctcccgagtgtgaacagtacttttcctggatatggatttactgaatcatagttatttccctgcaaactctgcacatgactgcttgaagctgcatttacatagtacacttttttttaacaaaaaactctcaattgtgtatttacttggtatagtttcaggggacaccaaaacagattaaggggctaaagccacccaagccacttttttatggcttcataatctgtcagacttggttctgtatggtgacattgtcaagtgagttcagatttatgacttttccttgatacccagagatccagtagactgtgtgggatcagaggttcttgtagtaagggaatggcaactggaggagagaattcacctcttttggacaattgatcctccatctatatcagccttaactctccaagcctgggtggaggtggtgggtccaggtggagaggggaagattagaaggattggggatttcctttatctcagggtaacctaacgtcattcatcaaaggccaattttgttttttttaactttcattttaggtttggaggtacacgtgaggtttgttacataggtaaacttgtgtcagggaggttttttttttttacatattatttcatcatccagttattaagctcagtacccaatttcttatcttttctgatcctctctcctcctaccctccccacttaagaagactccagtgtctatttccttctttgtgttcataagtccttatgatttagctaccactgataggtgagaacattcagtatttggttttctgtttctgcactaggttgctaaggataagagcctccagctccatccatgttcccacaaaatacatgatctcattctttttttatggctgcatagtattccatggtatatatgtaccacattttctttatccaatctatcattaatgggtacctaggttgattccatgtctttgctattgtaaatagtgctgcagtgaacattcatatgcatgtatctttatagtagaatgattcatattcctatgggtatctactcagtaatgggattgctcagtcaaatagttctgcttttagctcttcaaggtattgccatactgctttttacagtgattgaactaatttacactcccaccaacaaagtataagtgttcccttttctctgcaaccttgcccgcatctgttattttttgacgttttagtaatagccattctgactggtgtgaaatggtatctcattgtggtttttatttgcatttctctaatctgtgatattgagcttttcttcatatgcttgttggccacatgcatgtcttcttttgagaaatgtctgttcatgtcaaaggccaattgtcagtgccccagttctgctcagtatctgccctctttgttctccagtcttaggcacaggctgtgagcattgtcttaggattcatggctcttggggtggaatttgagtcctgtgttggaggcttcagtatgacagaaacttcctgaagacttctcctactgaagcctcctgtgttggaggcttctcctcctgaagagcttccaacacaggaggcttcagtaggacaaaaaaaattgttcctcatgagctaccttgtctccagccataaggtaaaatgaggcattattggaggctccatcaaagaggttctccttcctttgattaatggaaggagcccagtctttcgcatgtttctcctttgaagtatatcttactaaaatgtcttacctctgaagttcatttgcaacctcatatgcgactcttgctaatgtgtatctgttcaccaggtgtctagtttgaggagatgacaagagcatcatttactccctgtgctctttcctgaaacaccttattttattgcagtggaaactgagatctggccaaagtttgatgatttgcccaggctggcattaaaatacagttctcttctaccacccttttctgtcttcatgctatactccttgagatgatgactgcaagtttaagtttagtattgccataaagttggggttggggctttgcatgcaatggaaatgttactaaacatccaaagtttactgtcttctggatagcatagtaaacaagtaaaatactcacggagcaggaagaataaaattttagctattagtaagaagcattttgttatacaacttctgaataattttctttcaaaattatatttataaggccctttgttttttggttaaatttacaatatatgttagaggaaatctgattaattttatttttacttctttttgcagcagcaagattaagaaaattgtgcattcaattgtatcatcctttgcatttgagtatgtgagacacagaaaacactatatattaaatatatctgagacttggctgggcgcagtggctcacgcctgtaatcccagcactctgggaggtgggtggatcacatgaagtcaggagttcaagaccagcctggctaacatggtgaaaccctatctctactaaaaatacaaaaattagccaagcataatggtgggtgcctgtaatcccagctactcaggaggctgaggcagaagaatcgcttgaactgaggaggcataggttgcagtgagctgaaactgcaccattgcaccacagccttggcaacacagcaagactccatgtaaaaaaaaaagaaaaaaaaagagtcttatatatatctatacatacatatatatatgagacttaatacttcaacgagaaacactgaaataaaataacaaaaaagcgtttccactgtccatcagttgctaagtagccatgtgccccatctaatgtaatctaatttatcatggaattgtggtttaagctggacattaagaattgcaaataaatggcttttgcctaagattaatagtaayatattaatatttttcttccatctgcaaaagtaacattaatgaaaatcaaatgttaaaattctataattattagtaaagtgttttattaagtaccttatacatctggaattactccttaattctggaaataatttacgtagactcttctctacataagattaagatttcataccatgatatagatttatgcaatataattgttgccttttgaattaataatatttgaatttgagctgcaagtttttaaaaaagtacttcaaagactaattcaccttcatagataaggcaaatagtctaatcaatttatggagaatgtatttagaatatgtaacagcaagtggcaggaggtactttagagttcaagactcatgtgcccatcactctgctagaagcacccataaatatggaatcatgtacttgttgaaaatgtcactgatgaaaaatcttggtcttttaagagcttatgttactcatgctttnnnnnnnnnnnnnnnnnnnnnnnnnnnnnnnnnnnnnnnnnnnnnnnnnnnnnnnnnnnnnnnnnnnnnnnnnnnnnnnnnnnnnnnnnnnnnnnnnnnnnnnnnnnnnnnnnnnnnnnnnnnnnnnnnnnnnnnnnnnnnnnnnnnnnnnnnnnnnnnnnnnnnnnnnnnnnnnnnnnnnnnnnnnnnnnnnnnnnnnnnnnnnnnnnnnnnnnnnnnnnnnnnnnnnnnnnnnnnnnnnnnnnnnnnnnnnnnnnnnnnnnnnnnnnnnnnnnnnnnnnnnnnnnnnnnnnnnnnnnnnnnnnnnnnnnnnnnnnnnnnnnnnnnnnnnnnnnnnnnnnnnnnnnnnnnnntatttctctagctattgccttattttttctcatggatgttcttcttcgagtatttgtagaagggtaagtttgattatttttataatgcattaagctattttgtacttttataagaagcactttgggaggctgaggtgggaggatcccaaggtcaggagttcgagacaatcctggccaacatggtgaaaccccatctctactaaaaatacaaaaattagctgggcatggtggtggttgcctgtaatcccagctgcttgggaggctgaggcaggagaatcgtttgtacctgggaggcagaagttgcattgagccgagatcacaccattgcactctattgcactctagcctgggtgacagggcaagactccatcccccccctccccccgccaaaaaaaaaaaaaagcattttaaaataacaggagcrttcactacaaactgacttaagagcctttgggccttatgagaacattggtggtagtctggcagtagccccccatggcctgtgtttgagttggccatggattgatgctcctctgcctttggacagtggtggaaagagtgggagggactgcatcttgtggtttgagcgacagccatagcacaataaaacactaggtagacttttacactttttgatctagccctgattcccagacagcacctttggatccacctggaggctaggagaacttgccatcctgaagggaaggacacagacctggctgtttttaccatgtgatgactgtagaaccccagggccttcagcaaactcctgcaatagctaaggagtggttacagcaggtcttgggcaagaccccgtgctgtgctggcctcaggtctgacccaatgcagtcatagtagtggtggccacagaggtgcttatgtcactcaaccccaagctttaggtgcctcagaacagagagactctgtttgtttgggagaaagtaagggaagaaaacaagagtctctttttggtaatgcagagaattatcctggatcttgtccacgaccattaaggcagtaccactatgagtctgcaagaaccacagagtttaggaggcttggggtgccccctaaagcagatagagattagatcacaatatccaagttctttcaaatacctggaaagccttcccaagaaagatgggtacaaataagccctgacagtgaaaactacaataatacctaactcttcaatgcccagacaccaaagaacatctgctagcatcaacactatccaggaaaacatgacctcaccaaatgaactaaataagacagcaggggccaatcctgtagaaacagagatatgtgacctttcagacaaagaaatcaaaatagctgtgttgaggaaattcaagataacacagagaaggaattcataattctattagataagtttaatagagatttaatagagatttaaaagagattgacataatttaaaagaagcagaaattctggagccaaaaaatgtaattggcgtgccaaagaatgcattagagtcttttaatagcagaattgataaaccagaagaaagaattaatgagcttgaagacaggctatttcaaaatacatagtggagacaaaggaaagaatgaaaaacaatgatgcatgcctacaggatctagaaaatagcctcaaaaggacaaatctaagtggtattggccttaaagaggaggtggagagtgtagaaagtttattcaaagggatagtaacagaacgtcccaaacctacagaaagatatcaatatccaagtacaagaaagttataaaacaccgagcagatgtaactcaaagaagactacctcaaggaatttaataatcacagtcccaaagatcaaggacaaagaaaggatcttaaaagcatcaagagaaaagaaaccagtaatatacaatggagctacaatatatctggaagcagactctttagtagaaacgtttcaggccaggagagagtggcatgacatactgaaattgctgaaggaataaaacatttaccctagaacagtgtatccagtgaaaatatccttcaaagtgaaggggaaataaagacttttccacacaaaagctgagggattttgtcaacaccagtcctgtcctagaagaaatgctagagggaatatttcaatcagaaagataaggacattaatgagcaataagtaacaacctgaaggtataaaactcaccagtgatagtaggtatacagaaaactgcagaatgttataacactgtaactatgatgaataaactactcttattctaagtagagagactaaactatgagccaatsaaaaatattaactacaacttttcaagacatagatggtatgataagatataaatagaaataacaaaaagttaaaaaatagggagacaaagttaagttgtagagtttttattagttttctttttacttgtttatgaaaacttattataagattaaaataatggattataagatagtatttacaagcctcatggtaacctcaaaccaaaaaacataacaatggatacacgaaaaataaaaaacaggaaactaagycatatcaccagagaaaattaccttcactaatggaagacaggaaggaaagaaggaagagaagaccccaaaacaaccagaaaacaaataacaaaatggcaggaktaagtccttacttaccaataataacattgagtgtcagtagactaaacttttcaatcaaaagatagagtggatgaatggatgaaagaacaagacccatccaggtgtggtggctcacgcctgtaatcccagcagtttgggaggccaaggcaggcagatcgcgaggtcaagagctagaaaccatgctggcaaacatggtgaaaccctgtctctactaaaaatacagaaattagcwgggtgtagttgtgcgcacctgtagtcccagctactcagatggctgaggcaggagaatcacttgaacccgggaggcagaggttgcagtgagccgagatgatgccactgcactccagtctggtgacagagcaagactccagctcaaaaataaataaataaataaaataaaaagacccattgctctgtttcctacaggaaacactcttttcccataaagacacatgtaggctggaagtggtggctaactcctgtaatcccagcactttgggaggcagaggcgggtggtttactggaggtcaggagttcaagaccagcctggccaatatggtgaaaccccgtctctactaaaaatacaaaaattagctgggtgtggtgccagtcgcctgtaatttcagctactcatgaggccgaggcaggagactcacttgaacctgggaggcagaggttgcagtgagctgagatcacaccactgcactccagcctgggtggcagagtgagattctgtctcaaaaaaaataaaaataaaaataaaacaaaaaaaccccaaaaccaaaaccaaaaacatgctaatatatctgacaaatattgatgcagaaatcctcaacaagatactagaaaactgaattcaacaatatatgggaaagatcattcatcataacaagtgggatgtgtctctgggatgcaaggatggttcaacatttgcaaatcaatcagtgcgatacattatatccacacaataaaggataaaaaacataagatcatttcagttgatgctgaaaaagcatttgataaaattcaacatcccttcatggtaaacaccctaaaaaactggctaaagaagtaacacacctcaacataataaaaaccatatatgacagacccacagtcaataccgtactgaatggtgaacaaatgaaaagcttttctctgcgatctaggacacaatgaggatttccacttttaccactgttgtccaacatagtacyggaagtcctagatagagccattacagaagagaaagaaagggaataaaaaaagaaatccaaattgggatggaagaagtaaaattatccttgtgtttgcagatgatacattttatttggaaaatactaaagactccacaaaataaactattagaattgataagttcagtaaagtttcaggatacaaaatcaatatacaaaaatcagtagcatttctatgtgtcaacagtgaaccatttggaaaggacatttaaaaagtcctgtatacaatagccacaaataaaattaaatacctagaaattaacctaaccaaagaagtgtaaggtctttataatgaaaatgataaaacactgataaaagaaattgtagaggacactaaaaaatggaaagagattccatgttcatggattggaagaatcaatatttttaaaatgtccatactatccaaagcaatttacagatgcaatgcactccctgtcaaaatatgaatgacattcttcacagaaatagaagaagcaatcttaaaatttatatagagccacaaaagacccaggatagccaaagctattctaagcaaaaagaacaaagctggaggaatcactttacctgatttcaaattatactacagaactatataaccaaaacaccatggcactggcataaaaacacacacatagaccactggaacagaatagagaacccagaaacaaatccacacacacttacagtgaactcatttttaataaatgtgccaagaacatacatttaacaaaagacatctcttcaacaaatggttctgggaaaactggatatacatatacagaagaatgcacctagacccctacctctcaccatatacaaaaatcaaatcaacatgaattaaagacttaaatctaagacctcaatgaaactgttctactacaagagaacattgggaggaatctccaggacattggtctgagcaaaaattatttgggctatacctgacaagcacaggcaagcaaagcaaaaatgggcaaatgggatcacatcaagttaaaaaaactgcttcatagcagaggaaacaattagcaaagtgaagagacagcccacagaatgggagaaaatatttgcaaactacccatctgagaagggattaaaaaccagaatatgtaaggagctcaaacaactctctaggaaaaaatctaataattaattttttaaatgaggataagatttgaataggcatttctcaaaagaaaacatacagatggtaaacaggcatatcaagagatgcttaacatcattgatcattagagaaattctcagtgtagaaaactaccatgagatatcatctcaccccagctaaaatggtttatatccaaaagtcaggcaataacaaatcctgacaaagatgtgaagataagagaaccctcatacactgttcttggaaatgtaaattagtagaaccaattggagaacagtttggaggttactcaaaaaactaaaaatagaactaccatatgatccagcaatcccactgctgggtagatacccataaaaaaggaaatcagtatatagaagagatatctgcattccctgtttgttgcagcactgttcataatggctaagatttgggagcaacctaagtgcccatcaacagatgaatggataaagaaaatgtagtacatatacacaagagagtattatttagccacaaaaaacaataagatcctggccaagtgcactggctcatgcctataatcccagcactttgggaggctgaggtgggcagatcacctgaagtcgggagttcgagaccagcctgaccaacatggagaaaccccatctctactaaaaatacaaagatcagctggatgtggtgccgggcacctgtaatcccagctactcgtgaggctgagatagaagaatcacttgaatccaggaggtggaggttgcagtgagcccagatcacgccattgcactccagcctgggcaacaagagtgaaactccatctcaaaaaaaaaaaaaaaaaaaaagagatcttgtyatttggaacaacatggaactggagatcactatgtttgttaagtgaaataaaccaggcacagaaggataaacatcacatgttctcacttattatggggctctaaaaaaaaaaaaacaattgaactcatagacctagagagcagacggatggtcatcagaggctgggcatggtagtaggggcttcggggtggggagrtggggatggttaatgggtacaaaaaaaatagaatgagtaacccctactatttgatagcacaagagattgaccatagtcaacaataacttgattgtatatttttaaatgactgaaagagtgtaattggattgtttgtaacrtgaatgataaatgcttgaggggatagataacccattgtccacaataagggtgattattatgcatttagttatatctgttattatgtttgaattgccatgttggtattttagtcacatttaartgtcaaatgatgaatataattttattgtttgaaaatttcccatgaatgttatatttttcccttagtctactctaaaaaatacattttaaataattcatgatagaagaattcttaatggggatgagtcaatagtttgtggtctttaaatattcctatctcttcttgcaggggggaatgaacttttttttttgttttgtattacaggagacagcagtatttttatgacttatttaacattttagatactgccattattgtgattcctctgctggttgatgtcatttaccttttttttgacattaagttgcttaggaatattcccaggtatgaaacttaagacttacctctcttaaagtttttcattaattttagcattttctgtggcttttattctatataatcttttcaacttcaaatgttctcattctataccaaatacattgctttaaaatgaaatgtttaggtaaattcccacatactttgaaactaaaagattgtgatatttagggaccagtgaagagtattcaggctaagtaccattaatggaataaggaagatgcagtacccaaagaaggacttttactcttatactaactttaacttctctacattttgaagttctcatcaaattcccatttgtatcattttttggccttttggctaagatcaagtataatattcttatcagtttaatatctgctatatcagaaaaatttatattgaaaacaattctcctctgtgcttcagctacaaatcccttacacataatgttctgtctggatttttcctacagccaagagggaatttatttgagcatatgcagaatttgagtgacttcaatcatgagtttctaaaaaatagcaaacagaacagaaactgggagatgacacatgtagcaacacaatagtagagttttgcagtatagttgtggtagaaacaaagaaagcttaggccaagttagaactgttagggattaagaaactaaagagtgtatgaggccctggtgactcttttcctttttttactgtgacaatgaggaaaacgaaagagcaaatgtatactgggatgtagatggtggcttcctaagcttgttcatgggtcaaatagctgatttctttttgtaccctagcttccctggactacagctcaggccccaactaaaagcatgttaagtgataggcttttggagttacttgataataacctcatccaatgtggtcctctgactagaaacctcagcatcacttgacagcttgctagaaatataagaagaaaaataccttaggccccaccctggacccactgaatcagtatctccgggacccagcaatctgcagcttaacaagcttttccaggtggctcttattgatttgtgcccaaatcagagaaacactagtccagaccatcagttctctgcttcggtggttctgatggtaggagagataccagctagcacactttggaagtatctcaatctgttgcctccctgatgtgcagtagcagctgtagtgaacatctgttactcatgggaataacaaagatgaacaagaataatcgatttgttttgatgtggaaaaattaaaaagctagtcttaaatcccaaaattaaatttacaaatgctaagagtctattgtatcactatttctctagacaagaatttctcagcctcagcattactgacattttgggccagatcattgccataagagggtggtgagcagttatattaattgtagggtgtttagcaaaattcctggcctctattcactagttgtaagtaacacacagacacgcacacacacgcacgccagtkgtgaaaacctaaatgactccagacattgccaaatatcccccaggtaggtgattggggagaggagggaaaattgcctctggttaacaactgctgctctagatatagtttatattgataaaattcgtttctgaagcaaaaattgatcttttaaatttatygttagatggacacattttgatcgacttctacgacttattattctggtaagaatttttcatctgtttcatcaaaaaagacaacttgaaaagctgataagaaggctggtaagtgggcaaaacatgcttatgattcagaaaaatattttgtgttttggaacccattggcaagggttgatatctatactgtgtaatgttttctatttttatgttgatgaatgtttcacaaactaatggtgattttaaactctcaggtttcagaaaacaaaaggcgataaacaagggatggatttgacctagacctcacttacattacagttttgtgacacttaactgttgatttacttgtattacttcactttttcttgtaattgtattttttttgcctcatctaagacatattcattcaaaattctttattcatgaggatatatgctactgtgataatgtgacatatttgtggtttagccctggcaatggaagatctgcatgtcttctcaattcaggactactcatttgcagcataggaacttgaatggattttcagctgactccatttgagtttcaatttattaacctctagtagttatttmtgagtcccaaggatcccacagagacctcttctcatcctagaaccccagagaatgaggtcggtgctttgtagatctcaggttttctgagtcagagggctgcaaagcactttgggagttcccaccatcactggtgcccagaaatcttggattttctctggtatttaagataagaaataaattctaagaatggggaacttcagactgaggccatcataaatacaaggcatacagttagaaccagtggagacttaagaactccatgccagtttaatggtcattgtgttgggtaatttaatatgttatttgattatcctgagtattagctgttttctgtcaacctcaatcttaaaaggttttttccagtgaaaatggagtctgataatgtataaattaattttttgtatgttatatgaaatctataacaatgtttgtaatagtgatgattttgactttcagaatgtattattgctatgtcatttccatcttttggaaggcagtctttctatagaaatccagtcgaggtaagggtctttatctgacaaatactcatttcttagggaatgtagactgtgtagtcataagtttaatattgacccagatatggcagtattcttttaaaaatgtactctttcaagtaaaaaaatcataatrgattgataccagttacaattgtgccagtggttacaaaccaccccaaaacttactggcttataacagcaactatttatttggctcatgatactgtgatttgtgaatttggtatgggcttaactgtccaatttgggtgcttgcagaaaggatttcctgcctcaactaagctcattcatgtatctgtgggcagctactgggtcatctgaggactggctagtctaaaatgacttggctaccctcaactgacagagccactgcatgctacatgcaccccccaaggcccaaggcccatcccatcgggcacccactgctgccaacagtcccacccccttcaccagcagagctaccatatgccgcatgcatttctaaggcactgaggactggcctgcctggtgcccgccctgctgttggcaataccccacaactagcaaagccactgcagctagcatgtgtatgcctaaggcctgagaactaatctgaatgatagctctcacaccaagaaaagccataccactgtctccacaaacactcaccatcaggccactgaggcactcacagacaccactgaacgctgataacagccaaaaacgtcacctgaagactgtattactgcacccacccagaaccaaagtcaaagcaccctactcagtgaacactataggagacaactattggaaaaagtatttctctrtgaaagtccctaacattggaagaggcaactgttcccccagatgtacaaaaatcagtttagggccacaagaaacatgaaaagcaaggaaacattacacctccaaagaaacacaataattccccattaacagaccctaaatttaaagagtatatcaaatggctaagaaggaattcaaaataatgatcttaaggaaactatgagatacagagaatacagatagacaaatcaataaaattagaaaaacaatttatgatcttatgagaaattcaacaaggatatatatgtcaataaaagccagacagagattgtggagctgaagaatttaagtaataaaatacaaatacaatcaagagtccaggtgaagtggttcacacctgttatcccagcactttgggaggccaaggcagtggatcacttgatgccaggtgttcaagacaagcctgattaacatggcaaaatcctgtctctaaaaaatacaaaaattaattgggtttggtggtgcatgccttccatccaagctacttgggaggctgagacacaagaatttcttgaatccaggaggtggaggttgcagtgagccaagattgtgccactgcactccagcctgggtggcagagtgataccctgtctcaaaaaaaaaaaaaaaatacaatcaagagctttaaaaacagacatgggagagatatggccaaaatctaggaagctcaaaggttctcaaatagattcaacccaaagaggtcttctctgaggtgcatagtagtcaaaatgtcaaaagtcaaaaagagggaatattcatcaggtttggtggctcacacttgtaatcccaccactttgggaggctgaggcgggtggatcacttgaggccaggagttcaaggtgagcatggccaacatgaagaaaccrcatttctactaataatacaaaaaaattagctgggtgtgatggtgtgaacctgtagttccagttacttgggaggctgaatcacgagaattgcttaaaccctggaggtggagtttgcagtgggccaagatcacaccactgcactactgcctgagtgacagagtgagactgtatccaaaaaaataaaaaaaaaaaaaggaaatgttaaaaacagcaagaaaaaagcatcaagtcacatataagggaaactccatttgattagcagtggatttcccagtggaaactttacaggtcagtagacaataagatgggatgatatattcaaagtactgaaggaaaaaaaaactgtcagccaagaatactatacctagtagagctatccactagatatgagggagaaataaagtatttcctagatgagcaaaaactgaaggaattcattcccactagactgacgttaaagggactgcttaaggtggttctacatctggaagcaagaggatgattaccattgtcaaaacacacaaaagtgtaaaactcactggtagtgcagatatacacaggagaaagagaaaggaatcaaactttgtcactacagaaaatgagcaaaccacgaagattaaaaaaaaaaatagatgaagaaaagaacaaaggatatacaaaacaaccagaaaaaaatgaacaaaatgacaggataaagcctcatatattaatagtaaccttgaatgtaatgtaaacagatcaaattcccaattaaaagatatagaattggcagccaagatttaaaaaaaaaaaaaaaaaaagacccaactgtatgctgcctacaagaaactaacttcacctgtaaaggttcatacagactggaagtgaagggatagaagaaaatactccaggcaaacagaaaccaaaagcaagcagaggtagccgtacttatcaggtaaaaacagactttaagtcaaactgtatgaagagacaaagaaggtcattttataataataaagagaccaacttagcaataagatataataattgtaaatatrtatgtacccaacactagagcactcagattaacaaggcaaatacttttaagtctaaagggaaagatagactccaatgcagtaacagttggggcctttaacaccccactcttaccactggacagatcatctagacagaaaatcaacaaggaaatatcagatttaagcttacagataggaataagttctggtgttctgtagtgctgtagggtgactacagttaacaataatttattgtatatttytaaatagagaggatgttgagtgttcccaacacaaagaatgataaatatttgaggtgatagatatgctgattatcctgatttgatcattacacattgtatacaagtattgagatatccctctctaccttataaatatgaacaagtattatgtgtcaattaaaaatatttttaaagaatgaaggaaacagattttttaaatgaaaggaaagaaaattacctgacttggctgaatggccccatgtggtctctcattctccagtaggctacttcaggcctgttcacrtgatggcagaggcaagagtccsaggagcggcaacaaaacaatgcaaatcctcttcaggcycaggctcaaaattatatattamttctaccccattttattggacaatgcaaattacactaccagtctggattcaaggagtagaaaataaactccaactcttgatggaaggaattataaagaattgtggcmgtttttgatagtctaccatagggragaaagatggggatgcyataacccaaaatgtgtwttcttaggttgagatcctaaattatagtcrgggcatacgagaggtggaaggagtacctctttgcagtgtgttagctcagttctgaacaggacagggctgcaagttcagctacttcccagaaaatgtgctggttccctggcctgagtcatcatcccatgactagagaatgtggatggattattttatcaagaaactggtgataaaccaagggctataggaattaagaactagggctaaaaaagaaatgtttagagtgatgcaagatgaccaattagaagcagctgcagtctgcagtgctcacaaagargaatgaaaaggggcaagggaattcagcaccttcaactgagataaccaggttctcacattgggactgactagatgaacaggtcgaccaatggagaatgaagacaagcaggcagagagtgcgacagcccagcygggggcagcatggagccaaaggaacccccactgccagccaagggaagcggtgagtgagtgtgcagtcctgcccgggaaaccgtgcttctctcayggatctttgcaagccatggatcaagagatccccttgtgaacccatgccaccagggctgtgggtctgatacacagacctgtattgagtctgggcacatcagctgctcaggcacacacagaaacccaggagttttacactctctagccccggggatcttcagcacagtgggaaatctgtccatacgtatctctgggaagggggctgaatccagggagccaggcagcatcattctgcaggatccrtttccttggcacctcacaagttaagacccactggcttggaatcctagcctgccaacagcagcaggttggaatccacctcagatgggtctgtgttcctggggaggtggggagaggcagccagcatcactgtggttcatatactcagccactccagcctgccagctatggagaatacagacaatctggacaaggaagagttccccacaacacagcacagctggcttgccagatcatgaccagactgcttctttaagcaggaccccaatccattcctcctcactgggcagaaatccctgcgggggctttaaccactccagcaacggttctatggacagagctttgatctcgccctgaaatggagctcctggcgggaggggcagctgccacctctgcagtttgggcaactcagccactccaacctgatggctttggagaatacaggtggtccagaggaggaaggatcccccacaatgcagcacacctgctctaccccaaagcagccagactgcttctttggatgggtccgtgatcccatccctcctgactgggtgagaatgcccaacaagggtctctagccacctcctgcaggtatgtgcgggctggctacagttcagtatccccctgggatggagcttccaaaggaaggagctggctgccatctttgctgtttctcaggcttcactggcaatatctcattcagagtctatgaggaacttaaatttataagaaaaaaaacaaccccattaaaaagtgggcaaaggatctgaacagacacttcccaaaagagacatgcatgcagtcaacaaaaatatgaaataaaagctcaacattactgatcattaaagaaatgcaaaccacaatgagataccatctcatgccagtcagaatggctactattaaaaagccaaaaaataacagatgctgtgaaggttgcagagaaaaagaaatgctgttggtgggtgtgtaaattagttcaacccatgtggaagactgtggcaattcctcaaagacctagaggcagaaatatcatcagacccagcaatcccattatggggtatatacccaaaggaatataaatcattgtcttataaaaatacatgcatgcacacatatgttcattacagcagtattcacaatagcaaagacatggaatcaacctaaatgccagtcgatgatagattrgataaagaaaatatggtacatagagygggacatcgggcttctgagcgggaacctttgtagtgccagtgatgaaagagagaattaaatatggstgattctgagaaaggcaagaaaatttttcttcagatgtgtgcccagtgccacactgtggaaaagggaagcaagcacaagactgggcctaaactccatggtctcttcaggtggaggacatgtcagtccattggattatcttaacatagagattgataagaacaaagccatcacctggggagaggatacactgatagagtattttgagaattccaggaagtacattcctggaacaaaaatgatctttgccagcattaagaacaatgcagaaagggcagacttgatagcttatctcaaaaaagctactagtgagtaataattggccactgccttataccttatattacaaaacggaaatgtctcatgacttttttatgtgtaccataatttaatagatctcatacaccagaattcagattatgaatgactctcagaatattttgttgggcagtcctgatttaaaactaatactagcttgtggttaaatgaataagtttggtttttgaatattaatagtaattccaattcagtgaatgctatcactgtttactccttctaaatatatgattagactttgttaataatgttcaacttttcacaaagatggtgagtaccatcttaaaacttaatgaagattggttttatatttatatttatattggtttatatttggatttatgactggttatgtgaatatatttaaatactggggaaattccttcactgtctcagaaccaagcaagattcacctgtgttttgtgtttatttgccacttaaaggcaagggttgaagataaggtagcaatgtctactttgtatttttggccttaactatgccattgtaattagaattccctgtatttaagatggttccttttacttattcaaaggcattttgtgtggtttatgtgtaatatcaaataaagattacttaacacttaaaacaacaacaacaaaaaaaggaaatgtggtacataaataccacggaaaactgtgcagccataaaaaggaacaggattacatcctttgcagggatattgatggagctggaagctgatatcctcagcaaactaacacaggaacagaaaaccaaacaccgcatgttctcacttatatgtgggagctgacaatgagaacacatgggcacatgatggggaacaacacacactggggcctgttgggagggaggggatggggaaggagagcatcagaaagaatagctaatggatgctgggcttaatacctagggatgggatgatctatgcagcaaaccactatggcacacatttacctgtgtaacacacctgcacatcctccacatgtacccctgaacctaaaataaaagttgaagtaaattatttgtatatacatgtgccccgatgtaggtaaacattatatatgcatgcatctataaccacatttttgctgaggtataacacatatggtaggttgcactaatcaagtatatatcttgatgatattatacctaagtatatatgcatgtaaccaacacctctatcaatatattggtctatgactgacctccaattaattgttgtaaagatataaagtatcaagtttcatgtttttcacatagctctcaatttctcctgtaccatttattgtaaagagcatgatttcccccaatgaattgcagaggtgggtttattgcaaataaagtgaacatatctgtataggtctgtttctgggctttttgtcctttcattatgactgcctatacttaagtccaggccatagttttaattattatggctttatagtgactcttgagaacttgtgtgtaagtcctccaactttgtacttctttgtttaaaaactatcttggctctcctagattttttgaatttccatataaattttagaatcatcttggcaatttacatacacacacacacactcaaacccacacaaacacacccccacaccccgtcagtattttgacttgggcattgactacatagcttaatttggagagaattgacatctaaaaatattgagctttccaactcatgaacataatagatctctctactgatgtcttctttgatttcttttagcaatgtttgtagtgtacaggttttgcaccttttgttagttttatctctatgtagttgataagtttttatgctattttaaatgatatttgaagatcttcattttctaaatatttgctattggtatgtaggaacataactaatttttgtatattgacttttgtttatttgtttatctaaagacagggccttgctctgtcaccacaggctggagtgcagtggcacctgagctcaagcatttctcccacctcagtctcccacatagctgggactacaagcaggcatcaccacacttggctaattttttaaattaatttttgtagagaaggagtctctctggtctcactgacccaagcgggtcttgaactcctggattcaagcaaccctcccacctcagcctcccaaagtgctgtgattacaggtgtgaaccaccacacctggccttgtatgttgactttacatctagcatccttcataaattcacatattaattttaataatgaatgtgtagattccctgggattttttaaatgtatgcaatcatataaagttactactttcttcccactttttatacttttttctttctttattgaattatccaggactttcatggtaatattgaatagaaatggtaagaggaggcagtcttgccctgttcccaaacttaggtggaaagaatatcttgcttcactatttgaaatgatgtttgctataggcttttgtagtcattctttactagattaagacagtccattttatttctagtttgctaaaagttttgaaccatgaattggtgttgaatatatcagatttttttctgatatcatctatcaagataatcaaaatgtttttctgtcattccattaacgagattttcaaatgttaaaccaaacttttttatttttggaataaactccttttggtcttaatgtattaacttttttatgtatcactagattctatttgctaatattttatttagaacttttcatctgtgttcatgagggatatgcagtttttttttcctgaaatgtctttatcagctggtctacaattaccttagcttaggtgtcttgggtaactcctatctgcttaactcatcttcatcctccatctggatgaatatgatgggtatgtttcaaggtcatggcaaaaggaaagagctagagtggaatcttacaaatgcttttgcaaacctctcctttgtggcatcccagtgaccgaatcaactcacataatggaacacaaaattagagggaaagggcactacgaggtgaaatgtgagggcttgaattcaggaaaagttgaagaattgagaccattgatggaatgagtctaccttattctcaggcagggaagcatttttrtacatgagatagttcacaagaaataactactatatagtcagagactcaagacttcagcaattgtataaaaatacatttgtaaatacctaaagaccttgaagagaagagtctgaaccacatctcacccaggttacgctattcactgctaagacatgactctaccactcccttggccaattttgaaaattgtttcaaactatttatttgaggtggaagtactttctgtcgctccgaatgggcacagtcatggagtaatgtgaccagggtccactggatgggtcatgacactcagggcagccatcccaaaatttccgaattccatctttatggggaaaacatctcttgattgctaatattgttttctaaagcaggttaagttaataactgtgagttaattatagcatgtctaaattgagcccattttcttttagtagatttggtgttgactaatataaatttggcaacacttactattagctggggtgtttttaaaaagccaaaaacttttagcatgtaaatcaaaacaaagacattactaattttttcttgggtgatctctagacttttggtttctatcagttattaaactgttatctccttggggcattgacaaagtactaataagtcattggttcctttaccatttttaatcagagtatcccaaaaggaggtaattatgtgttttaataaattccgcaaatcataaaccacccaaaaagcaaatctaccatccatattaatatttagtctttcatctttgccagagtgaagccccaaatctaagctactagttcagctacctgggcaggctgggaatcaggccatggagcccttcagtgattgcatgttcagtgataacagcatgtcctgcactgggagtgtctctgtcatatgtgagaagcatctacaaagtatattaaatcaaggttgactaaaagggagaagattcaaatccaggcatccttaactcccgagaagttgctaaacagtcatgtgattcccctttattcttaaaagggaataaagttgcagggttacattttgaacaacagcgaataagcaaagcagacattacaatttcataagtggtaaacttgctagtggagaaatgtcagatgctgccttgaagtagcaaaaactttagagatgcaggacccatagtgttagtggagaaacaagcactatggtggaagcatcaacaagtttggccactgctgccacctcatgcaagtacggaaggtatacctttgcctccaaatcaaggaatgtactaagataggcagagagaagagtatggtagatttaggaaaacccaaaggtggaggttgttgcaagaagctttctaagaggagacagcattttctacttttgcatcacaaggaagagtttcagaaattataaacttagtaagccacgcaaaggctgagctattgagaaaaatcaggtataaaattacctacattcctacaatcttagccatcttttaatttctgttcttggtagaattgaatgcactttattctggctgaaaacagaaactgtccatctggtgacagattgtgaccagaaaaatgtagattcttggcagagttgaattttgttctagattatttatgtcctttttcacctgatttggataagaggtatttggagtcttcggtaaattacttagatcggaaaacacagcagtaaatcatctaaatgttgagttgctatatatatatatatatatatatatatatatatacacacacacacacacacacacacacatatatatgtatatatacatgattataaaaattatatatatatatcatttttcagacattgagagaactaggaagtggatttggaaaaatccctaaagcttaactgtccaggtatatttgttttcccatgaaaaagcaaatattgactctttttctatatatgtatactaaggaaggctgcacataaattaccagtgtgagatatttacttattgagagaatgagggacagggatgggcacggtggctcacacctgtaattccagcactttgggaggccgaggagggtgggtcacctgaggtcaggagttcaaaaccagcttggccagcatggtgaaaccccgtctctactaaaaataaaaaaaattatccaggcttggtggcaggtgcctgtaatcccagctaatcagaaggctgaggcaagaggattgcttaaacctggaaggcagaggttgcagtgaactgatatcgcatcatcgcactccagcctgggcaacaagagtgaaactccatctcaaaattaataaaataaaataaaataaaataaataaaataaaataaaataaaataataaaataaataaaatataaaaatataaaataaaataaaaatataaatataaagtataaaataaaataaaataaggacaggacaatattctaatggttgcatgatatttcattactgctatgattaacctctaatgttggacatttaagtgtcattataatcaataatacagcaacagacatctttgctcataaggccttttctgtatagattgctagtagtgwaattacctagctaagagtaattttagggttcttaatatatattgccaaatccaagagcagttgtattcttgtatcaacaataaatcaaagttttaaatttcatgccttattttgccagcattggattttctcattaaaagagaaagggctaatttcatgggtgcaaatggcatgtcattgttgttttgactacgttattggtgacactgaatgtttacataggttgttaaccagttagattttctcttttatggattgttatgtccttagcccatttatctataaggtgagtgagtaatatttaagttgttgttaatgaattattaatttatcatactaggcatggtccccattcagtcaatttttctgaaaaatcgtttcccctgttattcattaatagcatttttaagcagaaatttcagatttttatgaagtcaaacgtaagcctattgatcttccattgattcaacacctttagttcttcctcatccaaagaattgattaaaatttgcttcaatttctcatagatatttatagtttttatatgtgatttctaaacccatatggatttcatgtaagaaattccatgaattctgaagtatataaaattatttatccttgcctcccctactatgcagattcagagtgttcatctttttgagttattatttcctcctaacagagatagccagtttaataaatggatgactttgataccttcattttatttttctcaatattaagccagtaaacattgctctgagggtaccatactaatcagttttaaaattttgtgtcatttttgttgttgcacagagatatatacgtatgtgtgtgtatgtttcagaaagatatatttacggaaatttggattcatatagtggtattgattgtattttaaataataactactatttgtttttcattttaaaggttatacatatatacatatatgtatatacacacacttataggtacacatatatcttcatttaaaaaaataaagagaacaaatgagccaaaaaagtctccatattgttatcagttatttaaaatttgatatgtttatctttttctatcacacatacacacaatcatactacatgctttttgcatttatttgtttacatagtgcttagatagactgtaatatgcagatcactctctaaagatgtgtctattcagaattaaatttaaatcagaaccaatatgaattagatttaaacaagaaccatattaactgtgaattaatgatttagaacaaattacttaaagttagttaaccagctaatttacttatctgatagctttaaacagtgtgtatttacaatagagactcatctgagtagccaaacacactttgtggactatttgaaaaatcacagtggattagaacttgaaatttgcataccctcttattctctgaatctcccctagaagatgctagtgagagacaaattaataaaagtaataaccattttaggtgccccctaggaaatagcttatgttggtgccatgtaaatatgtaagatatgtgtttgtcttttttaggaagttgtgcggtttctagataagaaacatccatgccgctatcgagtctacaatctatgcagtatgtacattactctatattttgctaccgtagatagaaaacagattactgcatgtaagaagatgattttgttttttagattgcatttaatcataagtatttggtagtggcaaggaatgaatttaaaaatccccatcttggactgaccccatttagtagaaggagttaacccagcagcacaaagaaccgtatgaaggatgtggctttggcaggaccaatgagactggagtggaagcaaaccattttagggaagatctgttctagtgatattaggtttaggaaaatctttctgtttttcctgccagattgtgttatgaggacatagacaatttaacaaatgagtcttctgacccatcagcagtggcatgtgatgagagcaagcctctagatgggaaaaaagcaaaaaactctgtagaaaataggttgtaacccagtttaataccctgtctctcttgattttttcctctacctgtatactcaatagacattttcatggggcaaacattttggtcagccacatttgcctcgtgtggtttctaactatcctgaaataatgtaatgaatagtctgctagaaagttaaaaattatacctattaaacaaaaataagttgagtttaggttacatgagatggataaactactaccatccttayatttttgaaacacttgtgtttgttttagagtggcaggagcaacttggaaagctctttttgaagacagataaagaattctaataagatatgttaacttattcataacttcatcatttatcatgttattccctatggagatatgacatacctattatttatttttggtgaaagagcttatgatcctaagcacttctataatagggttggtagaatcatgattgatgatcataatgtccccactctacagtaagttttatgctaagttgactatcagaagagggctaaatatattgggcttgattttttgaaaatattttaactaaaaatcttaaacttgaaatcagtgagatggtggttttcaccaaggaagtaaatgagtggatggctcaagatcttgaaaacatggtagcaattcactgtaaaggaggaaaaggtaataacattttcctttttatttctccctttctaaagacatgtaaatatagagaaagtacaagaacaagatacttatttctattaatatgtattaataattgttagcatttttaaatattagctccaagactgaaagaagggaaggagaaaggaaagaggagaggaggaagagtaggagatagggagaggataaggaagggaagaaagtaggaaaaaagaactaaggaaggttgagcatattttcccttgttttccttgtatttagatttctttatttttggtttgccagtttatatctctcaaaatacacacagtctttaattttagaatatcagactacttttattttatttaaggctgatcttttttattttcaaatttacaaataaaaaatcaatatatttatggtgtacaagatgatgttttgatatasgtaaacattgtgaaatggctaaatcaagctaattagcatatgcattactccacatatttttgtgtgagaacatctaaaatttactgtctcagcaattttaaagtatacattattattaactgtggtcactatgttgtacaataaatttcctgaacttattcttcctgtctaactgaaattttgcatcctttaatcaacatctcaggctgggcacagtggctcacacctgtaatcccagcactttgggaggattaggcaggtggatcatatggtgaagccccatctctactaaaaatacaaaacattagctgggtgtggtggcatgcacctgtaatcccagctactcaggaggctgaggcagaagaattgcttgaacctgggaggcagaggttgcagtgagctgagatcgcaccattgcactccagcctgagcaacaagaacaaaactccgtctaaaaaaataacaataataataaagtaaaaaccaacatctgcacaatccccccagttttgtctccccagcccctggtaaccaccattctactctctgcttctatgaatttgacttttttagattccacaaataagtgagacaggcagtatttgtctttctacaccgggcttatttcacttagcgtaatgttctccagtttcatccacattatcttgagtgacaggatctcctctaaggctgaatagtatgcctttaattatatataccatatattctttatccattcatccactgatgacatttagattgactccatagcttggatattatgaataatgctgcagtgaacatgggagtgcagatttcatttcctttggatatatacccagaagtggaatctccaaatcatattgtagttctatttttggttttttgaggaatctcagtgctgttttccacgataactactaatttacattcacaccaacagtgtacaagggggttcccttttcatcctcaccaactcttcttttgtctttttgttaatgaccatcctaacaggtgtgaggatatctctttgtggttttaatttgcttttccctgatgattaatgatgtttagcattttctccttatacctcttggccatttgtgtgtcttctgttgagaaatatcttttcaggttctttgcccattttctagagaagtaacttgttctcttgctattgtgttgtctgagttccctttttaaaaaatctgttaacctattatcgaatgtatgctttgtagatgtttctcccattccgtaggttgtctctttagtctacaaatggtctctttagtctacaaatgtttcctttgctctgcaaaagcgttttagtttgatacagtatcatttgtctactgtttcttttgttgcctgtgcaacaaaagagagtgtcgaccactctcttttctatttaccatttaaggctacaagttttcctctaaatattgctttagttttgtcccataaatttttatttgtagtgtttttattttacttagttcaaactatgttccaactttgtgcttgtttttttttttttgacccatgagttatgtagaagtatacttccttatttccaaatatgtgagaattttgtatttatctttaaatttttgatttctgattgtattgtgttgtgggcacagaacatactatgtatttttttcttttttagttctttgaaacttgtttagacttgcttaatgacccagaatttggtcgatattgtcaaatgttttctgtacatttgaaaagaacatatattatgcattgttgagaacagcgttctatgtacatctattttatttaactcttctattttccttctgacattctgttttcattcgattgaattttaataatataaatctttccttctcaccctctgtcattaccttggaagtcatatactstttttctatgtttttagtaattactgtaaagatttaaacctgcatccttgatttagctattaatttttgtttatgttgagcttgcatctagaaatcttcctaaattctctcattagattaaggagttattctaagtatttacttactacactgactttctacactggttaggctctgcagtatactgttaaatggaagcagtgaagagagggcatttttgtttaattccaggctttaaagaaaatgctgtcaatattatgtcattaatatgatgttcccggtaggtattttggtagattctctttgttgagttaaggaagtttcctagttgttagtttttaaagtcacaggcacagcctgaattttagtgaatactttttctggcattaactgagataattgtaaggtgtatcttctttaatcaatgaatatgataaattgcattaatatagatttctaatataggatggttcttgcattttttattatttgttttttaatgggcaaaagactgttttttttcttcttgagcttagatttttggtataaagtaacttttagatttggaagtacatatgcaggtttattggtaatattatctgatgctaaggtttcgggtatgattgatcgcatcacccaggtactgagcacaggacccaatagttagtttttcaacctgtgcccttttctgctgtgccccctctagaaatccccagggtccattattgccaccttgatgtccatgagcacccattgtttagctttcacttatgagtgagaacatattgtatttggtttttgttcctgcattaatttgcttaggataatgacttccagctgcatccatgatgctgcaaaggaaatgatttcttttttttttcttttgagaggtagttttgctctttttgcccaggctggagtgcagtggcgcagtcttggctcactgcaacctccatctcccaggttcaagcgattctcctggctcagcctcccaagtagctgggattacaagcgcctgccaccacacccagctaatttttgtatatttagtagagatagtgtttcaccaatttggccaggctgctctcgaactcctgacctcacgtgatccacccacctcagcctcccaaagtgctgagattataggcatgagtcactgcgcccagcctgtttttgttttttttgtttgtttgttttgttttgttttgttttgttttttgagatggagtcttgctctgtcacccaggctggaatacagtggtgcaatctcggtcactgcaacctttgcctcctgggttcaagtgattctcctgcctcagccttctgagtgactgggattacaggtgtgcaccaccgtgcccagctaatttttgtatttttagtaaagacggagtttcactatgttggccaggctggtcttgaactcctgacctcaagtgatctgcctgccttggtctcccaaagtgctgggattacagatgtgagccactgcacctggtccatggctctattttgaagtatgttcttttgattcctagtttcttgagtgtttttttttaatcaagaaagatgttgaattttatcaaaagcttttgttttctgcatctattgagatgatcatgtggtttttgtttaattctgtttgtgtggtgaatcacatttattggtttgcatatgctgaaccttgtatccttggaatgaagcttacttgattgtgaactttttgatgtgctgtcggatttggctgttatcctgatggggctacctttgcgtgtgatctggcctttttctccggtgcctttagggctttttctttgacagtgaccttggacagtctggtgagtatatgccttggtaatgttcattttttatagtatctcacaggtgccatctggctttattgtacttagatgtctatctagcaagattcaagaaattttcttgaattattccatcaaatttgttttccaggcagttttctttttctctttctagggcatgcctgtaattcgtaggtttggtcactttacataatctaatatttctgactttcttcacttttaaaaaatatttcttctttatttttgtctgatgattagttcaaaagaccagtcttcaagctctgaaattatgttgtctactttgtccagtctgttgataaagttttcagttgtattttgaaattccttaagtgagtttttttaattctagaagttctgattgatttcttattaagatgtttatctcttccttcatttcccagattgatgtagaagtttctttttgttgatttcaaccttgaatctcattgagcttccttgcaacccaagctttgaattgtttattgtcatctctgagttttcaatttggtaggaagcattgccagagagctcgtgtgatcctttggcagtgtcactgcattcagatttctcatggtgccaaaattcttgcgtgggtccttctcatctggagatgctagcacttctaattagtgtaattatttttgttttggtaggatttttctcttttttttcctttcctataatattattgttatttttttcttctttccctttccctcctccctagggggtgtgactgtagagcatgctaggtagggccttttggctttgcttctgccgccgtatgcacttctgccagcaggttttatgttgggtgtgtggtatgacctacaagccagtagatggcgccatgggtaagagctggctgttgccagtgctgctggctgtgtacttcatccttgtttattgggaggagctctctgttgccccaggcaatgggctgaaatcccgagtacacattaatctgagctccctcagccctaggggtagggggattgggggcacaagatgggtgcagccagatagggaagattcccccagtgttgtcctgctcccagtccaggtttgggaaaatgctggcagcgtttccctgtgtctttcccccacaaagtctccaagtctcttctcaaatgagctccaaggcttgggaaaaacaatctcttcctctgcccgggttgcatggatctccagtggaaaggtgagacagagggatgctgtctgcctttctcacatactgaggctttactcacttttatcagtcgaatgctgtcctgagggctgcgtgcctgcattgtcctccccgggatctgggatgtccttcataattctggggaattgccattttctttcttgaattaaagctcacagagttggtctttatgtacttgcttggtatttccaaatgactgaggcatgctaaaagcctgtaatctgccatctattaaaaaacatccttgaatccttaagagaaatggcacttggtgttgatacatggtgtttctacattgctgaattcactttgaaaatatatgtatatttttaaatctacatttatacgtgagactggtgtaaaaatatcttttcttctactgtatttgtgcaattttggaatcagttatattaatgtactaaatgagttgggaatttttcttttttactgttatccaaaaaaattataaaagacatgaattgttactttcttatagatttagtaaaaacctcatcgtgtccttttgtggagagatggtgagagatatttttactgtagacgtaatttgactatttttcacctgtgaggtggagattgcagttagccaagattgtgccactgcactccagcctgcatgacacagcaagaccatgtctcaaaaaaaaaaaagaaagaaaatcaagttaaaatgcactccttgaatatttctgagtgtatttttataccatgtaggttcttgaactaacttcttttcttttctaggaagaaccagaactatggtttgtgccttccttattgcctctgacatatttttaactgcagagttatgaaagaggttctacaaactttgtcttaggatgtttgagtttgctagttctgaaacatcactgataggacgtaaagattattatttgagtcatggtgcttagtaaaattgtaattagagaagcagtctttagaaagtctgtttttgatactttcttgtttaacgtgcactagttagtagctgacttcagaatctctttgggccaggactagagttaggtcaatgaggtgcaaaatttaatggaatgctaaaaattgtaataattaaaataaataattttaatgtaacattttaataaaaattaatgcaaaaaatctatgatgtatacaatatcaacatgttaaataaagacaagacctgatgggacaggattaaggtgaggggagtaaagccatgttacagagaaaaaaacatacagtaatcaagatgcttccctcacttcacctggccctgctcttactcctgccagtaccatgacttcttccttccttgtgagaatagtaacaagttcaattagataaattctccaaagagcgttgcccatcctcacaactcttaggtagataaaaagcaacatttcacaactcaaaacaaagcctctcctcaatgtaaatatcttcgcttagtcagtacatgtagagtctgtgacctctaaaaatttctgataagaccagatgggctgtttccacttaaagcagaattctctgtcattttcctttctgccattttcctgctgagatgctaccatttccagcagctctgctcgagttgtttggcctcagtctagggaagaggtggtggttgtgcacaatgcccagactccaattccaccacctttggtttctctaatttgagatgcacagattttgaaaatggttgttctaagatagtgtttttcaagctatggatcatgatttatcagtaagttttaaaataaagttactgtattgtaactgacatcttttgaaaataaaatgaatagagcagaatagaaaatatcaaaaggtttaaatattggtgtgtgtgtgtgtgtgtgtgtgtgtgtgtgtgtgtgtgtgtctcctagatttattaatgtggattgcaacttaaaaaacaaaaggtttgaaagtcattgacagccattgatccagagccctagactgagacccagggacctgtatgcaaggcctgtgctgcttctaactgactgcagcatctccttggcagtttgcttggttttgttttggtctcggtgttgtcatttgtaatatggaaagaagggttggaccagatgctttctaaggtgtttccagctctaaaattttatgaatgtatgaatccttgaatgaaagaagtcctaattttgttatttttggtagcttctgcccaaagatcactgcagctgggcacgggtggctcatgcctgtaatcccagcactttgcggggctgaggcaggtggatctcttgaggtcaggagtttgagagcagcttggccaacatggtgaagcccctatcgctactaaaaatacaaaaaatttgctgggcgtggtggtacacacctgtagtcccagctactcagaaggctgaggtggtagaatcacttgaacccaggaggcagaggttgcagtcagcttagatcctgccactgtactccagtctgggttgcagagcgactctaccaaaaaacaaacaaacaaacaaacaaaatcactgactttaggaaagaaggtgggcatagaaacactaagggtacctaatacaggaaaggaaagagtgcagatgaaccatggttggattgtacccttttttgtaggaaagctggtattattttggagaaaggcaaagagataaaacccacagcaaaaaaatttcagggagtaraaactccttctcaggtaagttttctttttaaaaatgggagttttttttaggggagtgggttcagattgccacctgttatttggtttcattttagactcttctcctttggtgatcaggcagcagcagttgggtgccctgcaacaggccttgktccctccctgagtctgagggtcacgcttcaggtgctgcccacatgctggggactctggcttctcttcagagaatcctgctttctattctatactggttattgtttacggagctcaggagttgattattttcccaaagtaggaaaggtccagtacgcatggctccaggactctgaagtgtgtctaaaatcaccagcctttgatttcaatgtaaaaaagatccaagtctttcacaaaccattactagggcaattcaacccttgcagaacatcacaaagactgtttttggatgactcctggtgtgtrtgtgtgtgtgtgtgtgtcttttctgtgtgttgtgggggaggtgtattttaaaaaagaaaagggraaataaacttttcaaaaccccttctgtatcccagacagtattgcacttttacatatctcayttaatatccataacacctrtatgaaatatacactgttactctgttttycttttagaaacattttgttatggaaaattttaatcatatacaaaagtccagagaatcatacactatatcctcatgtagtcatcacattgctgcagcagtcatttcaggcagctccagccacgtttcatccattcttccccactccactcacaccccccaaccccactctccactcttgctttccctaaatctgagttattgtaaaggaaatttcagtcatcagatcattttatcccacagcattttagtatgacatttaagtactcttaaaacaacaacaacaaaccttaacactttttattgtatctaaaaatattataccttaaaaatccttcatatcaaatttgtagtccatgtttgtttccaaaattgtcttaaaatctttgaaaatttagtttgtttaatcagaattcaaacaaagtccacacatttcatgtggttgctgtgtctcctaagtttcttttaagaatctaagttcatagatttctcaccattttttattacttgaaatttgtttattgcagaaaccaggatgtttatcctatagcatttacaacattctagactttggtgaactatcctaagggtctctattcactatctcatttaatattctcagtaactctatgagtaggcactactatgattctcatcttataaattagaaaattgaggctcagagaaagtaacctttgaacaaaggactgaaatctagatgtcagtctctgaagcccttgctgtgcacagcttctcatttatattgccttttctatattgcccctgaaaccgaagtgagagcgggttgggaattcctaaatggatttggatgtggctgtaaatgagtttttctttaagtgatgggagctgagtagaagaacactctaactactggccctaaacctttagtttgggccagaagaactcagccttatccactgttacttttctcccacacccaagccccaaacaaaacaaaacaaagacagtcatagactctaagctaaaagtgataggtgaatttactgaagtgcagccctaatcatgccatttccatgctcaaaatccatactatgtccccactgccaatggcaataacataaacgtttcaacctggcactcaagagccacactttgacttttccagccttctcttccactatgtgcatcacacatcccatactccaacacatttagactgtgtgctctttcctagcctatggacatttgataccctcatgccattgctcatgccccttttcctagagtccctttcccttctcagcctgaagtagtctcttgctttttcaattcttagagccctttgtgtttctcttagggactatgttactttgcatcattctctagttatttgaagtggtgacttctgtatcccctttaaaggcaaagcccatggcttacgcatctttccacccttttctcataatattttctttgtttgtagtgagggcctcctatgtgttggctgtattaatttctactacaagtccatgttcttttaagttgtaggagaaggaagcatgggagcacaagaagcttgagggccctggtggtttacatcccttagggaaaggtggagaatctagcggcagaaactaaggggatgctcgatggagctctttcaacaactctccctacacatctccccatccccatttcttctgcagtcatgcatagtttccctaactttagtccagaactagaacaccaaaggctgcaattgaatctcttctgattcactgaaaaagcaacacagggactcagctgcaagtttgagagctgtgttggcaagacctcaggacagagtgccctctgtgtctggtggtgattctcagacaccatcacattcttatactgcattgtgggccattctactgactaaatctgcttctgtgttaaggactttcatgaacctgtctcatgactggccctttctaaagggaagtatgggagttagttactttaatgcacatttcccaatgggtaaggaacagtctgtgaacttgtgagttttgttttgttttgttttgtttttaatttttgagacagagtctcgctctgttgcccagactagagctcagtggtgcaatctcagctcaccacaacgtcgacctcttgggttcaagcaatcctcctgcctcagcctcccaagtggctgggattataggtgcccatcaccactcatggcctatttttgtacttttagtagagacagggtttcaccctgttggcgaggctggtctcaaactcctgatgccatgtgatctgcccacttcggcctcccgaagtgctgggattactggcgggagccaccatgatggccaacttttgaattctgaaccagttgattgagtaccagagctcttcaattaccttgaagaaggattcgggggagagctgttgtgaacagcttgccccagggaaaggacaaggctaagagaatttcagggcttccttgagaaaacagaattgaggaaatgcaaagtgaagaaattctagctgtcaggaacaacagaagaatgacgggaaacctgctattgaggtttggaggtattcctctggagttttcacttataccattctctcatgcccaggaagctgctcttcatgaaaccacaaggcttcctctaactcagtcacaactaagcttctctctggacactgatgatgctgtaactgttttgttgtgcttctgattagttgccctctaaaccataagcagcctataaacagggcctggctccatccttgttacttccccattgcactgaattcagtatttttccctcaaggtagatagttgtggggcagcatccctaaaaatgtctagttatataatgtcatccagtaaatgttttcttaattacttacctccattaccaagctttatgcaaaaaaaaaataaaaaaggaatcctgactttagacttatcatctccacttaaaggaagatttctgttgcttttcagaatagatatgtcggatattttgcacaagtgaaacatctctacaactggaatctctctccaagacggatactctttataaaaagattcattatttattcgattcgtggtaaatgctttacgtataattgaagaattgggcgggagggccaatgttcccactctaggaaggttttgctcatagttgtatttacagatgatcctaactcatacctgtctttttacatatcctcacacaggaactcctccttatttatgccgctcctcctgcaattgcccattgattgccagcccttagatgttcttcactttttcttttccatcaccaatttgggggacttcatccccttcccatctctcctgttctcattgctcctctggtctcaacccaggatggacttttccaggcagggggagcctctgatgagggaggaggaggacccatgtgccctcaagcctgcttatttctcagaaccacctctagttcagagtttaccttggtggaggtgtcttcgtatcgtatcattttctcaccttcttttagaggcatatttttttctcatcaccctgggctctccctttcccctctctcctccatctgtaaccctctcactcccagcttacactcaggggaggcgggaaagcaggttgtgtctgtgtggaagggatggggcctcaccactcccaatgccggagaggtagcagggaggtgatgcttcggaacccctaaagcaaacctattctatcagccagcttgtggacctgagatggtgtcagtgctggatgctataggtgccatggggtcaggatgctggtgtccacacagacagcctagtatttttagcgttctgagtttagttctacatttcactgatttctggtagacatcaatagaaagaagttctgcacctggaatgggaaagagggaactgaggcaagaaactgtgatttctaatgacaaatgaatatcatggtgttagtgaaaacaaaattacatgaaagcaaacagcatatgagatgaacaaagataattaatacactagtttattaaaatatttgttttaattctctacctttagttttgtgaatatttaaattaaaattaatatagagttgagaggaaagcaataaaaaattaattgagaaaccaagtctttgaggaaatgctaagggaagtggttcatttgaattggaaaaaaaggaacaaaaaagcctttgtctgtaaatatatactgaacaccactggaatttttggatataactatcctatatttttatagagatttcttcaggaactggccttaaagtagggccaaagtagttaaatgacagtatttattattaagaatcattatgattagaaatctcaagaaagcaacatattagcaagaaaggttgcaagtcacctttcctgaattttctttttctttttctttttcttattttggaaacagagtcttgttctgtcacccaggctggagtgcagtgttgtgatctcggctcactgcagcctctgcctcccgggttcaagcaattctcctgtctcagcctcccaagtagctgggattacaggcatgtgccaccacgcctggctaatttttgtttttttagtagagatggggtttcaccatcttggccacgctggtttagatttcctgacctcaagtaatccacccacctcaccctcccaaagtgctaggattacaggtgtgagccaccatgcctggcctagcttccctaaatattttttctggaaagataaagtgatgggattctaagtcttcaaagctgaattatatgtatttttttttcttctctcaccttataaaatctgctttaggagacagaactgggcttgaagccttatctttcaaagacaaaatccatgcaggactaaataagtaactattgatacattgttagcttggataattttttctctttttaatccatgatgttaatttgtgagacatattgatgttcacgctagccaacctaactttttaatttcattttgttggaacaggttatgtacatgatctaaaagtccaaatagtaatggagaaaaaggttgtcttttccggtacttcattaggaaattgttcagtaagagaaaacatgtgaattgaaaaaatctgatgtttgttttaaggctgaatgtcaaaccagcaatgttcacctccctaaactatcactcactataaagagattttgtaacactttctggttaccatccaacttggtgtcactgggtttggatgcaaaccagaggtaaattaacctgtttgttcaaaacagttttttcagggtgctttccagaatttatttctggtcagtgttgctttgcctttcacacttccacaaatgctgagcatgttcccaggaatgtattaaggattttaatttacatatctggtcatttttagccatattctcttcttctcagtcatttgatcttttgttatatagcactgattctaaaagtttagtgtgcgtgagaactactgaggagcttgtaaagatttacattcctaggttgtacccccaaaatatgattcgggaaatctggaatggggcccagtaatctatagacttagtaatgtcccaagtgattctacgtcagaggttctgtgggatgaccctgtgagaaacaatccaagagtgaatgaactggggaggaacctctttatccaaagcaaaagggacctggtagtcaatgttttgctgcagtgaagaaatgcctaaaactatataccttttctgaaacagtaggaaagcatccttcatgttctaataaycataaacttttagaattcctacccaggcctttgtctcaaattctcctattactaaccctattccctgccatgccgtccccactctgccctggcttttttggcctctcccaactgagagcattcacgcaggcctgacccttggctttctgttcttagcaaatgctttattcttaaaggatgacccattccccttacttcaactattatttgttcacttactcataacaactcataacagctatttatgagcacccactgagttgtagatgcaggagctacaacatgaacagtttccactccaactcaaatgcattagccagtctgaattatcaaggagctttctttctgcttctgcaaatggcaccagcattcttccactcatgccttgggctttgattctctttgcctcagscccctaaatctagttagtcatcaatctatgttgattatgcctttcatagttttctatgttctccttcctttctgttctcactgccactaattgtccagaatctccttttctcatgcctagatttctgcagtggtctccttaccttttctttctccttctataatgcattgtatagaatcctgaaatatgcatcctgatatattgctctctttgtgaaaaattgtaggtagagcagaagacacactgtgtgcctgtaatcagagccagttaacacctttggctcaacatccttatctgtaaaataaatatcacatctcaagtgtaatgggaattaaattagwtaatatatataaaggttctttgtaaactgtaaatcactaagtgttatacgtgataattatcaggcttctttgtcacataggaaatgctccaccatatttttcaacaacttcactcttatttccttggctcttgagctctgaagatatagtaaccctaacataatacctgagcttttttccatcagtagcttggccagcagacttcattccaaataaactgggtcatcccttttggctcttggaacacaactctagttagttagttggttctttctttctttcattcctttcttcctttccttttttttttcttgagccagggtctcattctgttacccaggctgtagtgcagtggcatgatcatggctactgcagcctcaacctcctgagctcaagcaatcccccaatttctttttattttttgtagaggctgggacttgctatgttgcccaggctggtctcagactcctcggcacaagcagcctgtccacctcagcctcgcaagatgctgggattataaacatgagtcacactgcccaacattgtttgttgttatttttcaaatttttttctttttcttttttttttttttttttttttttgagaaggagttttgctcttgttacccaggctggagtgcactgtcacaatctcagctcaccacaatctctgcctcctgggttcaagtgattctcctgcctcagcctcccaagtagctgggattacaggcatgtgctgccacacctggctaattttgtattatcagtagagacagggtttctccgtgttggtcaggctggtctcaaactcccgacctcaggtgatctgcccacttcagcctcccaaagtgctaggattacaggcttgagccaccatgcctggcccatttttctaatttctactttgtgttattgctgctctttttccctccgtttggagtagaatctgttttcagagctgttcttcctttatctaaactgcttcatgcccaattcaatttctacctccttaatgaaatttttgcattctgcaccttctgttaactagcccccagtagtgcataacagcacacccagtctttatcatacagattgagttatgtaccattcttctattgtttcttaagtgtacagctccttgaaggggccaactgagtctgcaccttcttttgtgtttttcacagggcctagcataaacctacctttcttattgtgggtgccattatttctatgagaatgattcaaagaactagtacagcttcaaagtcattcattccaaaacttgagctatctttggtcactccatccagcagcctgcactggtcaagttcaaagatcccactgacaaacacaagaattctgataaaacatgatgagcagggggaccccactgtccccctcccttgggaggagcatgcaggcccaacccccaagtgttacagacccccgttgttattttttaaatttagaaaataaaaaaccatgataagttatgcattgctatttgaatgtcaatgctagcgttaaaattgagcttcttaatgtattctcagaaaaggccctaacacgtgaaaatcaaatgacacacattaaataataatatttaattgattacactctaatggaaaattcaatactttttagaagtgcggcacttttgaaaagtgactcatggctgggcacggtggcccatgcctgtaatcccagcactttgggaggccagggcaggtggatcacgaggtcaagagatcgagaccatcctggccaacatggtgaaaccctgtctctactaaaaatacaaaaattagctgggcatggtggcaagtgcctagagtcccaactacttgggaggctaggctgaagaatcagctgaacctgggaggcagaagttgcagtgagctgagatcatgccactgtagcctggcaatagattgagactctgtctcaaaaaaaaaaaaaaaaaagaaaagaaaagaaaagtggttcatgataaccctcaaacatgttggcctttaaaagacataaacaacaggccaggtgcagtggctcatgcctgtaatccaacactttgggaggccctggtgggcagatcacttgaagccaggagtttgagaccagcctggctaatatagtgaaaccgcatctctactaaaaattcaaaaattagctgggtatgatggcatgttcctatcgtcccagctacttgggaggctgaggcataagaatcacttgaccctgggaggcagaggttgcagtgagccgagatcacgccactgcacttcagcctgggtgacagtgagactgtctcagaaaacaaaaaacaaatgaaaccacacagacacataaacaacagtattgcaactagaaaagtttattaataattatttatgtatgtagtgatggggctgtgagactaaaagtacttgataagtacaggaagtcatgataagtgaaaaggaacttcattgttatcattatctaggtttatagttctcaattccatgtgttcattcatagatattgcatgacattacaaggcaaagtattaattgatgtattcgacagtccacctctgtatgatgatgtaaaagtgcattttttctcttcggtgagtaatcacaaartagcctctgccattgttcttgtctggtctaatgattttatttaagattgctttactacatttcccaacaagggaggggtagggggaagacaataataaattagatctataacaaacttttaaaaaagagcatatgtaacttaaataatttttgttcattttttctaaattgtaaattttctaattttttctaaatttacatgtattctcaaatacaaaaaaatacaaaataaacacaaagaagtaaaagtcaagatgctaaaaaaaaaaaaacccaaaggtatgttttactgcatagcawtgattacattttgctttgcatcttttttaaaaaattaagaaattgagacagggtctcactctgtcacccaggctggagtgcagtgrcgtgatcatagctaactgtagcttcaacctcctgggctcaagcaatcctcccacctcagcctcctgagtagctgggagcactgactggaaagagagttaggtttgggtgactcagttggatgaaacagagaaggcagcacaatacaacacatgaaataaccaaagcagttttttattaattccagagagaggagggcagcacagtttgcagggccaactagaagggggagccatccaggagacctgtgctcgactgatgggtgggagcaatagtgagagagagggagggacctgagggtggaagactttactgggatgtaaggtgctacctgagcagacttcctgcrgggaggtctaatttggtttaatgcaggcagctatgagtctctgctgtggctgagaggtggtcactgatatatccacatggtccctgcacagtatgggggtctgtggggtgagtcaagtaggttatatctcgctgtcccatagtgaagtggtcatcaggagaaggctgtgcaagacagatatcaggatcagtcacatggagtaactgggaggaggtgaactggaaactgctgagggtgactgaaccccacttctgatatcagaaaatccaatttataattaaaaggtatgctgaggcaacraaaaaattataagaattcactacaatgtagttgggtatatataggcgtaggtccttagtagagtctgtttggcactatctaaaccagattcaaatagcagcatttaaattaaatacctatcatgggaaaaatattattccttgaaaattttgatagaaacagcaagagaatgcaatagcattttcttaaagcctcctcctttgtgtcttgagtgtattgttacagattgcagagtgccacatatttaatggttataattgtttgataaatataaaaaggaataaagaaagaaactttaatttctttggaatgattagttcttggtatcagttttactttgaattttttttttctttttagaatcttcctaaatactatgacaattgttcatttttcttctggtgccacacatcttttattcagaataacaggtatgaatataatagaaatacatagaaacagcctaatcttcaatgtctatgtataaggtgtaatggcaagtcttttgctggttgtcatacacttaatttatagaaagcaaaaaattcttgaaccaccattgttccttgccttactcctcttactttggttattttacaaatatatttgttcttgagacccactgttgcagtatcctcagggtccatgccataggactgtgttatgagttcaaaagtattatcatcagatcttaagtgtggtagtaaattcctcccagagaagatcaatatgagcctgctcagcaccttcaatatgtcaggtccctgtcagtaggtgctgatttaccaatgatgaaccaccatcaacttttgtgctaaagtaaggcaggacctagggaggcttcagctagctgaaaagctgactgacacccttatatctaggagaagttacaagacacagtattaaggaaatacagctaagaaatatcattatgtaatagtctgtttaaatagccattcaaatattttttttttttttttttttgagacggagtctcgctctgtcgcccaggctggagtgcagtggcgggatctcggctcactgcaagctccgcctcccgggttcacgccattctcctgcctcagcctcccaagtagctgggactacaggcgcccgccactacgcccggctaattttttgtatttttagtagagacggggtttcaccgttttagccgggatggtctcgatctcctgacctcgtgatccgcccgcctcggcctcccaaagtgctgggattacaggcgtgagccaccgcgcccggcctcaaatatgtttctaataaccgaactgggaaacctttctgaaaaattattaattggatttggagattattgttccaaaaaaaccttctgccatatttggaaacccatttctcagcctagaagttctccactgtaagtaccatttgttttgtgatggtgaaaaaattgagactttttttgtatcaaccatactcttcaatacaaaaggacaaaatattttttaaatgatttaggtcagagttgaagaagtggctgtgattttatgtggcatgaattgatagttattattacatccagttctaatctttccttcaaatgtgaactggatcgaataattccttaagtccagcaaggcaacaggaaattaaacctctggtctacagacttgcaatgcaaaatatttaatggattttgatagagtcaactttgkatttgatggaaattttttacaagtttttttttggatgaatacaaacaataagctttttcttctaacatgagcaaagtccctcaaaaagtgagacatcagtggagcttcatttgatgctgctcctcaaaagtggttcttgctaaaggataccgttttttttcctttaaaacactatgttcattttggagaagtgataagctggatcacttttattcttacttttatataaatttctaaagatttctgtaacatttaaatttacatactacttggtaaagctgtttttgttagttatgagattgttgtttagccaaaaatgctaacttctatcattgagaacactaggcataaataggttaaccaatttatgcctactgttccattattggaacactcagcatgtgggagttatatcctactgctcaaggtaacttccaatgtctcattgtaaaaattcaaaaaatttcaacctcacacataaattaaaagagatatagtattttattaccgggttttcattcatgtctatcctgactgatttctgtcacagagagaaatttagatattttattaaacttggatgtcattaattccatataaagcaatgctaagagagtcagaatgtgttactgatgtgttgctgaagattaaagtatttttatktctcactaaaaaggtggaaggagccaactgagacacaaaaaaggggctgaggttctattcatggtgaagttctttttttgtttcttctagctctaacatgggtacccaactgcgtggcttttcggtgagccccaatataaaatgtaataattgttttctattcttaagctttatctaccaagaaatgaattggataatccacataaacaaaaagcttgracaatttatccaccagaatttgccgtggagatactttttggcaagaaatgacttccaatgacattgtagctggatccgattaagtatagctcccccttccccttctgggaaagaattatgttctttccaaccctgccacatattcatatatcctaaatcttccttgatgaagtatctatatatctttttatatgttcttcataaatctattaaatatatatagataaaatgtcagtgttttccttcttttttgaaggtacatacttcacagtttccatcttgtatttacataaatttggaacacgtatgcaggaacatcaggcatcattttgaagaactttgaaatagaacttccgtagcaaaaacttgagatatttaaaaattgtgatttcccaacacccacttacttacatatttttggtcaagtatttattccctgcttttgttcacatttgtaatttcagatttattaaaaagctaatttatatatttttcttccccttcatttacaaactgtctgttaacagattggcaaccaagactaagttttaattccagaagagagaaatgtttcatgcaagcagtcccccaacttccaacacacactctctttcattgcgagcattaaataggtagcttacttgaaaagcttcctttaattacacacagacatgggggttggggtaagaagatggtggtaaatatgaagataagtaatctttggtaacttctgcttttgtataaaattgtaagtgaagtcaaaagaaatattcttagcgtaatctaggtgtattattttgaaattcactactcctgctcacaaccaacttcacctaagcttggggggactctgaagggaggttatctttgcgttataaacaatggttagccttatgtctacaggaaataatcattatttcctctttggtgctgggtgctacttttttttaacaaatattttatttgcattttttattttttgagacagcatctcactctggttgtagagactggagtgcagtggtgtgatcttggttcactgcagccccaacctcccaggctcaggtgattctcccacctcagcctcctgagtagctgggactataggcgcatgccagcacacccggctaattttttgtatttttagtagagacgaggttttgccgttgttgcccaggctgagctcaaattcctgaactcaagcaatctgcctgcctcagcctcccaaagtgctggtattaaggcatgagccaccaggcccaatccgtggctgttacttcattcaaaatacctttattgccactgtatcttccagccatgattgtccttgaaaaccttctatcttggctttattgaaattattcttatttgaatgattttccttttattggcaaggccctcaacaatctagaccaagatgagttcatcaggaaatgaaaggtaacaactaataagacaagtgtcacttctaaaacacgataaactcattcctgaaaaacctggcactctacagaaaggactgaaaaaggaagcagttcatgaaaatacagggtttgagagtccagggcaaacctgtctggcatagcaactttctaaccaacacactaaccgctgggaccacccacatcagcagttcaatgtcaggagtttgccatagagctttttaatttttgagtggaaatagaaaaatacttgctgtaagggctgtgggtaccagagtggcacagatgagagtagagctctgagccatggtggaaaatagaaaaatacttgctataagggctgtgggtaccagagtggcacagatgagagtagagctctgagccatggtgggcacggaaggcagcaaccttccaggagccaagagccccactaggctggtgagccgcctcgctgcaggtgactttttctcctctaaataaatagtccaaaaaaggttccaactgcccgtgcagcagcccaactaaaggcctttttcctttactccccctgatctggctccttctttgaggaaaagatcatagaacatgctttcaaattactttcatgttaatattataccctgccattcatatgacagaaacgtgtaggcacaacataggttatgctatttcctttaaaattcacacaacgataatctacagagggcagattatgtcctgggtttaggtgaatagggaggaaaatacttagctggctcagtgaagattaagatctgtctttttcagtactggaaacaggaaggaaggaaacccccttttttattttaagaatttccctttttgaaatgagattaccattaaagtttcttttccccagacctccaagacctatcaaaatttctggaaattatgagttgtcacactattctacttttgcttattgaaagaaaactcatttaaggcctctttgggtattgctttcttagaatgcaaaatgaatgattctttgaacaactcaagaaacttagatcagaatggtacgtcttaaaattttagctttaattttaaatatgggggtatgtgtgcaagtttgttacatcagtatatttcaccccagtagagagcatagtacccaataggtagtttttcaacccgcacccctctctctccatccccctctagtagtccacagtgtctattgttcccaaccttatgtccaagggtacctattgtttagttctcataggtgagaatatgtggtatttggttttctggtcctgcattaatttgcttaggataatggccttcggctccatctatgttgctgcaaaagacccgatttcactcatatttatggctgtgtagaattccattgtgtatatgtaccacattttctttatccaatccaccactgatggacacctaggttgattccatatcttactattgtgaatagcacagcgataaacatatcagtttgtgtgtcttttggtagaatgatctttttcccattgggtatatatccaataatgggattactgagtcgaatggtagctcattttaagttctttgagaaatctccagactgctttccacagtggctgaactaatttacactcccaccaacaatgtataaacgttcgtttttctctgcagccttgccagcatctgttgtttttgactttttattaatcaccattctgactagtgtgaggaggtatctcactgtggttttgatttgcacttctctgacaattcgtgaagtgaagaatttttccagatgctcatgggtcacttgtatgtcttcttttcagaagtatgtgtcatgttctttctacatttttaatggggttatttggtttctgcatgtggatttgtgtattccttatagattctggatattagacctttgttggatgcatagtttgcaaatgtttcctcctgttctgtgggttatctgtttgctctgtcgatcatttcttttgctgtgccaaagcgctttagctttattaggtcccacttgtcaatctttgttgttattgcaattgcttttggggacttagttaaaaattatttcccaaggccaatgtcaagaagggtatttctgaggttttcttctaggatttttatcacttgaggtcttacatttaaatctttaatctatccccagttaatttttgtatatgatgaaaggtatgggtcgagtatcattattctgcatattgctagccacttaccccaacaccatttattgaatagggagtccttccccctttgcttgtttttgtcagccttgcaatatcaggtggttgtaagtgtaaggctttattctgggttttctaatctcttccattggtctatatgtctgcttttgtaccagtaccatgccgttttggatactatagccttatagtttgaagcctctgactttgcccttttgcttctatttgtttaggctattgaggccctcttttgctttcatatgacttctagaatacttttttctaattctgtgaagaatgacattggtaatttgatagaaatagcactgaatctgtcaattgctttgggcagtgtggccatttgaatgatactgattcttccaatccatgagcatggaatgtttttccatttaattgtgttatctctgatttctttccgcagtgttttacagttcttgtagagatctttcacatcctttgttagctgtattcctagttatttcattttccttgttgctaccgtaaatgggattctgttcttgatttaactatcagcctggacattattggtgtatagaaatgctgttgatttttatatgttgattttttatcctgaaactttgctaaagttgtttatcagttctagtagccttttggcagagtctttgcttttctggatatagaatcatatcatcagtgaagagagatagtttgacctcttcttttgctatttggatgcctattctttctttctcctgcctgaattctctaggtaggacttccagtgctatgttgaatacgagtgatgagagttggcatcattgtcttgctccatttctcatggggattggttccaacttttgcccattcagtaggttggtggctgtgagtttgtcatagatggctcttattattttgaggtatgttcccttgatgccgagtctgttgaggtttttaatgtgaagcgatgttggattttatcaaaagttgtttctgtatctattgagatgatgatgtggtttttcttttagttctgtttatgtggtgaatcacatttagtgatttgcgtatgttgaaccagacttgcatccctgtactgaagccttcttgattgtggtggattaacttactgatgtgctgctggattctgtttcctagcatttggttaagaatttttgtgtctatattaatcagagtaattggcctgaagttttctttttgtgtgtttctctgccagattttggtattaggctgatgctggcttcatagactgagttagggaggagcccctcatcctgttctttggaatagtttcaatagaactagtaccagttctttgtacatctggtagaattcagctgttgcttcatctggtccagggcttttccttgctggtagattttatattaatgatttgattttggaattcggtatttgtctatttaaggtttcaatctctttctaattcaatcttgggggattgtatgtttccaggaatttatccatttcctctagattatctaatttgtgtgcatagagttgtttatagtattctctgaggatcttttgtatttctgttggattgtttgtagtgtcatctttgtcatttatgattgtgcttatttggctcttctctttttttctttgtttagctatcaggctatccatctagtttattttttgaaaaactaattattggtttcattgatcttttgtgtggatctttgcatctagtctaaaaaaaacagcacttcaaaaagcacttcattcagtgcttctctaattttagttatttctcttctgccagctttggagttagtctattcttttttttctagttcccttaagtgcaaagtaggaaagttaatttgagatacttctaacttcttgatgaaggcatttagtgctgtaaactttcctcttaacactgccttagctgcatcccagagattcaggtgtgttgtgtccctattttcattaattgcaaagaatatttttatttctgccttaatttagattttcacccaggagttattcaggagcaaattatgtaattaccatgtatttatgtagttttgagagatcttcttgatactgatttctaatttgtctcactgtggtcagagtgtgtgcttggtatgatttcaaactttatgaatttattgaggcttgctttctggccaagcatgtggttgatcttagaatatgttctgtgtgcacatgagaatgtatcttctgtgtttgtttggcaaagcgttctgtagatgtctgtcaggtccaattggtcaactgtcaagtgcaagtacagagtttgttagttttctgcctccatgatctgtctattgctgtcagtaggttgttgaagtctcctgctgttattgtgtgtctaaatctttttgt

SEQ ID NO: 94542 - DNA, 15899 bp, Homo sapiens
ggacagacctattaaaaacttgtgtttcagctatctgaagtctcctacattaaatgaataataaatatgatgagtgaatttaatagtacaaaagaacaaacattctatgaatgcctactatgtttcagacttctttcccaaactcaggatgtggggatcaatatgatgattaggatgaaaacagagaagtacactgttgcaatggagacacaaataagggagtcgttaattttgccatgagaatatttagatagttcataagaccttgttatagattaggcttgtactcatcaacaaagctttcattagcaagtgaagacttagctgaggcttgaaggatgagtagaaagtaaccagtaaataaggcattagaaatgttttctcagcagagcatggctcatgcaacaaagcaagagaaaacagggtgaattgtagctgactagcagtttgaaggaagaggtgagtggtgaaatatgaggcttgaaagggaatcagagccagataagaattaatactttgtccccaaatttctagacatagtgacattttttaaaagggatcaatcagaacatatttgccttttagaagatactattgcctgcaatgtggagaactcaaaggttatgacccaagacagagaaatatatgaggtgcatttttattaatccaaagtaaaaaaaaagatagtgactgaactatgatcctaacaatgggaataagaaaaatgaacaaattctaaaggtggtaggaagtagtcaacaaaatttggcgattgattagatacaggagattgagggaaggggaagtctataaatgaccatctagcttgagcaaatgaatggatggtaaggtattaaatgagatagtgggtgaaagggagcaaaaacaaggctcatttggggcagttaggaagacaatgagttcaattttaactgcattgtgaatgagccgtaaagtttcactctagacctgtttaagaaggatgggaatggcatcactggaaaattctgaggatccactgggtgacagatgcttggagtacaaaaggtgtatacaaaatgtaggtggagtaagagggcattgagatcaatttggcacattttacattttctcaagtggctgatccagtaggatggtattatatttaaatcaactcagttgaggaatacaagtactctgtgaaagtgttctaataagaatgctcagcatttaggtaggaaataatttcaacacttagcagtattcagtgctcacttcatgatcaagacacaggctctttgtttatgagtaaaatcagatgccctccatagtctggccctgacccttccttgatctttatcctttgacaagtcccttgacttcttcagtgtgacaataacaataataaattgtggccatacagcctatctctgtgggtattgaaaggcttgaataaatagtgtgtaaatacttagagtattgcagaactaatgcctggagtatagaactgaaaaatgcctcatatagtgcagaactgaaaagtgtaagttttttaagggtttatgttctttccccacaaaatatctcttctgcttgaagtactaaataacataaacctatgtcctttttttaaaaaaaaaaaaacgtttgcctaattcattcagcaactacttccttggcatctaccctgtgtatcctgtgtactgaatgatgttgcatgttatcaaggagccccaaacaatgtgaaacatattctctgtctgggaactacttcctatatagttagtaatatatgtcttgcaaagataaaacaaacaaacaaaagaataaaaggccatttatggaggttaaagaaaagtatggtgaaagaaatagtggatcacttctgtgacaagactgggttgctaccgtttagactgatcattgaacacatttctggttgcctacagcacctagcatataggactccttttctatagccactgctcatataaaagagccatgcttgtagttcctgagatctggtttaaattctgtttccattaatattagcatcacaactatgggcatatcccttaacccctgaaaagaagttctagttctgaagtaaaggttacaattaggttggtgcaaaagtaatggtgaaaccacaattacttttgcaccaacctaatattatttatgacatggcattgctagataatgtgaagtccctattgtagtggctggcctataataaaaacccaataaggggtggttactagttgtaattttaaaaacccagcaatactcattttattacaaataaattttagaaatactacctaattaagtactgtgagttgtccagacttgtgagttggacaatattcttactttgtagtgaggaaaatacagcttgttgacattattttcagacaaagaagcaagaagttcaagagcttagagaaagaacaatgtccacagaatgactttggtaattgtgactcactaatcatacagattcaagagagatatatggatttcattggatatcattttcatatctgctaaacttatatgaaactaagataaagtgaaaatcctttgagctcatgggcctttagatctagaataagagctatttctatagaaaaaatacagaattgaatgaaatgtaattctgtggtaggttaatacagactcttggttaatgtgaagatttggtaatgatatgactcaagtataaggatatcatccaaatgtctgcccattttaagttagaagggttttcttagatcctataataaacatgggaagtttcatcggaatcccagataaggatccattgcttgttggccaatcaatacattctggtctttaagaaccagaaaagtaggctgggcatggtgactcacccctgtaatctcatcactttgggaagcagaggtgggtagatcacttgaagtcaggtgttggagaccaagctggccaacatggtgaaaccccgtctctactaaaaatacaaaaattagccagatgtgatggtgggtgcctgtaatcccagctactcgggaggctgaggcaggagaatcacttgaacctgggaggctgaggttgcagtgacctgagatagcaccactgcactccagcctggttagcagagcaagaatccatctcaaaaaaaaaaaaaaaaaaaaaaaaaaaaagaaccagaaaagggaaaggcaaaccccaaaaattcatgggaaagtaaccaaaactgtgctggtgtcataattgtttcattttgtacaattgtttgttttttttgttttgtttttctgtttgtttttttgccttgagatgaagtagaattaagcaacaaaatgcttaagagaatcacattcatgatattattattattttgccattgttgttaagccagctgtgcatatttaatatttcaaatatttgaaatgttttggagaatttgacatattaaaataacaggtcaggcttgctactccagtttaaaacatgcaattgtgtaatcttacatttaaggtttttatttaaaatctcagtaagtttatgtagagtattagaacatcattggtgtaggtttattctattttttaaattaattgagaaaacttcataagaattgtttaagtactcaaagaacttttcagccaatgtaagtatttaatgagtgaaattgaggacactgaaattacactgtagcttaaaatgtttaaaggatgttatgtttctaaatggtaccaaatattagtgaaatacttcccatataaaaaggatattttcccccaagaaattyagttatgtgcactgatcaaattttatttctacattgttgaaaaagaaaagatcttaaattagacaatttgaagctttcatcttgatggttagatatcttttttagcaaaaaggaaacataaaaatatgtctgcagaaagatcattgaactcttgactatcactcagctgagtgaaatgacaactggtttcccagaagaggtcttaatatcattaaaagtttatctgaaaattgcttaatcagtttatcaggaatgctaatttcttcccagaaggaggttatgatttaaaaggtctgtcccaggccaggtcggggacaattttctctttacaatttttttaaattattaactttattaacgtcttctagatttatacatgagaaataaattttgtgatctacttctaattctagtagttactaaaaatcttgattttttgttttccttttttttcttaaaagaaaaccatcttcagattagacttttagttacacaaaaatcaactgcaaatacacttccagcccaaaataaccacaaaaatttatcaagcaggatttcctgcttatacagatttttgtatatgtatgtttacacatatatgtacatatatacacatatataatgtttccatattaagtgtgattttgttatggcttgctgtaaaatacacacatatgcacaggtacccaggctcattggactaaagataaaagatcagatcctatacaaggaaagagggaagaagcaggaatcaggttattacctctgttcctttcctaataattaaacctgacatgtcacataggttcaaacctacaaacaataacaagcaaaatgattagtataggaaatattaggctatcccatccccatttgctcccaaatcttccatcttgttttcctagtccatcatttatctttgttccctaactttgatgtcaacccctcacccttcaggaccaaaacattcattctccaaaacattcatcgccgagaatgctggggactagcctctctcagtaaatatctgtccctagtctgaggtagatttatgctcccctccccaggaacagcttgtgtctatggagatgtgcccagtgcaaagaactgcaattggaaggcaattctgaaggaccaccctgctgggagctctctgcagttgactgagaagtctttgaaagctcatcttttcttgtcagcccagtcctgcttccttctcctcccgccacacagactgtgttgatttcaagagcatttcccaatacctcctgcacacaaacctccacctgagtctgcttcctgcagctatgaacttcaaagaacgcatgggtgaatgatttggaagcctgccttctaggagaaaatcggtctttggttactgaccaaagccggggatgaaggtaaagcatttcatggtaaagggatcaggaattctaaggcagctacgaagtagctggaccatttcctttatctcttccccagcaccatagatgcccaagaaattgaaactgtctgaactatcttacctgctattatcttaattttaattgccctcccatccctatgtattctgtatttaacagatgaagttaataatccttctaataccatcaaaacaattggccatcaatgatattgaagctatgaatgtacagactataaagaactaggctttgattcttatataatcccaatagcagacttaaaatcaggagaacttccactcctcaaagttgataaccaaacaatcctcccaatagaaattcctatccaaatattaatttcatctgaagatgtcctgcactcatgaactctcccttcactgggcctcaaaacagacgcaatctgtggacgcctaaatcaatccaccttaactgctacacgaccaggcctttaccacagataatgctcagaaatttgttttatactatcatccaagaattaattcccttacaaaatttcaaaacctgatctacatccatactataacatcactgtaaagttatccagcattaaccttttaagttaaagactgagatgatctacacctctctacagtgaatgcctcaactagatacttccacatgattcattgttacccagtcaataatcataacttattctcgatcattcagttaaaattatcaagtttcatttaccatgtatctcctacaccaaaaataatcaaaacacaaaaacataaaaactcctgagaattaaaatgaatgaaaatctattcacctcttttattaccccaacaattctaggcctacccgtagtaatattaatcattttattccccaccatgcatttccaacctccaatcacctaatcagtaattgattgatctctatccaacaatgattagttcaacttgcactaaaacaaataataactacccataatattaaaggacaaacctgatcccttatgctgatatccctaattctcgtcattgcctcaaccaatctcctcgggcttctaccctattcatttacaccaactacccaattatcaataaatctaggtatagcagtccctttgtgagcaggcacagtaatcacaggcttccgctttaaaatcaaaacctccttagctcagtttttatcgcaaggcacacctatgccacttatccctatactggtggtcattgaaactattcacctatttattcaaccagtagcattagctatgcgattaacagccaacattacagccggtcacctattgatacatttaactagaggaggcacactagtattatcaactattagtatcaccacagcttcaatctctctcattattctaatcttactgaccattctcaaatttgctgtagctcttattcaggcttatgtcttcacactactagtaagcctttatctacatgataatacacaatgacccaccaaacacaagcctaccatgtagtcaaacccagcccctgactactaacaagagctctctcggctctcctaataacatctggcctggccatatgatttcactttaactccattactcttttaacgttagatctactgaccaatacactaactatgtatcaatgatgacatgatgttatctgaggaagtacatttcaaagccacgatacaacaattgtccaaaaaggtgtccgatatggaacaattctatttattatctcagaggtacttttatttgctggtttcttctgggcattctaccactctagtctagctccaactccagagttagggggatattgacctccaacaggcattcttcccctcattcttttagaagtacccctcctgaatacatctgtgttacttacttcaggagtttcaattacttgagctcatcacagcctgatggaaggtagtcaaaagcaaataattcaaaaactagctgtcacaattaccttaggcatatacttcaccctgctacaagtttcagaatacttcgaggccccttttactacctctgattatggctcaacgctcttttttttttttttttttttttttttttttttttttttgagacagagtttcgctcttgttgcccagsctggagtgcaatggcatgatcttgggtcactgaaatgtctgcctcccacattcaagcaattctcctgcctcagcatcctgagtagttaggattacaggtatgcaccactacgcccggataattttgtatttttagtagagatggggttgctccattttggtcaggctggtcttgaactctcgacctcaggtgatctgccaacctcggcctcccaaagtgctgcgattacaggtgtcaacgtttctcactatctgcctcctccgtcaattaaaattccattttacatctaactaccactttggctttgaagccaccgcctgatattgacacttcgtagatgtagtgtgactattgttatacgtctctatctactgatgaggatcctactcttttagtataagcagtaccattgatttccaatcaataagtttctataatatccaaaaaagagtaattaacctgacactagccctagtaactgacaccttactggccccaataccaacagttatcacattttgactcccacaacttaatatttatatagaaaaatccagccctcatgaaggtggatttgatccattaacctccgcccacctcctcttctctataaaattcttcctagtggccaccacatttctcctgttcgacttagaaatcgctctactcctacccctgccatgagcccttcaaacaaacaacctgacactaataatcagcacagcccttatactagttaccattttaatcctaggcttgacttaggaatgaactcaaaaaggattagattgagttgaattggtaaatagtttaaattaaaatgaatgattttgactcattagattatgatagaccatatttaccaaatgccctttatttatatcaatattatattagcatacaccatagcacttctgggaatattagtctatcgatcccacctaaaatcatccctattatgcctagaaggcataatattatcaatattcattataattactcttataactttaaatatacatttcgctctagcatccacaatacccattattctcctagtatttgctgcctgtgaagctgcagtgggccttgccttactagtttcagtctccaacatatacagcctagattatgtacaaaatctaagtttacttcaatgctagaagttattattccaaaaattatactgttaccaataacatgactctctaaaaactctatatgccgaattaacatgactactcacagcccattcatcagccttattacgctactatttttaaccaattaaatgataactcatctaacttctcattaatcttctcctctgaccctctaacttcgccccttgtaatctttacaacctgactactacctcttataattctagcaagccaatatcacctttccaatgagtcacccccatggaacaaactctatatttccatattaatttccctacaaatttttttaatcatagcattcacagccacagaactaattatattttatattctctttgaagccacacttattcctaccctaattatcattaccygctgaggtaaccaatcagaacgactcaatgcaagctcatatttcttattttacacactagtagggtcccttcccctacttgttacacttgtccatactcaaaatacctcgggttctctaaatataactgtaataatatttaccacccaagaactattaaactcctgttctaataatcttatatgattagcatgtattttagcttttatggtaaaaatgcctccatatggacttcacctgtgactccccaaagcccacgtggaagcccctattgctggctcaatagtacttgcagcagtactcctaaagctaggtggccacagtattatacggcttacccttaccctcaaccccctaacaaatatatagcctaccccttcctcatactatccttatgagggatcttatgacaagctctatttgtctatgacaaactgatttaaaatcacttatcgcatattcctccgtaagccacatagcacttgttattatagctattctcattcaaaccccttgaagctttacaggtgcagtcacccttataattgcccgtggactcacttcatccttactattctgcctagcaaatttgaattatgagcgagtccatagccaaattatattacttgaggccttcaaacactgcttccactgatagcctcttgatgacttttagcaagtcttactaaccttgccttacccactgctattaatctagtaggagaactcttcctcgctatggcttcattctcctgatcaaacatcaccattatgcttataggacttaatatactaattacagccctttactcctcacatatgctaaccacaacacaacgagggacacttgtgtattacattaacagtattaaaccatcctttacatgagaaaatacattaatacttatacactttgcacctatcttcctattatccttaatccttattattatggggtttgcattctgtaaatatagtttaaccaaaacattagattgtgaatctaataatagaagcctgtaacttcttatctaccgagaaagtatgcaagaactgctaactcatgcccccatgcctaataacatggctttccagactttcaaaggataagagctatccattggtcacaggaacgaaaaatattggtgcaactccaagtaaaagtaataaacatgtattttaccactactataacaaccctaatccccttaaacttaccaatcattactaccttagccaacccctgcaaaaagattcatacccatactatgtaaaaatatctattgcatgcacctttattatcagcctcatctctaccacaatatatatatttatagaccaagaataatctcaaagtgacattgaataacaatccaaactcttaaactctcactaagcttcaaactatactatttctccacagtatttatcccagtagcgctatttgttacctgatctattgtagagttctcaatatgatatataaactcagaccctaatattaatcaatttttcaaatatttactcattttcctcaccaaaatattaattctaattactgccaataacttctttcaactttttatcggatgagaagatgtgggaattatgtcttttttactaaatggctgatgatacggccgaacagacgctaatctagcagccctctaagcggtcctgtacaaccgcagaggcgatattggctttattttagctatatagcatgattcctcttattctccaacacatgagagcttcaaaaagtatttattctaaatcctacctccaatccctttccattaattagtcttctcctagcagcagcaggaaagtcagctcaatttggctttcatccctgacttccttccaccacagaaggcccaactccagactcagccctactccactctagcactatagttgtagcaggggtttttctacttatctgcttctacccttgaatagaaaataacctattattccaaaactttacattatatttaggggctatgaccaacgtatttacagcaatctgtgatctaacacaaaataactcaaaaaaatcataggattctctacctcaagccaactaggctttataatagtcacaattggcattaatcaatcacacctagcatttcttcatatctgcacccacagctttttttaaagctatgttatttgtatgtttaggacccatcatccataatctcaatgataaacaagacatctgaaaaataggaggactattcaagactttacccttcacttcctccgcccttattattggcagcctcacacttacaggtgtgcctttcctcacaggcttttattctaaagacctcattatcgaaatcgcaaacatgtcatattccaacacctgagccctttctattactcttattgtaacctccctaacagctgtctgtagtacctgaattattttctttgctctgataggacaacctcacttcacaactctgattcatattaacgaaaataaccccttcctaattaactcaattaagcatctaataattggcagcatcttagctggattcctcattaccaatagtattactcctacttcatccccccaaaaaactatgccacttcacctaaaactcacagccctaggtgtgactgccttaggcctcttactagcaatggagctaaattttataactaacaaccttaagctaaattatccattacagacatttaacttctccaatatattaggtttttactagccacaatccaccatacaaccccccacctcaagtctatttacaagccaaaatctggcctcacttctactagacctaatttgattagaaaagtccacaccaaaaaccatttcacaaacccaaatatcagccaccattactgtatctactcaaaaaggcctaattaaactttactttctctccttttttattttactccttctaactctaaattatctaatctattaccccgaataatctcatttgcaacacaaatactaacaaacaatgttcaaccagcaactaccagcaatcaacatccataactttacaaagcagccacactgacagaatcctcatgcaataaccccaccccctcaccctcaaaaattattcaactccacatactattaaaattaattgtgatgaccatcccatcatgctcaactattcactgaatcaacaccaaccctattaataaccctaataataaagcccctcaaatgtcaatagttgaccctcatgtttcagggtattcctcagtagccattgccgcagtataataaaaaacaaccattataccacccaaataaatttaaaacactattaaccccacaaaagccccatcaaagttcaacacaataccacaacccacagcaccactaataatcatccctagatctccataaatagatggtttcgaagaaaaacctacaaatcctataagaaaaagaatacttaatacgaataaaatatatgccattattcctacacggactataatcataactaatggtataaaaaaatcattgtatttcaactgtaagaatgctaatgaccaaaatacgcaaaacacacccgctaataaaaattattaaccattaattcattgatcttcccacagcatccagcatttctacatgatgaaactttggctcacttattggtgcctgcttaattctccaaatcatcagagaatgatttctggccgtacactacacatcggataccttaactgccttctcttcagtcaccaatatcagccgagatgtaaattatgactgaataatctgctattttcatgctaacggcgcttcaatatttttcatctgcctcttcctacatgttggccgaggtttatattatgggtcatttatatttctaaaaacctgaaatattggcattatcctcctactcacaaccacagcaacagcatttataggttacatactcccatgaggccaaatatcattctgaggtgctacaataattacaaatctactatcagcaatcccatatatggaaactgaccttgtataatgaatctgaggtggattctcagttgacaaagccacgcttacacaacttttagccttccgttttatctttcccttcatcattgcagctctaacaactgttttccttttattcttacatgaaacaggatataataaccttcagggatctcatcagaccctgacaaaatcactttccaaccttactacgtaatcaaatatattctaggcctaactctccccctcctcctcctaatagtcctagtactattttcacctgatctcctgagccacctggataattacactttagccaacaccctcaataccccaccccacattaaaccagagtgatacttttccatccctaacaaactaggaggtatgctcgcccttacatcctccattctcattctagcagttattcctatacttcacacatctaaacaacaaaacatagtattctgtccattaagtcgatgcctattctgaatcttagtgctgacctgctcacactcacatgaatcggagggcagtgagtcaactacccttttattatcatcagacagacagcatccattatgtacttctttaccgtcctcacccttatactaatcattgccctaattgaaaacaagctacttaaatgaaactgcccttgtaatataattcaatactctggtcttgtaaaccagaaatggagaatttcctccccagtacaactcaggaaaaaaagtatacccacttcaccatcaacacccaaagctgaaattctgattaaactattccttgcacttttttcagcacacactttaactaccatgccagtattaatgaactagcactaacacattagtgctcttatgtacttcgtgcattactgctagcccccatgaataatatgttgtactataattgcttaactgtacatagtacattaatacatcaaggtacattaaaaatacaatccacatacatataagcatataagcatgtattaatgactctccaactattgcacattcactatcattaatcgtacaacaaaatccagtcaatacgaatatcgacccatactaaaaatccttaatattacgtagtacataaaattttcatcgaacatagcacatttcagtcaaaaaagtccttgtcaacatgaatatcccctcccaaattttggtctcttaatctaccaacctccgagaaatcatcatcccactcgggagtactaccttcctcgctccgggcccataacacttgggggtgactatactgaaactatacctggcatctggttcttacctcagggccataaaactaagatcgaccacacgttcctcttaaataagacatctcaatggactagtgactatcaccctattagccagtcaggggagcactgtcatgcatttggtatttttaactttgggggatgctattaccatcgcgaaaggcctggtcccctctgaatcactgtagacaaactcggatttgatttctgccaaaccagttgtagaaactgagcttatatttaatattctgacctggcataacaaccataagatgttaattaattcatgcttaaaggacataatgagtaaccaatagacaagtatgcacgatcacgtatgcatgatcatgtaggcacgatcatgtacgcctattttcaagaactattttcaacttaatccacaaactccccctcccccacccctgactttaccatcaacctaggtaagtgtacccttgccaaaccccaaaaacaagagactaaaacccagttagagtccaaaagtcatattttaatcatgaataccccaacaggtgccctttgattgatgtgtttcccaaaaatcttaaaaatctttctactaaattaagcctctacttatataacaaatataataactaaattttcaccctcgtactaatataataccttgaacataaccctctgaaagtgctacccataaacaacagcctaaaacaattacccctaatgtaaaacccctctcaatcaaacttctgccaattcaagttaaaccacttaaattaccataattgtaaatgactatttcttccccttatattttaattttatactcaaacatttatgcagttaatgtagcttaattattccaagcaagacactgaaaatgtctagatgggtctgcacgaccccataaacataaaggtttggtcctggtctttctgttaactcttagtaagattacacatgcaagcatccccatcccagtgaagatgccctctagatcacctgaatcaaaaggagcaagtatcaagcacacacaaatgcacctcaaaatactttgttcaatcacacccccacaggaaacagcagtgataaatctttagcaataagcaaaagtttaaaagctctactaatacttagggttggtcaatttcgtgctagccactgtggttatatgattaacccaagctaatagatcttggcataaagagtgtttaagatctaccctcaataaagataaactccatctaagttgtaaaaaaactccagctgaaataaaataaactacaaaagtggctttaatatcctgaaaacacaataactaagacccaaactgggattagatacccaactatgcttagccctaaactataatagttaaattaacaaaacaatttaccagaatactacaagcaacaggttaaaactcaaaggacttggcagtgctttatatccatctagaggagcctgttctataattgataaaccccgatgcacctcaccacctcttgcccccagcctatatgccaccatcttcagcaaaccctagaaaggttgcaaagtaagcacaagtatacacataaaaatgttaggtcaaggtgtagcctatgaggctatattttctttacccagaaaatctcatgatagcctttatgaaatctaagggctcaaagaggatttagcagtaaaccaagagctgagtgcttggttgaata

SEQ ID NO: 94543 - DNA, 42988 bp, Homo sapiens
tggatgcttcagagttgaatgcatgtatatttaggatagattgtgtttttctactgttttcagttcaaagtcactttcaacttacataagaatggctactcctgttcacttttgttttcaattattataatatatatttaaaaaatatatactataaaaattgattttggtgtgtttgtaatgaaatctttgttcgttcctgtgtccagaatggtattgcctaggttgtcttttagagtttttataatttggggttttacatttaagtctttaatccaccttcagttcatttttgaatatggtgtaaggaaggggtctgatttaaatcatatgaatatggctagccagttatcacagtaccacttgtgaaataggaagtctttttccaattgcttgtttttcttagcttcattgaagatcagatggttgtaggtgtgtggccttacctctgggctctttattctgttctattggtctatatgtctgtttttgtaccagtaccatgctgttttggttactgtagccctgtagtacagtttgaagtgtgatgcctcctgctttgttctttttcctttgattgccttggctatttgggctcttttttggtaccatatgaattttaaaatagttcttttctagttctgtgaagaatgccactggtagtttaataggaatagcattgactctattaattgctttgggaagtatggccattttaatgacataattttttctattcatgagcatagaatgttttttccatttgtttatctctgatttctttgagctatgttttgtagttctcattgtagagatctttccccttcctgattagatgtattcataggcattttattctttttatggcagttgggaatgggattgtgtttctgacttggctgttggcttgacagctgttggtgtatagaaatgctagtgatttttgtacattgattttgtattctgagacttcactgaagttgtttatcagtttgttaaagagcttttggaatgagactagggggttttctagatatagaatcatgtcatctgcaaacaggggtagttttactttctctcttcttattcggatgccctttatttctttgtcttgcctgatttcttaaccatgatttccaatactacattgaataggcgtggtgacagagggcatccttgtcttgtgccacttttcaaagggcatgctttcatattttgcccatttagtatgatattgactgcgggtttgtcatatatgggtcttattattttgaggcatgttccttcaatatctggtttactgagtttttaacatgacgtagtgttgaattttatcaaaagcctttcctgcatctatgaagatgattatgtggtttttgtctttagttatgttaatgtgatgaatcacatttttaatttgtgtatgttgagtcaaccttgaatcccagggataacacctacttaactgggggaagccaccattgtttctgtgtttcttcctttatcagaatgttgttgtgtgtctcataactgtacattgaatgaaattggcttaaattttcacattaaaaggaagatttgcagaatggattttaaaaaatctaggacccaactctatgttctgaactagaaactcactttaggtgaggacataaataatatgaacatgaaagacagaaataggtattgtatgaaagtagtaaccaaaaaagagctgtgatagctatactaggaccagacacaatacaatttagtcaaaaactctgacaagagataatcaagacatagtacacaggcatacgttatagatattaaatgttgggttccagaccaccaacataaaaaatagcacaaaaatgaattacataatttttttatttcaactgcatataaaaattatgcatacactattctgtaatacattaggtgagcaatagtatctaaggaaacaatgtacataccttaatttaaaaaaaattttgttacaaaatgctaacaatcatctgaaccttcagcaggctgtaatctgaactccagttcagacctttccccaataattcagactggaatgacaaattgtccattcagcacctcctcttgagggtctaatgggcatttcaagctcaggatgccacagaaaaaaatttatttaatctccatgcaatttagctccaccttaaattttcacagtctcaatgattcctttctttccatcataaagaactaaatttggggagtgattcttgccttttaatattctctcataaccaatataaaatctgtgaacaaggcctctgatgttcaccttaaaaattacccagaatctgaccacttctcctcacctgctttacaaccatcctgttccaaattactcaatttcttacattggttattaagtagcttcctaactagttttccacttttatccctcaccaacctacattctactctctacacagcagctcagtttcattcagtgtcttcttatctgtcctagagtgaaagccaaatgctttcagtggcctacagggctctgccgaaacatggccttcccttcctttctgacctctttcctaatcctgctgttcccagatcacacgtggccttccctggctacagggactatgcccttcaggatccctctgcttgaagcccttttccctcagctgtcagcaaggctggcttcctccactccttcaggtcttttcttaaatgtctctgtctcagtgaggatcccctgcttaagctattaagctatttgtaatttcaattgtccctgccctctttccatactctacacctttccctacttttttcccttcacagtgcttcctatcatacaacatggttttcattctatgtaattattagttttttgtccgtttctgtctccttgaaagtgagttcaatgcaggcttcgatttttgtctgtttttaatgccgacaacagtatcttgcacgttatagctactcactatttatttttgaatgaaatacactttcatataattcttgaatgtgttccatggaggccattgcaacatattttctggcactccttctacctcttcttccagaattgcacgtttccttctgtttccttgggtgccttgctatattataattgccatttgcactctgtcaccttgtgtaggttttaagctgctaaggttgtagtgacttgtgtgcagccatgcagagttgatctagtacctctgctcagatcctcaatgggctgcagtaaaggcataagtctaaagcagggtctcctgaaggcttagaggggaataacctgcttccaaggtcaggggggaactggcagggtttggtttcttctggactgtctgaatgaaagcctcagttttgagctggctggtgaccagaggccccactcagctcctctccatgtgagcctctcctatgttgccaccaattttatcaaagtttgaaaactgagaaaacagtagagtttcctagcacaatggaaattacaattttgtatttcctaatgatggaaataatatcactcttctttacaatagtcaattgtttagaataaagacacaagtactagtcacagttgatgagagggcattatacacattatacagggccataaataccaggaggcagggatcacaggggaacaatttgccatctgcccacctcttatccaataaaccatgagctccctgagagcaactcatatccttggtagcttttgaaaacctgaggaagtaaaaatagtgccaggaaaccatggacgaacacctttccagttagggaagatggattctgaaaagtgcttgctacaaagcatgacgtcaaatctataaatgttttaggataatgcttaaggcaagtttaagggagcatgaagccctgctttggatttactaagaataaaattggcacactctctttcactaacaaatttcctagactgctaaattagggaagtgacagagaaatgtctcttacttgggtaaaccatttagtgcaaaatacaggttaatattgcaaacatgttagacaaatttttaatctagtgaatgatgagcttcaggctattaccattaatagacatgctttttttgtgacttgacacagaacttaaccccatctctgtagggttctacagttttaccagtgtaatataaatagtatacttgccagatttataactgatacaatgttgtgataattataaactacagggaatcagaatcaggcagaattcggaccttgagcagccagagctatgggttcaaaataagataaatgacaacgtcatgtttcaggattgcctctaagataccaatggcacaaatacatgttggagaaagcacckcataataaaaacaccaaagaaaataccacttaagcatcttatctagcagaagctccttattagtggagagtgtaatttcaatgatgtgattttttttgacctgcttcatagaagctaagagaataagaggcacacagagaaggctggtcaacctcacccagggaggttatagaagaagtcatcttctctttttatagtatttcataatgtgataattaaatctattacttaaaatttgaaaaaaataaaaaaaaagatgaagaggtgtttttagcaataactggttaccctgctgattatttcaaagtctgttatgttatgttattttattttatttttttgagaaggagtcttgctctgtcacccaggctggagtgcagtggtgcaatcttggctcactgcaagctccgcctcccgggttcatgccattctcctgcctcagcctcttgagtagctgcgattacaggtgcccaccaccacgcccggctaattttttgtatttttagtggagacagggtttcaccgtgttagccaggatggtctcgacctcctgacctcatgatccgcccacctcagcctcccaaagtgctgggattacaggcatgaggcactgcaccytgcccaaagtcagttatttcgaaccatttaaggtattaaccttggtccagacctgttgtcctcacctacagaggatgaaagtgtccaaagtgaattatgcagaaggccatttaggctgagcctcttggcatctgaattggaagccatttttaattttcatttttctcatggttgctgtgtgtgtgtttatstttgcaaaagcaatttaggccctggaattccaagctgttctgttaagacccaggctgctttgctatctcctatctttgttcaaaacaaacaaacaaaaaacaacaataaaaagaaggagtcataaaggatgttagactgtaggaggtgcttttaggataagtaaaagataagaaacccgctggagaccaggagggagttaagcaggctgttctaaaaagagacaatggctggaacaaaggcaagagcatagaaatgtatccatgatctcagacaagttttttctgcaaaacattcaaggaaacaagtcagagaaaatggagtgtggcttgacacaggagggaaatatactgggaataggggtgggtgttcttaagaaatttcattacatgcatggctggcactaggcctcaagcgttattcaaggaattctaataagctgttttaaagggattaacaatcaaatataagtgagaaagttaacttcagttctgtagtagaattagtgttttgaaatgaccaccctaataataactttgcctcttgtaaaggaagtctagtgtacttatcaaggacaaattggtgtggttcatttttcaactaaggaatcaagtgtgaacaacacggaggagaaaatcaaagtcctctggcattcacagcatttctgagtgagttttctgtaaaatactcccacagagacataagaatcagagaaaaggcactggactgattccagtttcattttgaaatcattggcagctgtcatctccatcccgcccatcctgcatttggtgcaaataaagaacgcaggagccttgtctcctactgggctgtcagtgaggaaaaggaggaaagacaggttagctggggatgatgacggatctgaagcaaagccattcagtgaggctgaatgatggacccttcatgccagtgctgggatttggcacttatgctcctgatcatgtaagtggaccccaggaggctgaagtttcttaggtcagctgtacttgcagggcagtcatcaggcaagagccctgcacttgggtagacagtggatgcttggaagggctcatctgggatttcatttaactgtctctaacttgctcctctcaaggtcacagagatcttttttgctttaagtggcatggcaagttattgattgtggggattctgagattgataattttgtgggtatattatctttatttctattaaaagtatcaatgttacctaatatatcaaatgctttccatgtattttaggtgttttacatgcattatcttatttaattccttaacaactggcctaggtaagtactcattaaaatttgttacgttttaaaaatgcaagctcagactgttctcatcttttgctctggtcagagccactctactcttggttagaaatgtgaagggccaaggacccaggaggaatcaaaagccaaaatgaatacttagtggcagctttgctgtgaggttattggggctggaagtatttgccagagagtttcaaccatccaaactttttgctatataagaagccactgcgattctgtyacagtctcatcaatgtattaaaaatatagtagtctttcattttgagggattatctgaagttttttgtcttatgactgagaaaattaaggactgtggacacaaagggtaaggttggagtgaaagtttaataagtgaaagaaggaagattttctcgagtagagagggggcctggatggattgttaactatgaggtcaggtctagggttttgatggactgggaaagaaaagaatttgttgactggtcttggagaaagtgtaactcagcttgtcctgggaccttggtctgggaccaatcaggagttgaagtgatagcttggcctgggaccttggcccaggagcagtcagatgctgaatgataattcataaaggctcatctcacggtccacatgtccacaaaaggaaaggaaagtgcccaccagagcccactggagcccaccatatacatgcccrcaaaagaaaaagagactttcctagaagtctgttggttacacaaaagacaaatgtgtttctctgttggttcttgttctcatatgagtgcagttgttgccatgtcttaggcataaaggacaaaggcattttgatgttgggccttgtttttttatctgagtgagctggaggtttgtgtaagtttccttatctgtgtgtgtagtctgatttttttcaagctgtttctctgtttaaaggagttttaccaagarctcactctaactgtttaagttttttctctcatttttaccctcaggagtggagtccctaattgtcagggagattgggtgttgacttttctggctatttttttgtcggatggtggtgtcatgtggggaacagtagttagagttcttcctggggttggtttaatgatctttggaagaaagatatgtttatgtgtggtgttattagtattaccatttagagtttgatagtttttatgtgagaagaaataatttgggctattagagtacatgtattaaaatgaaataaggggggataaggatagtttaaaaattctgaggttgttgatacgtcctgataattggtagttatagttatgtctgttacgatttcggtgtatggagcttggttttgcttagtttttttggtcttcttttctcaaataaagcaacctctggattatgggtattctatatattcctatgacctggtaggatttgtaggataattgttcagaactagaatattgttctaaattttatattatttatcttttactgtttttattttttgttgtagtcagagattgttggttagttcataagaataagtagggttagtctaaaatgtaggtaaacatttaaaaataattagtgagactagaatttaataacaaatgtatggcaagtttgacacactatttttctctctagttcttatttttgtcaaaaacaagtcatgataggatagtactgagttgtttgtaaaataaattttagtttcatatttggtctgattatctgtataaagaatagtaagaataattttttttttttttgagacagagtctgctctcctgcccaggctggagtgcaatggcatgatctcggctcactacaacctccgcctcctgggttcaagcagttctcctacctcagcctcttgagtagctgggactacaggtgcatgctgccacacccagctwattttttgtattttcgtagagacagggtttcactatgttgcccaggctggtctcgaactcctgagctcaggcaatctgcctgcctcggcctcccaaagtgctaggattacaggcataagccaccacacctggccttacaataattattttatatagggtttttaaattggttttgatggaattctattccataagtaacctcagataataatacctcagtttaaagttgagtctagtcatgggtttgtactctcaaatatttatgagttgggtcaatttttctctttttgaggtcccaagaatatagggttyttgagcctgttagaaagtgacattctttatttattataggttaggaaccctgtttgggaactgcatagacaaggtatgaggccagtttttctaagaggtttttattggtttcggaagttaagtttgattattcaaagggaaatatatccttccagtcaaagtcttggtaaaataatcatttttaaaaattgtgtcttgtaaaagaaaatggatttttattgtactgatgtaagcaattatattgttataagtcttgaatatttataattagtttctgaatttcagaggaaccaggtagagataaataaatatgttttaaattttgttcacagaagtgtatgttattcaatcgttaaaagttgtagttctttcaaaagttttttgactctgaaaaaaacaaaatgatgatcagtaattttttagtgaaaagttaaaaaggattacttcagttttctattagtctattttgttaactcttgttctgtttgatatttataaacattttagttttttgtgagtcttgcatgtttttttattagaaacttgtatttgagagtgtttgttaaagtcttatagttgattataaatcatcttttgaagtggattaaaacaaggtaacaattgcctgtgaatgacaaaatgtccagggtagttgtagctaagaatatgattgacaaagtaatttggttatttctgtggtttacaatagtttaacacaataaccttaattatgattgacagtayatatttagacattagaatcttagacatcttatatggttttggaacatacattaatattatttactgaaatataacttgaggaagattaaatatcattttggcagtctcacatatttaaatatgtcaagtgatcctgttcacttttttggggttgttttaggggccttctgtagtatttaaacattaggggtcagggaagacaatcttgaaactcaagtttaattttgggaagcctgtcgaatatgttagaagtttaaagccaattgatattatgaaacagaatttcagattaccataagtcatttgttttgttaaaatgatttaaacatttgaaaaagtaaaaactttttattagtctttattatgacttgaaaatcttgttcaaaagaaagtcgaatttcacccttttattagttttttattaatgtcaatcccaatttttaatgaaactttatagataattctatttaatcttaaccaatttgacaatgagatgagatttttataaacctttaataattctttatacatattgttaaagtagattagcttcttaagaaaaccttggggtggcagccaagaaggccgaataggaacagctctggtctacasctcccagcgtgagtgacgcagaagacgggtgatttctgcatttccatctgaggtaccgggttcatctcacaagggagtgccagacagtgggcacaggacagtgggtgcagtgcactgtgcatgagccaaagcagggcgaggcattgcctcactcgggaagtgcaaggggtcagggagttccctttcctagtcaaagaaaagggtgacagacggcacctggaaaatcgggtcactcctaccctaatascgcgcttttccgacgggcttaaaaaacagcgcaccaggagattatatcccacacatggctcggagggtcctatgtccacggagtctagctgattgctagcacagcagtctgagatcaaactgcaaggcgacagccaggctgggggaggggcacccgccattgcccaggcttgcttaggtaaacaaagcagcctggaagctcgaactggagcagaggtgtggagcccaccacagctcaaggaggcctgcctgcctctstaggctccacctctgggggcaggrcacagacaaacaaaaagacagcagtaacctctgcagacttaaatgtccctgtctgacagctttgaagagagcagtggttctcccagcaygcagctggagctctgagaacaggcagactgtctcctcaagtgggtccctgacccctaacccccgagcagcctaactgggaggcagcccccagtaggggcagactgacaccgcacacagccaggtactcatttgagacaaaacttccagaggaatgatcagacagcagcattcgcagttcatgaaaatccgctgttctgcaatctctgctgcggatacccagrcaaacagggtctggagtggacctctagcaaactccaacagacctgcagctgagggtcctgtctgttagaaggaaaactaacaaaaagaaaggacatccacacyaaaagcccatctgtgcatcaccatsatcaaagaccaaaagtagataaaaccacaaagatggggaaaaaacagagtagaaaaactggaaactctaaaaagcagagtgcctctcctcctccaaacgaacgcagttcctcaccagcaacggaacaaagctggatggagaatgactttgacaagttgagagaagaaggcttcagatgatcaaactactctgagctacaggaggaaattcaaaacaaaggcaaagaagttaaaaactttgaaaaaaatttagatgaatgtataactagaataacaaatacagagaagtgcttaaaggagctgaaggagctgaaagccaaggcttgagaactacatgaagaatgcagaagcctcaggagctgatgcaatcaactggaagaaaggatatcagtgatggaagatgaaacgaatgaaatgaagggagaagggaagtttagagaaaaaagaataaaaagaaatgaacaaagcctccaagaaatatgggactatgtgaaaagaccaaatctacgtctgattggtgtacctgaaagtgatggggagaatggaaccaagttggaaaaccctctgcaggatattatccaggagaacttctccaatctagcaaggcaggccaacattcagattcaggaaatacagagaatgccacaaaggtactccttgagaagagcaactccaagatacataattgtcagattcaccaaagttgaaatgaaggaaaaaatgttaagggcagccagagagaaaggtcgggttacccacaaagggaagctcatcagactaacgcagatctctcggcagaaactctacatgccagaagagagtgggggccaatattcaacatccttaaagaaaagaattttcaacccagaatttcatatccagccaaactaagcttcataagtgaaggagaaataaaatactttayagacaakcaaatgctgagagatttttgtcaccaccaggcctgccctaaaagagctcctgaaggaagcactaaacatggaaaggaacaaccagtaccagccactgcaaaatcatgccaaattgtaaagaccatcgaggctaggaagaaactgcatcaactaacgagcaaaataaccagctaacatcataatgacaggatcaaattcaaacataataatattaactttaaatgtaaatggactaaatgctccaattaaaagacacagactggcaaattggataaagagtcaagacccatcagtgtgctgtattcaggaaacgcatctcatgtgcagagacacacataggctcaaaataaaaggatggaggaagatctaccaagcaaatggaaaacaaaaaaaaaggcaggggttgcaatcctagtctctgataaaacagatttcaaaccaacaaagatcaaaagagatgaggccattacataatggtaaagggatcaattcaacaagaagacctaactatcctaaatatatatgcatccaatacaggagcacccagattcataaagcaagtcctgagtgacctacaaagagacttagattcccacacaataataacgggagactttaacaccccactgtcaacattagacagatcaatgagacagaaagttaaaaaggatacccaggaattgaactcagctctgcaccaagcggacctaatagacatctacagaactctccacccaaaatcaacagaatatacatttttttcagcaccacaccacacctattccaaaattgaccacatggttggaagcaaagctctcctcagcaaatgtaaaagaacagaaattataacaaactgtctctcagaccacagtgcaatcaaactagaactcaggattaagaaactcactcaaaactgctcaactacatggaaactgaacaacctgctcctgaatgactactgggtacataacgaaatgaaagcagaaataaagatgttctttgaaaccaatgagaacaaagacacaacataccagaatctctgggacacattcaaagcagtgtgtagagggaaatttatagcactaaatgcccacaaaagaaagaaggaaagatctaaaattgacaccctaacatcacaattaaaagaactagaaaagcaagagcaaacacattcaaaagctagcagaaggcaagaagtaactaaaatcagagcagaactgaaggaaatagagacacaaaaaacccttcaaaaaattaatgaatccaggagctgtttttttgaaaggatcaacaaaatttatagaccactagccagactaataaagaagaaaagagagaagaatcaaatagatgcagtaaaaaatgataaaggggatatcaccaccgatcccacagaaatacaaactaccatcagagaatactacaaacacctctatgcaaataaactggaaaatctagaagaaatggataaattcctcgacacatacaccctcccaagactaaaccaggaagaagttgaatctctgaatagaccaataacaggttctgaaattgtggcaataatcaatagcttactaaccaaaaagagtccaggaccacatggattcacagccgaattctaccacaggtacaaggaggaactggtaccattccttctgaaactattccaatcaatagaaaaagaaggaagcctccctaactcattttacgaggccagcatcatcctgataccaaagccgggcagagacacaacaaaaaaagagaattttagaccaatatccttgatgaacattgatgcaaaaatcctcaataaaatactggcaaaccgaatccagcagcacatcaaaaagcttatcccaccatgatcaagtgggcttcatccctgggatgcaaggctggttcaatatatgcaaatcaataaatgtaatccagcatataaacagaaccaaagacaaaaaccacatgattatctcaatagatgcagaaaaggcctttgacaaaattcaacagcccttcatgctaaaaactctcaataaatcaggtattgatgggatgcatctcaaaataataagagctatctatgacaaacccacagctaatatcatactgaatgggcaaaaactggaagcattccctttgaaaactggcacaagacagggatgccctctcttaccactcctattcaacatagtgttggaagttctggccagggcaattaggcaggagaaggaaataaagkgtattcaattggaaaagaggaagtcaaattatccctgtttgcagacgacatgattctatatctagaaaaccccatcrtctcagcccaaaatctccttaagctgataagcaacttcagcaaagtctcaggatacaaactcaatgtacaaaaatcacaagcattcttatacaccaataacagacaaacagagagccaaatcatgagtgaactcccattcacgattgcttcaaagataataaaatacctaggaatccaacttacaagggatgtgaaggacctcttcaaggagaactacaaaccactgcttaaggaaataaaagaggatacaaacaaatggaagaacattccatgctcatgggtaggaagaatcaatatcgtgaaaatggccatactgcccaaggtaatttatagattcaatgccatccccatcaagctaccaatgactttcttcacagaattggaaaaaactactttaaagttcgtatggaaccaaaaaagagcctgcatcamcaagtcaatcctaagccaaaagaagaaagctggaggcatcacactacctgacttcaaactatactacaaggctacagtaaccaaaacagcatggtactggtaccaaaacagagatatagatcagtggaacagaacagagccctcagaaataatgccgcatatctacaactatcggatctttgacaaacctgagaaaaacaagcaatggggaaaggaatccctatttaataaatggtgctgggaaaactggctagccatatgtagaaagctgaaactggatcctttccttacaccttacacaaaaattaattcaagatggattaaagacttaaacgttagacttaaaaccataaaaaccctagaagaaaacctaggcattaccattcaggacataggcatgggcaaggacttcatgtctaaaacaccaaaagcaatggcaacaaaagacaaaattgacaaatgggatctaattaaactaaagagcttttgcacagcaaaagaaactaccattagagtgaacaggcaacctacgaaatgggagaaaattttcgcaacctactcatctgacaaagggctaatatccagaatctacaatgaactcaaacaaatttacaagaaaaaaacaaacaaccccatcaaaaagtgggcgaagttcatgaacagacacttctcaaaagaagacatttatgcagccaaaaaaacacatgaaaaaatgctcaccatcactggccatcagagaaatgcaaatcaaaaccatgatgagataccatctcacaccagttagaatggcaatcattaaaaagtcaggaaacaacaggtgctggagaggatgtggagaaatagkaacacttttacactgttggtgggactgtcaactagttcaaacattgtggaagtcagtgtggcgattcctcagggatctagaactagaaataccatttgacctagccatcccmttactgggtatatacccaaaggactataaatcatgctgctataaagacacatgcacacatatgtttattgcagcactattcacaacagcaaagacttggaactaacccaaatgtccaacaatgataggctggactaagaaaatgtggcacatatacwccatggaatactatgtagccataaaaaatgatgagttcatgtcctttgtaggtacatggatgaaattggaaatcatcattctcagtaaactatcgcaaggacaaaaaaccaaacatcgcacattctcagtcataggtgggaattgaacaatgagaacacatggacacaggaaggggaacatcacactctggggactgttgcggggttgggggaggggggaggggggagggatagcattaggagatatacctaatgctaaatgacgagttaatgggtgcagcacatcagcatggcacatgtatacatatgtaacaaacctgcacattgtgcacttgtaccctaaaacttaaaatataataataacaaaataaagaaaaccttgttttttatttcaatgttcgatttatgaaaaaacatgtaatattttttaatttagttaatatgtttatatagaccgtggttttgtaaaatttttataacttttcacaacctgtttaatctttcatttttattttattttatttaagacagtcttttattcctaggcaaaatatttatttttatgtcttttcataattttttattaaaaacactttttcctgtttttacatagtttgtatgtaaatttatttatagtagtctcaattatatatcataatggtagttcttagtaatttttaagtttagtgtaaaacctggtaagttgttttattgatatgttaggcataaagtctgagtttttctagtatagttagaggtgtggttatttctctatgtcctcaggtcttattaattgtgaagtatgaaagtcagtttgtaaaggtcaaagaagtagtttgcaatcttaaaatatttagtaaatttagtatatgacttgtataacacatatcacatatttatatcttgaagacatttgtattttaccaatactttttaagacwttttattttgtaaagattaaagtcacgtgaactaagaggcattataatttttaattttccttcaaaaatctttggtggtttttttttaggttaattaattagagtttttttttttatagacatcacatatctaacatatatatgactctatagacagaagaagatctagtagttgtaaaattttctgtttgtcaatcttctgattggattattggtctcaggatggagttttttttttaagaacagggctaggaaaatgtgcagtttctagggcctaataaataggtayagttggaagacaaaaatagattttgagagggatttatctgwctctaattctttgggttcaggttccacaaggaaaacagagatttctctcaaaatggaatttgttgtgtatgtgtatatatggtttttcttttatttccaaaggagtctcaggtcatcagaagtcatcttagggccttttatgcaggtattaagggtggtaagacagagtggaggaaagtaatttagttgactgagaataaaaccttttccagaaaaacaagatctaagaagagaaaactataaaggtcttttaaatatacctatagtttcaatatcaatctttagttgagtgttctttaagaaaattatttttcattaattaaaattttacagagaatataaacagtgatgcttattattctttttattggtttgtatagggagaaaggccaaaagtctgagtagattttttttttttaatcgttttgttagtatgtctggcttttcggttttctaggggagtttttcttgaagtcttttttggctgtataagtttgtaccactatttgtttatagttatgttcaggttttctagtttcttcttggatgaaccccttctttattctcatgcctttgcatctgcttctcacttgtcctaagcctctgccccctttggttcctcctgcctccaagccttcagtcccaaaccccactcctcctcattctgcacctgttacacattcaaaaaccacctctgccatcctccctctctgggaagtgactggggttaaaggcattgcttgcattcatgtccctttctccatgtctgatttgttgctgatcaaagttwtaagtatattcaaaaggcttttatatttttctcttcatcaatcttgttttcctagaaaaggttttttttcccagttaactgaattacttttctccattctgtcttgccactcttagtgcatgcataaaaaaccctaaaataacttctggtagcctgggactccctgggaaaatagaaaagttgacacaaatctcattttggaaaaattctctcttttccttatggagcccctggaattaaaggtaaataagtgtctctcaaaatctgcctttgtcttccagctatgcttgtttattaggccctaaaaattgttttcctagccctgttcttaaagggcctcatctggaggccaattatccaatcaggaaattagcagatgtaaatcttataactactagatcttcttctggttgtctgtctggctatatgtgtgttatgtgtgcaatgtctattaaaagagctctaattaattgtcctaaggaaaataagcacttaaatatttttaagaaaaaaaggctgtggaacctttcagttcacatgactttgatctttgaaacttaccagtacagtaaaattagaaatgtcttaagagttgccagcatacgtttttgtttgcatttattaatcaagcaatttcatacttatctctgccaaatactataaggtgtcaaaatttgttatagaggctacaaaagtaaaactcagcccaarcaaaataatctttgcttgtgtaatttttaataaataaaaattaatattagtttaatgaagatagctgcatctgaaactatttagtaaaatatccttacttttaatcttgtggccttaggcagtctagtccacagacatgaaggaaggttttttggggaaagaactgttacctttaatattttaaaaaagataacttatatttaaaaaaccttatgtggtaacttcttgtcctaaagtaaattaactggttgtttaaagaaaggaatgtttacaagtcaaaaaattaaggcatatcagaaattgactgtgaaggtcatggaaaattttataaaagrgaatttatgcaagaaatgttgtacaatttaaaagtaattaggcctcctgaatgctttataaaatgccactataactgttagctgtacaacttgcctgtttgcagctaagtaaaacctaggacacatgaagttaaatgctggaataagtcaaaccttatctgcgcttctgtctgggtcctagtctctacacctagtacagaattaaaatcccaaacttatgaaggttttcaacaaaagtaaaggttgctgaaagttaacactgtaacatgtatttaaaactattgaagaaacagtttatgtgcaaggtgtgtaagaaaagtaaaatatacttttggtaaaaagattattaaggaggcataagaatgtggatttttacctccattyaaaggttgaagaatkgttttaaaagcttaagcaagttttggaaggttaattgtaaaggaaattctgtgtgtaaacatattggctaaggttaaaggggcatcatccagtttttctgtaaattgagcattaaaataaaagcacaaygggtttttcttaaagcactaacctgctctttaacaaaaattataaagggttaaaaagaktctgtaaaaatcttaccttatgctcagacattaaaattrggtaaatatgtatacaaggttttattaaaaattaaatttaaaattaatagcacactaatataaaagtataatttggcttatttagtatcaaatcatgcagaaagcattgtcaaatataaaatggtgtttagctttctttgggctawatttatatgaatacattattgtatgtgtcccaaagttataggaaacacctataattcccatatatcttagtgtgtattatcagtaataattataattgttatgttaaaattattgtgtgccacaggggtaacagatatccttgtcaattgtgtcttcaactatggctaccttaaaactttttgttatccataagcaattgttgccttgttttggtcttcttcaaaaggtggttttataatcagctataaagctctaacaggtactcttaaatgcaggtttctgataactttggagattgtaacatcaaaatagaggaaaaatgttcaggacttttaaagagctaaaatgttaattaatatcaaacaggacaggaattagckgcataaattaaattaataggaagctaatctttttaacattttgcttaaagtattgtaatccttcgttttgcttttcaaagtgaaagacatttttcttttgagctattaacagcttttaacaatttagtttactcccataaacaaaatttggagcatacttgtttcggtctacctgattttctccaaaatttggaaactatctgtgagtattcttaagttatggcaatatagttatttgcataagtgcaataagaatctgtttttgttttgtaacaggacacaattggaaaaactggttattttaccaaggctttgactggaatggtgtgctttcctttaaggaatcaaacttaacttatgaagccaataaagcccttggaaaactaacctcatattttgtctacagagtccctgtacagggtttctgatccatggtaagtaaagaatgtcactttctagcaggccaggaaccctaagttatcttgggacctcaaagagaagagaaattcaccaactcataggtatttaatggtacaaattcataaatggggttggctttaaaaaggccttatctcagattccttctatggaacaaagttccatcaaagctaatttaaaaggcctatgtaataaataattattcttgctgcactgtatrcaaataattaagccaagtataataaagcagaccaatcctaccataatctgtcttttaataaaaatgggaaactgaagagagaaaattatgtttcaaaaactatagcacacctgttgttaaatggtagtgttgtgtaatgttttacactttttattattttctactgtttaaattctaatttttcttgctacaagtttctaaaataagctatgctttcctaaagtcctgtaaaccgaaaaccagatgtttcagcaggcactgcctctgagtcccccgaccatcacaggaggaaatctcttcactgctggtgccaacaactaataactaagggtgtccagaatcctttgcccccatgtctagtgagtccatggaacccagggtaattaagacggtacctgttacaggaatcaactcctaaatacatcacactcgagtcaaaacctggaaagctaaggaagcaacccctgacagcccaaaaatgtcctaaatatcaytgtcaacaaataagaaatcttaagctgaaaatgataaamagtaagtaactaagtgaaaattactcatcttactcagcctcaaccctacctcaccaaatacattttattttttctacctctccttttaagctaaatattacaactttttttaatggaaattatttactatgctaccctcgtgagaaatgcttcactcactctactatttgcggtaggactatatactgtagtaccctcaggatggaatatctgatagataatctcagttactgtaagattttgcttaattattatcctcataacaggaataacagttactaacaataaaaaaaaaaacatggatctttccaaacatgcgcctctgactgtcattaagaaaaaaaatgttacttctgtctcaaccaatcaggcctaataagaaacactgctaaaaagaactaatgtttttacccagcttaattaatcttttccaaaaatttttaaccaacagaatcatggccatttcgtagacaactacccagaaacatctacagaccgtgttgctcctgcaatcaatccaacaccaagaaagtctccccygccccccagcaggaagtagcgagaaacaacacattaccctttgtcctttcataactatagggtctggaattatagaacaggagcaccatcatctcggacaaacactaccactttaaattgcagctccctttctagcctcatgcatttcaaggaaatcacttctcttctaactacaagcagccagaaagagcagacagtaaaacacagaaaagacagctcaggcacagggggaggtgcggtgttatttggacctatgacctgtttttgtagtttccttttgatgtcagtgcttgtctgagtaatacatttgtcttttaagattaattgtccctcarttgaatcaggagatagggaggtgggtttcactaaagtctatctcagcctttccataaaggctgaggtattttcatctgtttttagattcaacatggacagtttagagtaattaagagacttggttctgattttttgtcagtcttttaatatgtacatcagaaagtgctttctttttcacacctctatgggatcactagaactctagttagggttttcaagggatattggctctcttgttattgggaatggggatcttatctttttcattctctttcccctttttactggttttctttttcagccagttacaggagacatgttttcatctctgaatctctttgttgtctgcagagctctctgtttctcagtagtagttagggtttggtttaagagtaacataacatctctctatgtaagatcaagcacttaagttagattttggaaagccttcatgtatctatcagggtcatcaaataacttgcccaggtctccctctagttgtttaaggtcttgtaatgaaaaaggaatctggactgtagtggtaccatgactatcaggcatttctggtagggatagtagtggactcgggggtttgggtggtagaactggaggaattgatgactatgtgacaagagaggctctggaaaatgggaacaagaagggctggggcacctgggagttgcatttgagggttttctggggggtcatttctctgactttggggagttgtctactgtgggcttgtctgatacaactgttaagagggtagggtcaattttataatgcttacaaagatctgggttgtttttcagggcaaaraagcttgcacataggaaacctcagaccgtttcctctcctgtgtgcaggaaagatctagttgttggatagtattaaaattaacacttttctcaggagtctaggcctgtccatcctagagttggtaagaaagccatgccatgtgtataagaatataagtctttttttttaatctggtggaagttcattataattagcaattgacaaggaaatctgactatttctgtagcatacaacataataaccacagttatggcatattaggtttctaagagttgtatacaattttggaacattcctataaaaacacacacataaatgtaactgaaagaaggtctagctagcatcacgtatcattttacagtgttttttatacaatttaccagataagcctaatcatttactgtcttttttttgttatacttaagttttaggctacatgtgcacaatgtgcaggttacttacatatgtatacatgtgccatgttggtgtrctgcatccagtaactmrtcatttaacattaggtatatctccaaatgctatccctccccactcccctcacaacaagccccagtgtgtgttgttccccttcctgtgtccatgtgttctcattgttcaattcccacctatgagtgagaacatgcggtgtttggttttttgtccttgcgatagtttgctgagaatgatagtttccagcttcatccatgtccctacaaaggacatgaacttataattttttatggctgcatagtattccatgctgtataggtgccgcattttcttaatccagtctatcattgttggacatttgggttggttccaagtctttgctattgtgaatagtgccgcaataaacatatgtgtgcatgtgtctttatagcagcatgatttataatcctttgggtatatacccagtaatgggattgctgggtcaaatggtatttctagttctagatccctgaggaatcaccatactgacttccataagggttgaactagtttacagacccaccaacagtgtaaaagtgttcctatttctccacatcctctccagcacctgttgtttcctgactttttaatgatcaccattctaactggtgtgagatggtatctcattgtgggtttgatttgtatttctctgatgaccagtgatgatgagcattttttcatgtgtcttttggctgcataaatgtcttcttttgagaagcgtctcttcatatcctttgcccactttttgatgggttttttttttcttgtaaatttgttggagttcattgtagattcttgatatttgccctttgtcagatgagtagattgcaaaaattttctcccattctctaggttgcctgttcactctgagggtagtttcttttgctgtrcagaagctcttgagtttaattagatcccatttgtcaattttggcttttgttgccattgcttttggtgttttagacatgaagtccttgcccatgcctatgtcctgaatgttattgcctaggttttcttctagggtttttatggttttaggtctatcgtttaagtctttaacccatcttaaattaatttttgtataaggtgtaaggaagggatccagtttcagctttctacatatggctagccacttttcccagcatcatttattaaatagggaatcatttccccatttcttgtttttgtcaggtttgtcaaagatcaggtggttgtagatatgtggcattatttctgagggctctgttctgttccgttggtctatatctctgttttggtaccagtaccatgctgttttgggtactgtagccttgtagtatagtttgaagtcaggtagcatgatgcctccagctttgtttttttggcttaggattgacttggcaatgcaggctcttttttggttccatatgaactttaaagtagttttttccaattctgtgaagaaagtcattggtagcttgatggggatggcattgaatctataaattaccttgggcagtatggccattttttttcttcagagtctcggggtcaaaggaatctcaatgcttcagaatgcacttgagaagagtgcaggctgaagatggtttgttactcatctagacaasggaggagaaaagatgtcccttagtctctttcttctttttagagtgacccagggtggagagaaagatagaaagggtgtcccacttttccttttttctctcatcctctgggtcccagtgactgttataggagtcacccatggatgcaagtgtcaccttcacccatagatctgaacaagttagtcgttaggagtagtcatgttcacctgtgtgaggtactagttctgtgtctttctagatttcttagatcataagcctccctggagttaccctaggtgtctgggagacattgtacagtagtcagatttgggtaagaccctttaatgaagggactgttttaaccccatctctgtcttttcaagctatggccctggtaaagcattgaatttctagagaatgagactgattgactattaaacataaagtactcttttttgtttaaatgtcagtgtaagtggatgtagaacaggtgtctcaaaagaagctgaggattgaatggctgtcctcccgctgatggggacatcactgaggctagaatttgtttctccagggaagtttctttctgattggtgaaagtggcctttttctgttcacagatggggtatgaagtttgatcactattagagggatatagaagggagaggaattgggaaacyagaggttttgagcaaagggctgacaaggctccccatggagaaaaaatcctatccccctaggaggtgttgtagggtctgaaatgttaggcaaaaactctgactccagattttttccaggtagaagttagaggtttgaggcttaataggctgttcctataatatgttccacagtggaaaaaaaactaatttgcttcataaagaaactgttaaaattcattgggcagtggtgaatttttacatggaggaaagacaacccaaatggagagggaggagggtattcactcgtggtgaaataaccccctatacagtgtcatgaatgtctatcagtagggacaaaaaggcccttattaggtgaaaatttagacagaaatattgaattccccttgtttctagggaatcacaaaatcagtacctatttgaattacattcctgattacyacaacactggctgagtttacccaataagaatatatccacaacttgtaaaaatgctataacattatatacaaagaaggaacagaagacatgatagccatgaaaagagagaaagaaaatgcagtaggaaaggctagaagttctggtgccaaagccctgacaggctgttgggaactggagttagtgcaggagccttcagataacactgagatgtagcctcggccagtaaatttcagttgtcttaggacctcttttcagctgcatgtgacaggtaggtcttccatgaaagaaaactggagtggaacagaatcaacattcccaacacctgaggatgatgggcattgacgaagtcctcttcaggaagcctgtcccctgagtcttgtaaggctggcagctgccctattcactgacaggggcccagtgttttgtttgctcttgagagagaaaaatatctgaaatgaaagtaaagagtttgacggttggctcctgctaacccttcccataaatcccattcccaacccatgcaccaaaaatatgttacagtctcatcaatgtatcaaaaatgtagtagtctctcatgatgtatcacccaaagttttttgacttaccaccaagaaaattgtggacacaaagggtgaggttagaaggaaagtttaataaatgaaagaagaaagctctctatagtagagagggggcctgaatggtttgtcatctgtgaggttgggtctgggctgttctgaactggaaaggaaagaatgtgttgagtggacttggagaaagtgtaactcrgctttgccttggacctaggcccaggaccaatcagagactgaagtgaaagttttgtccaggaccttggtccgagactaatagagagttgragtaaaagcttgaccaaggaccttggcccaggagcaatcaaaggctrtagtgatgattcttagaggctcagctcacagtcaaaagcatgtccaaaaaagaaaagtgtccactggaagccactgtagcccacagtgtacacgtccacaaaaggagaagagactactttctagaagcctgttggttacacaaaggacaggggcatttctatgttgggtcttgttctcttattagtgtagtyatgggtatgtcttaggcttaaaggacaaaggygtttttatgttgggacaaaggcatatctgtggtgagtcttgttctcttattagtgtagttgttggtatgtcttaggcataaaggacaaatgtgtttttatgttgggcctttgtcttttatccgaatgggccagagatttgtggaagtttccttatctgtgtctgcagcctgatttttcaggccatttctctgtttaaaggagttttaccaagaacccaccctaacttactaacttttttatcttaattctacacattaggaagtgagaagggaagacttaggaggcatagtgtcataatggggactagattgtgcttctcatgaaatacactatttgccatccactcagtttactgaagggaatttaaagtgtcacactggtcacagkgaggtagggtgagctttggggttgctttgcaagaattgctctaaaaatgayagaacaatgtgcttaatcttggtagaactataacatgagaagtcaatttacaacagctgtcagacagggccagttgctttcagtggcataattatccattttatccagtaagtataaggtgtgtctaatatgttatattcaatttctacagttgattgatrtggaatgagacatgatttttccatgctccagggtgaagccaatttctctaattcatttgggaatagaagttatactggagtttaatcaatgtcctcagagtacaggtctgtcactgaaacccgtgtcatcaaaattggaggaggcggccagcagaaaccgacagtgaaaatgctattgggggaaatgcattgattttctttgagttgggcagatcaacaactctttactcctgtcttatagactcccaaaagccaggctgccraggccaccaaagtggctattgacgtaggcttccrccatattgattcagcatacttataccaaaatgaggaggaggttggacaggccatttgggagaagatcgctgatggtaccgtcaagagagaggaaatattctacaccatcaaggtgaaagttctgtgtgtacagtagccagaggccactataagttcagatatattattttgaaatgaaaacatggtctaagttgaattctttatttacctcctaatattatgaaggcatattatagaaacagaaaagacttkcttactctgaaatattttactggtagaacacaattcttcagtgtctctgagcatcagacagtattcatgtataaaatggaaataatamttatctcctttaactgttgtatggattaaccaagccactatgggtccactccttcagttcttcagtaagagctcttaggatgtagcaagtaaggtcacatattaatcagaaaagtgatccagacaagaaaacactttttctcaaatcagcattgagttttctgaactctctaaaattgtcctagatggaaatccatgcttcatatgtaaacagagctgaggtctccagggatgcaccctgtgtgtgtttacatygataatttatttttagaatgtaggtctctcagaataattctttctaggaatttattatacaggacaagagattctgttctccctgtcctgccatttcttgactcattttggtggatgaatcctctaatccttgatacgttgaagttgattttcctgccccttattagttttactcacagttttcttcacagttttcttacattgcagtcattcaaggaaatctcagtatcccagcaaggacttgatttatactgagtaayatrtgtttagtcccagctcttttagctttggaccacagtgttttaagactcatatctcaatgtctgaccatgaagtttaatttttgtcctcaaatgtgtgaaattataatccatttttgtttcttttggtcactgcagctttgggctactttctttcgggcagaattggttcacccggccctagaaaggtcactgaagaaacttggacyrgactatgtagatctcttcattattcatgtaccatttgctatgaaggtcagcttttgtttttccttgttatgcccaagactgtttcatcatgsttataagcatctgaattatctaaytctagcttggtttccagggttcttcctgagagaggcagatttgagtgaggtgcataggattgccaaaactttcgtgagtatctttcacaattgagtgactctaccatcaagattttctgtctatccttgtcccccagccttaagggggattcagattcaatgatctcacttcctctaccctagacagttgagggcattgcactgtatttctcagtgcttgtgttcctgaatggaagccctgagccattaggatcttcaagaatgttgagttaccacagactgcagagatacaatgggaacccccacctctttagtgggagggtctcccgtatgtacccttcagcccaacaaaagagagatacctgggatggtgcatgtggcacagatgggctcctttgggctccgctgatctaacctctcatcacagtggacgttggctgagcacttctgaygtccttactctctgagtcgggtgagcgtaaactggggctaaacacactgatgaatagctatattaagcactgtcctccacaccagcttgtccttgggaaacaaaatgaattccaactgtagggacctcattcttagtgacgagtagggatgtgtggaggatggaacctggaagttatctttctttccactcatgtctttgcacacacatacacatatgtacacataatccacacatgcatgcaaacacatttacacacatacccacacacatatatatacacacatgcacacgtgcatgcaaatgtaggcacaaatatgtgcactcagattaataatcaccacctcctgaaactcttgaaggttgtttggccgagctccttaggcaccagaaaggagaattccatagaaaatgtccttctttatcttcttttctattttccagcctgggaaagaattactkccaaaggatgccagtggagagattattttagaaactgtggagctttgtgacacttgggaggtatgttctgctgcagacaccaggcagcactgtgtagtgaggttggaattgcaggaggaggggtcagaagagatgggattttgctccagcagttgtctgacctcagatgtggagcttctctgtgcctctgtgttctcatctgtgaagtgagagagtggaatgagatggcctctrcagttcattttaattgtaacttctaaggttctaagtagacatagaggcacctttggccttgagatcaggttgaggatgtgagccctataaggggtcagcatagagaagcacaaaaggagtyagcatgttatctttggatagaaacacatcatggaggagggacagctgcggactgactcagcaggagggtggaaggtscaggacagtgaacctgcccttgaaaaacccatttgattgattttttttcatttttttttcccattctagaacagaggtagcagaaaaccctctactaacagaaaacccaagagtctcctttgcttatgactctggtataatttgttaaggaactattgcatrtctcaagccagataggtagyattgaaataagtgggagacaacaaatatgtctacttgctgttatgagtatgcttgtaatagaatcaaggagacaaacatatatgcatagcaaggtaatgcattaggaaattgtatattcaagtgataaaactgtttaattcagtctaatatttatatatgttaaaacagatttccagcatttacaaagtcaaacgccaattgaaaagaaaaatttacactaaaggtctatcacccatatccttcctccccaggccctggagaagtgcaaagaagcaggtttaaccaggtccattggggtgtccaatttcaatcacaagctgctggaactcatcctcaacaagccagggctcaagtacaagcccacctgcaaccaggtgagcccttagcccacygggrccttctctgactttttgctgttyacacacttcctgcttaatcatgtctccaagtttctgcttgatgtcttctgtgtagawgagagttcttttctctcagaaataggagataccagagaaagagcaatttgagtggggtggaagagcacaattcttcagaaggggtgaaagtttctatgagacagccatgtggaggtgctgagttgggaaatggcagctttggtctggagctcgggatggtccaggtggagatacagatgtttggagtcattgctttatggatggtaactaaactcacagacatggatttgttctcctagggaaagttcatggatgaaaaggaacaggtaggaagatccacaggagagggtgaggcagagaggcactggcaaggagactgaaaagaagctgccagacagatggagacaaccaggagagggtggtgtcaggaatccagtgaaagtttcggttttatgaaagaaatcaagtcgtttgtcctgtaaagatttccacatcacttcctaatggcttactcatcgatccacgtgacacactttgacatgttccttttgtacttcctgtaaattgaagcttagtgctacagatctgatctcayttgattaatgccatgcgaatttatgaattttagccaatacgtcattttccattcatcataattactatttttttgatgctcaagtttccatattttgaccagcaggagcctcttcaagtaagatcctgggtcctttggcagcatgcgtcattgtcattcttatcttctctcctttctagagtgcaagctcttctaggctcaaatggaaactttcacactcagaaytggaatatgcccttcctctaaggaatcttggtttctttcagtaaaaatggcttttagaggctataattggggcacaaggtattttaataattttcaaacacgaatagaaaaggaataagaaaattactgtatcagtrtggcaaatgatgggatttgaaagtgcttcagaaggtgcatggggaaaagggccaacatgaaaagtatagtacatctattaatgtagtattacacattccttcagaccaattttaaatttgcatgtggttattggctcatatattgtgacaccttttggtcttgaaaaattacaggtggaatgtcacccttacctcaaccagagcaaactcctggagttctkcaagtccaaggacattgttctagttgcctacagtgccctgggatcccaaagagacccacagtggtaataagaatgtcaaagagttaacctatggcgggaattctgctgatgctgaaaaactcctattaaagcgaagttttaaaaattgtattataaaaaagctcaaagattaaaagcgaaaagcaacggtgtagtttgttcccatgtatcactactgagcttaaaygtcaccaacattctttccttcctgtttcatctatgtgactacttactcccaaccscactcctaaaataaattttaaagtggtctttaggtaagatttgcctaggctgtaatgctgtacaattttggcaaatggacatactctgtaacccacatccctaatgtggtatacaaacttgttatctcccaaagaagttattttttttccttctgagacaataacttctcattgctaggaaactattttctggttttttcaccttagattagttttgtgtgctctaaaatttcctatgaaagagatcatgtgcattagtttgcacctggcttctttcaccatatctgtgagctgcattcatgtagctgtgagtatctgtagttctttccattttattkctgggtgttattccagggtatggataacttgtttatccattcacctgttaatggacagccttattgtttccagttcactgcatttatgaatgaatccatatgaatagttatcagaccgttttaaatcaaattgtattgtgcccactcctctcaactctctggagaattyggggaaaaggagcagcrcactgtagattttccatcctgcatccttcacatctgtgtctgttccctccccaacagggtggatcccgactgcccacatctcttggaggagccgatcttgaaatccattgccaagaaacacagtsgaagcccaggccaggtcgccctgcgctaccagctgcagcggggagtggtggtgctggccaagagcttctctcaggagagaatcaaagagaacttccaggtaaaggttgagcagagtcgctccagagtgagccatgggtgctgatctgggcgatctctcttacatgggagaatgcgacacgtgtcattcattcctgtgctctccactctgtgctaagggaggagggcagtgtggaaggatcgacgagagggcactgaactcagagtcctcaggtttatcatctctaggcttgrctttgccacttactagttggttgacactaagcaaatttcaactcacttattttcatccgtttcaggagttctytacatggtaatgaactttaaggaccctgattcttctccttcaccttctctacctataaatgcctatttgtattttaaaatcaaacccaaataaaattagctgctctgttaaactactgggacaccccagsccagttttcaccacaaaagccccbggcatgactctgttagtgagttttttgtttattaattttacatcatttgctaatacttcagtgtgctctctggactgtgagaacctaaatacaatggctccttctggattatcttttattacccttcccctggcagtgactctagcaggtatgaaactaggcataagtttacagaccaaccaaactaagaaattgagragtgaagttatcttgtaaaccyttctccacatccactctggaccttgtattaatcacaggtctccaacttattttgttttgaatcccacaagaattttgaaaaaatatgtaagctgtttctcattttaaaatgacagctacaaattttattatgagtttaatatttacaagagatgacatttgagtcatatataatgtatttatttcaaaatattgtagttctagattaagtatattaacttgtggraaaattaaataggtaaatctaaatctcattgtgacaacttaaacaaaaaatgcccattttaytttttgatccaattcaaaatgttaatacctgctctcatgacaaccatataacttctgaagtacatttttaaaaagagtggtggataaatgtgttggtagatagaaagaagatggacggatacatatagagaaagagataaatacattagatagatagatagatagatagatagatctgagtctttcatgaaattgtgtcctggatcacataatgaaagtagcatttttttttaaccaaaaaatatctgttttactattaatgggctcctcatcagggactatgtgttgacaaatgaaaactactcttgacttaagtaagagagatttattaaaaatgcagaactctttgaacataagatctaagtgtctcaaagatcaattagtaagcattttttataaggaagagcaaacacagctggaaatagtatttaggggtcctgaggtgagcaagtagaacagttgtccagaaaatgctttttctgaggcaaacagattcttgagtgggagtttcctgtgttctaaggctctgtcattccaaggctggatcaggttccacgggaagtgaggaaacaaatccctgaccaagtgtggacatgtccaggtggcagttattttgcatactttattttctattttaaaataaaggatttcctttttctgcctcaagcaattctcaataaatattttagattgatgagtgcacacctttcttttgagaagtggagcccagtaggagagggatgggatggagaagaggcagaatgaaggtggaagaggtctcaggtggaagacgtctcaagccacatgcacctggaagctgatgaggatgaaaatgcttcccccaatgccatccttgcctctgcctcctggaaagtccttgtattcccatgtagaagctgctgccctggggaggggttaatgtgagtgttttcttcctttcagatttttgactttgagttgactccagaggacatgaaagccattgatggcctcaacagaaatctccgatatgayaagttacaattgtaagtgatgcttgtagattctctcacaggctgttttctgtagtatgcagggaaatggggaacacatcttccctacatcaggaagacaggcccaaattcaggcatggggtgaaataggagatgccctgtagccttcagaccagaggtttcctccaggactcaatctctgacccagcagaaatgtgtctgtaagtgaaactgccaatgtctgcaccattgtgaatccaattcttgaaggcccttactatctgtgcctgggtctascactcagggcccactgcctatgagtctagaaggctcagtgtgtaggacctacaaacctataggggcccatcataacgttctctttaatttatattaaaatcagaagaaaaatgaatacaataataatgcatatgtaataatgactccatccagctctatctttgtgtttacatcatggcaatggaaacacaatttaagtattaatacaggatgggcccatgaaggcaaaggtgcctgtctcctagggaagccttaatgtggtattccctcttcaggataccaactatttctgcaaaaatttatgtctttcttggccctctttacctaccacaactcccatttcctcagctatataatctcaccatgctgaattgtgaatgaattatgagattaatagaccctcaaatgctagtgactgaggtgtcaatagcctttaccaagataagatcctttggagtttctctggatcctcaaggcatgactcttactccagtgtcatctttgtccacctgaagtccacctctggagagcccaacatcccttgactttggtttatttataaacgtgacgttccagttgctcaactactgcaggatctcaggactaaggagasagaaggctaaatagagaggagtttagaggaaagtttagaagcaggggaaatacaattttggttgccagagtaaagactcagtctccaaaaaagatctgaagaatcctcctttatgtaaaaccacaccaagattctgagaggaaacattttcaatgagaaaaatgtgggaagtaacttttctgtacccagaggctaagtataagtctgtgatctgccttatgagactgtgaatgcattgtcttactcatgtctgtggccctgtgtcaatatgactcctggcacatttaactgcttagaaggtactctttaatgtcacccaattaaaaagaacaaattgtaaaaaagaaaaatgaacataaaaaggaaaacaaacagtaattttaattactaacaagtatctttatgattatatttaaataagtcataattgtgtttttcaggtgtgggtattagaaatgcatctcatcccctccatagattaaaccatgtgtgccgaggtacaagtagggacgtrgtggtaaattcgggaattttagcccatcccaagtgcttcttcagaaaaactctttgacagaatggaaaaaagttactaaattaatattttttctctttcagtgctgctaatcacccttattttccattttctgaagaatattgaccatgagctattgaacattaccaccacaatttcctccttttaggtgacagagagaggatttcagtatttgatagaggagtaggaagtaggatctgtagttgcaggttgcttgcctttctttattttatgaaatgaagactttaacaagaagatgtttgtttttcctgattattaaagtaatacccataaattttagaaaaataaaaaatacaaaaaaagacctgtaattctttccttacagaatacttatcatttgatgcattttccttcatgatttttctaaacaacatgtctgatatggtttggatctgtgtccccacacaaatatcatgtcaatgataatctccagtattggaggagggatctggtgggaggttattggatcataggggcggtctttacccttgctgttctggtgatagtgagttctcatgaaatctggttgtttaaaaatgtgtagcatctccccttcactctcttcctgctgctctggccacatgaagacgcgtctgctcccccttgccttccaccatgactgtaagtttcctgacgcttacccagccatgcatcctacacagcctgcagaactgtgagccaattaaacttttataaaagttacccagtcttaggtattcctttatagcagtgtgacaacggactaacccaatgttcacttatttacatatgtgtttttataaacttgaaataatcaatgttcagattctatactttttaaataactaccatatttttccaagcaagcaactattattcaaaaattacagaattatattttacttgttgtaaagcagtgtatctttcaatgtattttgtttcttaatcatctacccacatttcggcatttttattatttttgtatattgttccattcattcatttattaagcaaaactttattgagtatccattgtatgccacacgttgttttagcagtaaattaaataggcaaaaattaaacaaaataaaaattttaaaatccctgagtttgtagtctagtggagaatgtcaactatgaatgcaagaaacatataagtacgtagttgttagaaattgctaagtgcttgtagggagatccttctgcaagatctctaacattgctgcatatttgataaggccactgattgccctccattccaaacttttttttcaagaaatttgtacattgaacagctttgtcatataaaggtggtagctccctccaagaaaatgaagacatgtttactgtccagtaatacaaagaaaagaaaatatctccccgcattaaaatcacagctttaggggctaagagaaaattttccctttgcactctgaagggccaatgaaaatcacctgatgaaaggcagactcattatgaaaaggcatacaatttaattaatgttgggactcataaaacaataccctcaaatgaaggccccagaagcaaaaggttttctctgaccctctcctaatctgctgtctctcagtcccattcttctccaaggctagccacagaaactagaatccctcttccccacagcatttccacggagaaaaatgttaatgtctgaagtagtccacagatgaggttttctagagtccttgaagtatttttaaattgcaatggcaatctgacaatttttctgagttgtagtttgatcctggtgttccagtaaattttctgagcagtttatacatcaacagtcacaaagctacttatacaagttgctgtgatgatttactctgagccacatagatcagtttgcttaaaaaattgtgtccatttttggcggtaacagcaaatatgggctagagctctatgtatgattcaagcaaacagtggcattcccaaatgggaactggaaagacaaaaattatgtttcaaaaaactatagcacacctgttgttagttgttcttgagtttttattattttctgtaatttgcactaaatcccaaattctttgtgggctgcaagtccccaaactagtgctttcaaatttttacatttaaaactggaaattgcactctttatcctagaattcattatttacctgatagtatgctgtttgtttaaatgctatactaaaattatagatgacaataataatgcctttgtcatgcaaaccttagaatcccagcccagcctgcatgagtacagacctcaacttgaggtcaactctattcctactatgactcctgtcagcaggaagaagccagagtggtcattggccttttcccatttttatagcccacaccttaagaataaggtgttataaaactcaaaggggctgggtgcagtggctcatgcctttaatcccagcactttgggaggccgaggtgggcagatcacctgaggtcaggagtttaagaccagcctggccaacatggtgaaatcccatctctactgaaaatacaaaaattagccaggcatggtggtgtgtgcctgtaatcccagctacttaggaggctgaggtaggagaatcacttgaacccaggaggcagaggttgcagtaagctgagattgtgccactgtatgccagcctgggtgacagaacaagactgtgtctcaaaaaaaaaaaaaaaaaacccaaagggaagaattgaaaccactagtacaaaattataattagaaaattattgcagtgaaagagaaggaaacaaactgactccatcctgcttctaacctccaagctcttcttgttcactcatgggcataggctgaactaacttttgggggaacttagtttgtagtttgaaacaaagatgataacagccctttcccaaaacaaaccctttcctgcctggggactagactgctttagtaggactaatatattagccacaagattagaaattatggtttacgagtcatgcggctggaggctataagattctgaacttccataaattgctcctggataacatcacttttgtaaagcctaagatcagtgcttgagatattttgcagaccctgaacctgatagatcagctggtgccacccagattaataaactggctcattcggtcttgtgccccccacccatgaactgactcagtgcaagaggacagcttcaactccctatgatttaatctccaacccaaccaatcaacactcctgactcactggtcccctacccaccaagttattcttaaaaattccaacccctgagtcttcagggagactgatttgagtagtaataaaactctgttcttctatatacctggaacagtgtgaattaatctctttctctattgcaattcccctgtcttgatagatcagctcattctaggcagtggcaaggagaacccaccgggcagttacaatgttgtcttgattaggtcttatttcttgggaaactgagtctcctttctatgagaagtagaggttttttttttaatctttgcattattatgtggctaaatgaatgacttattttacagtgatctgtgactttattttgtggtataaaatgtcttaaggctttgctatttgacaaacgttccaaaaatcaaaagttcaagttacacatttagtcttttttacctcattaactttcacaaatattagggctcctaaagtccaaaacttacatatttgagatgttaaaattatacaggaagcattgtcaaatatgaaatagtgtttaactttctttgagtgtgatttatatagggtgttattaatatgtgttcttcaattatatgagatttctataattctgatatatcttagtatatattcttaattattataatttttatgttaaattggtgtatggcataaaatattcctttgtcaattgtgtctttgatcatggctatcctaagaattttgtcatccaaagacaattgttgtcttaatttgatccttctcaaaaagcaacttataatcacctcttgtccaagacttgcttctttaaatacacttgcagaaaggagtccaacgggtacatttaaatgcatttttgtagtaaccatggaaattgtgccattggactaaagaaaacatcctggaatcccctcagtgaagagctaatatgttcataaaattattagctccaatatcaaacaacatgagttcattgcatgggaccaaactaatagaagactaaaacaattttatgacattttgtttaaattactgctgattctttctgttttgtttttcaaagtccagaagactttattcttttgagctgtttttatagctttcagtgactgagtaaaatattcttttttgagaaaaatttgaaacaaaatttgaaaaatattttttctcttcgcctaattcttccagaatttgaaacgtatttgtgagtattcttaatttatggcaacatagttattcacataagtttaataagaatgtgtttgtttttggaataagacactaataatttatcaaagctttaactggaatgacatatttgcagaaatgaacagattactttgagaaatggaggttaactttataaagccaataaaagtgccttggaaagactgtccttttaccttgcctattccatctacagggtttcttacctgtgaaaaataaagaatgccattttatgacaggtccagtaacttcaagttattttgagaccacaaaaaagagaaaataaaccaatttatgcaattcatctgaaggcacagatacatttttggctgagatagaaaggtctttaaaagtctaatctgagagtcttttaaatagcttcagcaaagccaatttataaagagcctattgaacaataattattcttgttgcaatgtatgcaaataatcaggccaagaataataagactatgacatattttgcaaataaattgtttctatcattatttgtctttgataaaatctagggactggagagaaaaagtatgtttcaaaagaaactatagtacacctgttattagagtctacacttgtccattgcttctcagtttttattacttactacaatttatctggtctgaatcctaaattattttctggctacaagtcaacaaaattatgttttcatttttttctactactttccttacttggaatcaccaaacatttaaatatatataacagctatatatatatttgtgcttactgactgtagagtttttagtagtaaagacagaatctgtcttccaggattcctttccttttcttgttgtaatctgaccttggcatctttttttctattttttctttctttctgtccctgctttcttccacaggacgcaagacttcacagcctcctagaaattagacttcctggtatgacataggaatgagccttactaagaaaggaaagaaagaaaaatatattctctggaccccatactcactatgtcagaaggaaagttaagcttggtaatggagtcatccaaaagctgccttccttttatttccaaacagatatctgtaattttgcatgcttactatatcctatataaaatgtagatttattgagcgcaagacaaatgcacaattttttccctactgctttgttttcacgtgtaagatagtagattcagtgagcactaataagaggctcacaagaatgtaatcacttgcctcattctgtacctgacctgcatttttttatcctcaaatatttgttctttaccctttagatattgcagttcccaaaatcctctttgaaaaaagttcaggtcaaagatcttactgtgacttgcatttttctttcttgggtgtgtcctcaaccttgccaaaacaaacctctaatagattgatatctgcctgggttactttttggtttacaataagatcaattatttatttgaggcacatgagtgttattgctgactcaaggatgccctgcatctctcctccccacttcttatttttactttcctcctccctgcttctcccctcctcctctctatctcctatgttcctcctcctctctatctcctatactactgagcattctcctggcctcctgagatcagtttctcattcagccagattgtatacaatcttc

SEQ ID NO: 94544 - DNA, 25338 bp, Homo sapiens
cattcctgccccatcagcctgaactacagaagaaggcggtatttcattaacatcccgttgaggatgcggggccagggtcagcctgattgactgacactcctgtctgctcagtgcccctcctcctccctctcctgctctgctgtagcccaggagagcggcctcttctgccctgggtgctgccctctctgcctgctgccttccagctggacttggccactgtgaggcgctgctgagagcagaaagggaagctggagtccaggtgcctttcttcccttctctaggggacacagcagcagcttccatccctccagtcgtcctggctgcctccctcaggccctccatggctgctgcttcttccagggaccccgggctctgcctccagcactgctacctctgtttctctagcctaggagggtagcgacttcctgtgtttaaaagcctctgggttgctttattgtttcctgactggcttctttctagatactccaaccgtctgattacacatcctgtttaaataagcagcatggatttttatatcctggttcatgactgatgctgttacctcaagatgcccctggtgttctgaacctcctcagggctgccaccctgcacctgtccacaagcggccacgcgtgaactccccctgtggccaccatgctggcctcctgtgctgctgtgttctctgactagagcatttgtcactcagctgggcatagctgtactctgctgaggaaggccctgctgttagtcccagccctgaggggagggatgacgaatgctttgctgctctgtttgagtgcaacatgggcctctcaatttcccactgcaaaaaacagtgttggacgcaatctttcataaggatttagagatagtttgcagatcacagaaaataagaacagagcacagaaaaacttaaaaaaaaaaaaaaccccactgtgcctatgcttagaactcaatttcattcattccgcaaatatttattgagcactgaccacatactagggagcttttctaggtgtggtgattagtgttggagaaatcagtcaataaatatgaaaacataccacaaaataagtgaataattcaggcaattgctctggtcacaattgttctgaagaaactaaaactgaggagtaagatggagagacacagtggggactggggagctactttgattagaatgacacagggacaaagacatcaccaagaaggtgagactgaagccagaaaccaatgatgagacagagggggtgatcgaggctctggaaaacctctgcacaggtaggtacgagtctctatgtgatgcccacattttcctagagaagaacttgacaaggacatgtccatcttgttgcaggggcagggagtgagtctcaggagatctcaattgagtctgtacctttgcttgggatgcaggacctgggagaggtagcccagagcagcatgaaggccttggctggggtggggcaggcctgggagtgaggggcagtgagcagccccagaacactatgaccctgctgctatggcctccctttgccctgtgcaatgaatggaatctttacatccccaccaaagtcgtatatgaagccttaacccccaaggtgatgctatttggtggtgggtcctgtggaggtgattaggtcgtgagggtggaaccctcatgaatgggattagagcccctcttagtccatttattgttgctataaaggaggacttgaagctgggtaatttatagagaaaagaagtttattcagctcacagttctgctggctggaagtttcaggactgggcttctggtgagggcctcaggctgcttccaagtgtggaagaaggtgaaggggagctggtgtgtgcggagatcgtgtggtgagacaggaagcaggaaggaggggaggggccaggttctttttaacaactagctctcatgggaactaatagagtaagaccttacccccctcccctgggagggcattcatctcttcatgaggcgtctaccccatggcccccaagcctcccattagactccatctccaacaatggggatcaaacttgaacatgggatttggaagggacaaatgtccaaactataccagtgcttctgataaaatagcccccagagagattgcgtgcctgtttcgccacatgaggacagtgagaggacagctgtctgtgacacgggatgcaggcccccgccagaccctgaatctgccagcaccttgatcttggacttttagctttcagatctgtgagctatctatgtcttttgtttataaccctcccagtgtacagtactttgtcacagcagtcttaacgaaccagactcccggtcagaaggtgtggtcttaaccagacttttcagaaggcattttgagaactctgaaagctgatctttttggctccctacttatgtgggggtggtaaaagaggggtaaggtgtgtttccccagagagtcgggcagcatttctctttgttgcttgacaatggattcccatttattcagagaggattatatgggtgtgtcttagtctgtttcctgttgtgtaacagaatagccgagactgagtgactcataaaaaacagaaagttgtttggctcagtcttggagtcttgaaagtcccagatcacaggccccacatctggtgaggacatttgtgctgtgtcatcccatggcagaaggcagggggcacgagcgcaggggtaagaggatgagagacaagagagggctgaaatgacttttgcaataaacccactctcacgataatggacccgttttcrcaataataaggtcagtgcttcatgacagcagggccgttatgacctagtgacctcttagagggcacgtctttacactgttgcactggggattatactttcaacacatggactttgggggacacattcaaaccacagcaaggtatttggcattttatcgccatgcaatgttaacatttctctcataaccctgggttagcctttcctcgtgaattgcagcatccttgctgaactcttgttctgtatggttaaatctcctatcagagttttggggctgtatccaactctttgtagttttgctgtaaataatgacttttctttctgtccagcaaaatgttttaaaacaagatgatacttgatatggaatggctcaaacatcctttattcctctgataaataactcacttggtgtgaataattcaggcaattgctctgatcacaattgttctgaagaaactaaaactgaggagtgagatggagagacacagtagggactggggagctacttcaatgagagtgacacagggacaaagacatgaccaagaaggtgggaagaaattctttatcccctcatcatcctatctggtggtccccactagagaaaacccgccaggatttctttcagtgcagctaaaaaggtaatgctggtggctgagactagctctgagaggagaataagcttgctcagttctttaaggcctcagtttttagctggcgggtggactgaacgttagacaaatttttaacctgttgaattgtggactccaggcagttcacatcaacgaagacagaattttcttgtgacttgatacggaacatctctatttagtgcaaaagctttagcaatggaatataaaggatattctcatcaaatttatagcaaacacaatgttgagataaatgtaaccacatggactcatagaatcagacagagttctgaccttgaccagccagagggatgagttgaaagtaagataaattataattgtatgtttcataattggctgtaaaatacggatggcacaaatacaggttgcaagaagcacagtataatagaaacattaaagaaaacatgagttaggtgttttatgtagcagaagttccttattagttgagaatgtaatttgaatgatgtggttttttggcctggacggtagaagctaaagagtatgcagggaagggcatcagcttcatctagggagatcatagaaggagtcataaaggatgtgtgactggaggaggtgcattttagataagtaagaagtcattaaactgctgaaaactaggtgggatagagaaagctgttccagaaagaggcaatggctgaaagaaaggcaagaatacagacatttatccatgatttcagacaattttttctcaccaaaaggattcaagaaaacaagatcgagaccatcctggctaacacggtgaaaccccgtctctactaaaaaaatgcaaaaaatttagccgggcgtggtggcgggcgcctgtagtcccagctactcgggaggctgaggcaggagaatggcgtgaacctgggaggtggagcttgcactgagccgagatcgcgccactgcactccggcctgggcaaaagagcgagactccgtctcaaaaaaagaaaaaaaaaaaaaaaaagaaaacaagacaatgagaatcaaaaaacggaacggtccttggtacaggagacaaagataatgaaagtaggagtaggtcttcctaagaaatgttgttacgtgtgtgctcgggaccaggtgtcaggctttgttcaataaattttcagtgaggtattgttatgggatttatgatgaaaggaatggtgaggaagctaacttaggtactctgggaaaattagtgtttagattcactagcctaatgatagttttataccttgtaaaataagtctggtgccattatcaaagacatatttgcatgctttttttgaacttttattttaagttcaggggtacgtgttcaggatgtccaggtttgttacacaggtaaacctgtgtcatgcgggtttgttgtactgattgtttcatcacccaggtattaagcccagtacccattagttatttttcttgatcctctccctcctcccaccctccaccctctgataggcccaggtgtgtgttgttgccccgtatgtgttctcatcatttagctcccacttataagtgagaacatacagtatttggttttctgttcctgtgttagtttgctaaggataacagccactctctccatccatattcctgcaaagcatgtgatctaattcttttttatggctgcatagtattccatggtgtacatgcaccacatcctctttatccagtccatcactgatgggcatttgggttgatttcatgtccttgctattgtgaatagtgctgcaatgaacatacacaagcatgcatctttataatataagaatttatattcctttgggtatatgcccactaatgggattgctaggttgaatggcacttctgactttaggtcttttggggaatcaccagactgtccttcacaatggctgatctaatctatactcccaccaaccgtgtataagcgttcattcctctccacaaccttgccagcatctgtcatttttttgactttttaataatagccattctaactggtgtgagatggtgtctccttgtggttttgatttgcatttctctaatgatctgtgatgttgagcatttttcatatttgttggctgcatgtttgcctcctcttgagaagtgtctgttcatgtcctttgcccactttttattggggttgtttgtttcattcgtgtaaatttgtttaagttccttatagatgctggatattagacctttgtcagatgcatggtttgcaaaaatctctcattttgtaggttgtctgtttactctgttgatagtttcttttggcattttaaattttttaacttagaaatcaagtgtgtacaacactgaagagaaaattcaaactcctctagcatgcaaatctttctgtacgattttcctgtaagacaggcctgcagagacatggaagaatcagaacaaagtcaatggattgatttcaacttcatgttgaaattataggcagctgtaatctctgccctgcccatcttgtattgatggaaataaagaacgtggcagccttgtctcctactgggctctcagtcaggaaatggaaggaaaggcagagtcagattagctgagctgtgggtggtgatggatctgaagcaaagccattccgtgaggctgaatgatggacatgtcatgccgatgctgggatttggcacttatgctcctgatcatgtaagtggaccccaggaggctgaagggtcttatatttttttgcactaagaggatgataagctgttgactctgagagtttggaggttaattttttggataattctttttattattattattgtgacctaacatatatcaaatggtttcatgtattgtattttccatgcattatcttatttaattcttcaacaaccgtccttggtaagtactcactacttcttacattaaaaaaaaaaaaaaacccatgctcaggctgctctcatcttccacctgctcagagccgctccactcctggttagaaatgtgaagggccaagggcctagggggaagtggaaaccaacatgaatacttgctggcagctttgctgtgaggttgttggggctggaagtatttgccagggagtttcgaccatccaaaccttttgtcacgtaagaagccactgtgattcagaacattaggtaattcgatgggaagacttagggggcacaacatcacagtaaggactgaaatacagccatccactcagttcatggcagagaacttgaagtgtcacactctggtcacggtaacgtaagggcagctttggggttgctttggagggattgcccccaaaatgagagaccaatggatgggctcaatcttggtagaactctgtcatgagatatcacgagataacagctgccagaaagggtcagtaggttttcaatgacataattatccatttcatccattaggcataatgtgtgtcttacatatgttatatgtaatgtttattactcttagaaaagacagaaaaaagtgccatagagaatagaacaaaattccccataaccccctcatttaccataataaattgtaatacgtgcacgtgcttaatattcagacatttcaaatgcactaagtgaaaaagaagcttccttaatactctaattggtgtttttaccttaagtcactgcaggaacgagaagcttttttcctgcgtgtgtgttgtgctgtcttttgtcctgctgttctaggaagcttgctagggcagaatctcagatgtagtcattagactatccactgtttgaaatttgaggcagagcgtgtacatattatcatcctaacgttgcaacgccagcttggtgaggtgacgtctgtgtcctgggtaaaaccaggccaactattgactgcaacccttactaataacataaacagttgattaacacctattttgcatgttatatgtatggtatactgtattcttataatacagcaagctagagaaaagtaagctagagaaaagaaactcaagaaaatcataaggaagagacaatatatttgctactcattaagtggaagtagatcattacaaaggtcttcatccttgtcttcttcacactgtgtaggctgaggagaaggaggaagatgaagggttggggttgctgtctctggggtggcagaggcagaagaggtgaaggagggggaagggaggcaggagaagtaggcacactttgtaattttgattgaaaaaaattcatgtataagtgggactgtgcagtttaaacctgtgttattcaagggtcagctgtaatatgtatgtagtgtgtgtgtgtgtgtgtgtgtgtgtgtgtcgattgacctgtccttcctattgagtgccttagaaaaattctcccagtatcagaagttttcccgttggttattcttgtacaattgattcatatggaatgagatgtgatttttccatgctccagggtgaagccaattccactaatttatttgggagtagaagcttacaggaggttagttgctgtcctcggagtgtgcaagtctatcatggaaacccaaatgatcaaaaggggagcaggaggccagcagactatgaagatgctattggatagcagagacatgggctcaacctaaatgcccgtccgtggtagaccagataaagaaaatgtggtacataaacaccgtggaatactgtgaagccacaaaaaagaactagatcacgtcctttgcagcaacatggatgaaatttgaggccattatcctaatcaaactaacacagaaacagaaaaccaaatactgcacgttctcacttacatgtgggagctgaacaacacacagggatactgggaggggaacgacagacatcgggaccttttgaggttggaggatggtggagggaggggatcagaaaaaatatttattgggtactatgcttattacccaggtgacaatctgtacaccaaacccctgtgacacagtttacacatataacaaacctgcacatgtgtccctgaacccaaagtaaaagattaaaaaaaaaaaggaaaatgccattgtggaaatacatggattttctctgagtcaggcagatcgttgactcctcttactcctgttttatagacccccaagagcaaggctggtgaagccaccgaagtggctattgatgcaggcttccgtcacattgatgcggcgttcttctaccaaaacgaggaggaggtcggaaaggccattcgagagaagattgctgayggccctgtgaagagagaggacattttctacaccactgaggtgaaatttctgtgtgtgcagtggccagaggccaccgtcagttcagatgtattatttagaaaaacaatgtggtctcagaacaatgtatttacctaatattgtgaaggcacattatcaaaacataggaacaatgtatttcttacctaatattgtgaaggcacgttatgaaaacatagaaaaggcttttctctgagatgtgtgaaaggtgggacactgttcttcaatgtctctgagcggcaggtattattcatatatgagatgagatcgataatacttaagtaactgttatacgattacccaaggcattctggggccactccgttgattgttcagtaattgttctcaggacgtatcaagtgaggttgggatgttattcagaaaagggagccagactgggaaatacttttttatttttcaactcagcattgagtttcctgaatgttataacattttcctagggtggaaaacctttcttccaatgtaaataaagcyttggttactggcgatacagcctatgcctgtttacactgacgacaacytgtttttagaatgcatctctcagcagaattgttttgaggaattcattatacaggacagtagattccattccccgtgtcctgacatttctygactgctctcagaggacgatgccattaacccttgatgcattaaagttgattttcctgctccatctaagttttattcacagttttcttacattgcagtcattcaagtaaatctcagcatctcatcaaggatgtaatttaccctgaataayacaaatgtagccccagttcttcyagtttgagaccacagtgttttgttactcatgtgtcaatttctgttatgtttaattttggtccccaagtgtgtgaaatcataagctactttttatttcttttgttcactgcagctttggacaactttctttagaccagaattagttcgcccagccctggaarggtcactgaagaaacttcaactggactatgtcgatctcttcattatccacaatccattggctatgaaggtcagcttttgttttttccttcttatgccccaaacagtttcatcactgttactagcacctccattgtctcattccagcttgatttcctgggytctttccgagaggggtaggtttgagtgaattgcatagaattgctaaatcattcacgagtctccttcacagccgaatgacattgcaattttctgtctgtgctcatcccccagccttaagcgagatgcaggttcgatgatctcacttcctctatgctagaaacatgagggcattgccctgcatttcttagtgcttgtgttcctgagtgtaggttctgagctattaggttactacagactacagagatacaacgtgaaatctccacctctttatggtgagggtctctcccgtatgtaccctcagcccacaggagagagaggtacatgggatggcacatgtggcacaactggactcctttgggcttcagtgatccaacctctcatcacagtggacattggctgagcacatctgatgtcctcattatccaagttgggtgagcataaacgggggctaaacacactgatcaatagttatggtaagcgctgtcttccacaccagsctgtccttcagaaatgaaataaatttcaactgtagggamggcattcttagtgaagtgtgggggtgtatggaggaaggagcctgcaggtaactggagaaaaagtgttttgctacagtctctcagactgttctcatctttcttttttcccatgtcttctcttaccaaccctcaccccaaacacrcacatgcacatccacacatatccatatccacacacatacactcatgcacacacacatatgcacacaggcacacacacatgcacacacacatacacacgtctgcacatgcagacacacaagcacatacatccacacacatgcacgcatgcatgttcagattaataatcacagccttctgaaagtggtgtggctaagctccttaggygccagaaagggaattctcatagaaaaccttcttctttatcctctgttttccagcctggggaggaattgctgcctaaggatgccagtggaaacattatttttgatactgtggatcttygtgacacatgggaggtatgttctgctgcagacaccaggtggcactgtgtggtgaggttggaatcacagaaggaggggtmaaaagagatggggttttgctcyagcagttgtttgacctcagacgtggaacttctctgcgcctccgtgttctcatcgttgaagtgagggagtggaatgagataacccctacggtccatttttaattttaacttctatggctctacatagacatggaagcagctttacccctgagatcaggttgaggacatgagccctaaagaggagtcagcatagagaagcacaaaaggagtcagcgctttatcccgggacagaaacacatcacagaggaggaatagctgcggcctgactcagcaggagggtggaaggtgcaggacagtgaaccygcccttgcaacacctataccattcatttatttttatcgttgtagaaagaggtagcaacaaaccctttactagaggaaaagctgagagtttcttttgcccttgactatggtgtagtttgttaactattgcrtcctaacagcaaaataggtaccatagaagagagtgggataggtaagaggaaatggaaaagcagctttatgtttmtttggtgtccccagtgtgcatgtaatagaattaaggagacaaatatgtacrcagaacaagaaarggcattcaaaattaatttattcaagggataaaacggtttgattcattataatcgtagtatatcataaatcagattttcggtttataaaaagtcagtgacaaacgaaatggacaaactacagtaaaggtctaccacccatttcctccctccccaggccctggagaagtgcaaagaagcaggtttaaccaagtccatcggggtgtccaatttcaatcacaaactgctggaactcatcctcaacaagccagggctcaagtacaagcccacctgcaaccaggtgagccgttagcccaccggggccttctctgactttctgctctttacacacttcctgcttaatcatgcttccaagtttctggctttayatcacctgtgtagatgacagctactttcatagaaakagaaaatactagagaaaaacagtttgagtggagtagaagagyctgacttcagttctttggggatgggtgtgaagttcctatgagacagccaagcggaggcagagttgggaggtggtcgctttggtctggagctcagggggtggaggtggagacacagtgtttgaaattattgctgtatagatggtaacaactcacagacaaggattagctctcctagggaaagttcatggaatgaaaaggaacaggcaggaaagttcacaggagagggtgaggcagagaggcactggcaaggagattgaacaggagctgccagacaggtggagacagccaggagactgtggtgtcgggagccaaagaaagagcattgaagtggcttgagtcagacataggtaggtcctactgtgagcaaacactccaatagggaaagataaaagtggctggatttagtggcatggaggttatgggaagccatgcagggcctgatccagagtggtaagcactaaagccagatcagaggaaaggagtgagaaagaggaggtgtataaatcgtaatcaaaacatatgattttaaaagaaacatccaatatagccaaatatcaaacatgatttatgacattgttaagtttaaagctttgtgtagaccattttgataattatacaaaaagcagttcaaaaatgtatactctgtcttagttttatatttctagggatatttgtagacaagacgtgttaaaaactcccatctatattatatagtaatataatatatattaacatatatatataatttctaaaaccaaatgattagaattttgaatatccacaaatgaggaattaattaaagttctgatggcttcatagagatctttgagaggatattatgaagactaatagcaaaaagggaaagcttatgttataatattatatcaaaagtatatcagagaattatatactattctgtttttcaggatgcttttaagccacaagaaacagaaaactcaattcaaacrggcttaaagttgattcatttatagaaagtttgggtcttkgttgctctagaagctgtaagatactctcttgaaatgaatatattttgtctgtgctccatgtttgatcgcttcagaatggctcctcatggcaattgggctataggtctcctcattcatgttcagcacagcagagagggttttctggagctgtttctaaagagagaagaataatggtcacagaagttttctagcaatttttttctcatgtttcattggcttgaacaacatattgtgcctttcataaaccaattaatgtaagagaaaggaagtttgtgacacaaaagtgtgaactggcttcttctggggcacagaaactgaatatggaggaagggagaaataactgaacaaaatcaggattcttataaaatatgytaatctatactattcagtayatatactaattttaaattatttaacatcttaagaataataaaaatgactaaaattaagcacacaaaatgattagaggttgctacgtggttctggtaaaattctaggtgaccttgttgtattttttcctatatctgacatgaaaatatttcttttataacttttaaaagtttttatttttgtaaatttttaaraaaagatatagagaatatgaggagttcaaaaagttcatggaaaaatggaattaaaagatgtttataaatatatgaactatttttcaaaataagctttaccaaattcagtatagtttttaaagcataagtatatgcttatgagtatatgaactaagtatgtgaactaatagcaaatagtagccatttagttcatctctaaataactgagagtcctggtaatttaatcatgtcaatgtattctttttattttttacattattaactgtaagaaaaagagtctctgttaaagattcttaaagattcagacacaaaaagaactcagaaggagccaaaccaggactgtaaggtggatgactaatgatttttctatcaaaattcttgcaaaattgcccctgcttgatgaaaaaaacgagtaggagcattggtatggtgaaaaataatctctggtgaagctttttgtgggtgttttcatactaaaactttggctaattttctcaaaacagttgytattcttctttagccctccagagagtcaataagcaaaatgccctgagcatcccagaaaacttgctatgaccttttctcttgattaatctccttttgctttgcctggatcatttccacatcttggtagcgattgctttgattttgctttgtcttcaggattgtactggcaaagccatgtttcacctcattttacaattctttgaagatgcttcaggatcttgatctcccttacctaaaatttccttggaaagctttgctcctgtctgtagctgatctggccacaacagtttcrtcacccatgaattggaaagttcactcaacttaaatttttcagttactatagtgtaaactgaaccagttgagatatctatggtgttggttatcatttctgctgttaatcattggtcttctttaatgagggcactagtaagatacatttttgttttcctgcaaattgatgtgaatggtatgctgttgygggcttcatcttcaacatcatctcgttccttcttcaaatgaattattcatttgtgaacttctgatttctttgggggattttgcccatatattttgtgtaaagagtcaataatttcaccattcttccrcccatgcttcacaataaatttgatttttgttcttmcttcaatttagctgaattcatgtttttctgataggggagttgttttatctttctcaatgcctcaaactasatcctgttcagacacatcataacaaattagtacaagtttattttggagcatttttttttgaaatccatgtatggtttyttcataatgcacattttcaatcaattttttgaatatcccctcatgttataatcattttctttttatgtacccatcatcacacttaagcaataattatctcacaaccaaacatgttacrtagataattctacctctgtattattttgaagcagacatgatatcattgtatctgaaaatgttttgtaaaatattttaaaaatctctaaatctttaaataaacattgccagaatacttttataccacttgaaattgtagcaataatttcttgttgttagtaaatatcatgagtgctaaaatataattttatcatatttttaragttgattcatttaaattgatgtggaaataaggcccatacattgcaattggatgatatgtctcataaatcactctttttttttttttgagacygagtctcgctctgtcacccaggctggactgcagtggcacgatcttggctcactgcaacctccacctcctgggttcaagctattctcctgtctcagcctcctgagtagctgggaytataggcatgcaccaccatgcctggctaatttttgtatttttagtagagayggtcagtctggtctcaaactcctgacctcatgatctgcccgcctcagcctcccagtgttytgggattacaggcgtgagccactgaycccggccaaatcactctttcaataaataagtttgttctcttctttttttttttttacttctctcctcctcttcctcttctgcctcctctgtcttctctttcttctcttcttccttcttctcctcctgctcttctaccttctcttccttctcttcttccatagtcctcattctcattctgcctctttctttccttcaatttactaatgaaaacttaagccttttattcctgtaaagttttcctcsgtataggatatactggttgatccagtgatacaatttaacatgttccttttgtactttctgtaaattgaaagttagagctaaagatttgatcacaattggttaacatcatttgaactcatgaattttaacaaatatgtccttttcccaaccattgtagttactatkccttttgttgctcaacttgccatcattttgaccagcaggagccttttcaattgagcttcttggtcctttgacttgcctcattttctttatgttctttgccatttagaatgtaagctgttctaggctgaacttgtagcttccccagtcagaactagaattagccatttttctaagaaatcttggtttgtctgagtagaaatgtcatttagagactataatttgggcacgagagatgttaatcattttaaaacactaataaaaaaagaataagtaagttatcatgttagtatgaccactgatggaatttgaaagcatttcagaaggtgcatggggaaaatgaccaatatgaaatacatagtacayatattaatatagtactagatattccttcaaagcattttaaaatttacatgtggttatttgctcatgtattctgacaccttttggtcttgaaaaattacaggtggaatgtcacccttacctcaactagagcaaactcctggagttctgcaagtccaaggacattgttctagttgcctacagggccctggcatctcacagagacccaaactggtaataagagtatcgaagagttratctatatcagcaactytattgattaagaaacttttagcatttcattctagatcaagtcaaacatagaacagtgaacacaacggtgcagtgaattcccatgtgacaccactgagcttcaatgtcaccaacattcctyccctcctgtttcatttgtatatctgccttctcccaaccccactccaaatacaatttcaaagtgatttgaaggtgaaatttacatagactgtaatgcatatacgttagctgtacaattttgataaatgaatgtactttgtaatccacattattgtcatgatatggaaactttctcccaaaaatgttaattggtgttccttctgmgacaattcctccccacctctaggcaactatgttcataacgttttcggtcttagattagttttgtctgctgtagtactttatgtaaagaagtcatatatattctttggtgtagcttcttttgctcaacctgtctgtgacattcattcctgtagttgcaggtgtctgttctttccattttactgctgggaaatattccattatatggacatgtacaccacaagttgtttatccattcacctattgatgggcagtttagttgtttcyagtttgccacaaytgcraataaatctctatgaatatttatgagacaccttgaaacatactatattgtgtcttctctcattgtctggggctttgggcaaaagggtagcacactctagatttttcatctatactcttcatatctgttgtttttctccaggatggacccagatagcccatatctcttagaggagccaaccttgaaatccattgccaagaaatrcaatagaagcccaggccaggttgccctgtgytatgagctgcagcggggggtggtggtcctggccaagagcttctctgagaagagaatcaaagagaacttccaggtacaggtcaagtggtgttgctccaaagtgagccatggscgctggtctgggtgatctctcttccaggggggaatgcaccatatgtcattcatgcccgtgcttctctcctctgtgtgctaagggagsgggcaggatggaaaagtgcgaagagatcactggattcacagtcctaaagtttatcacctctagggctggctttgccactcactagttgtgtgacactaagcaaatttcaactccatcattttcatgagtttcaggagttctacatggtaaggaactttaaggaccttcatttctctccttcaccatctctatctgacaaacctctatttgtattttatgatcaaactcaaataggattacctgctttgttacatatcatacatacataaccattgggacactctagcacatttttcaccacaatagtgcctggcatggttctgttagtgagtcttttcccttttaacttaacattgtttgctaagatgtcagtgtgctctctggactgtgagaccctaaatgctgtgactccttctgggtcatcttttatcacctttcccctggcagtgccccgggctggtaggaagctaggtataatttcatagactgaccaaattattaatagtaaatcaatgagtaaagattttgcctgaagccttcctcatatacactccaatccattagatcaatcagtggtctttaatttactttgttttgaattctaaaagaattttgaaagactatgtatgctgttttccatttaaagatggcagctagaaaaatcaacrtgagtwtagttattacaaaggatgatatttgaagcatattttctaatgtatttgtttcacaactttgtagctctagattaaaatttttaagttatacaaaaatcaaataggcaaatctaaaccttgttaccatacagaaaaaaatcttattttattttatttttcaatttaactcaacatattaatacatatccctgtgacaaccatgtcatttctggagtatatttttaagatgaatcactgatgggtaaatgtatgggtggataggtagataatggacagatataggtagagagagagagagaaacacattagatagatatgtatatcatagatggacggagagatagatagatagggctctgagttttccatcttctgcatgaaataatgaacttaatttttttaaaccacatatctttttctktgctttaagggattcttcatcaggggactatgtgtcaatgtgttttcaaataaaaacaactcttggcttaagtaagataaatatattcaaaaaaggttttttttgttgtttgttttttttgttttgttttgttttgtaaggaagtagtatttggtagtacttagtagtagctggaaatagtatttgggggcctgcagtgagcaagtggtatggtggaacaattgatcaagaaatgcttttctaaggccaaaasattcttggagcaaggttgtcttgtgttccaaggcttgcacagtcaaagactgggtcaagttccaggggaagtgagtaaggaaaatcctgaccaagtgtgatcaagtcaaggaagcaggtattttgtccagatttgcctttgtttagtataaagaatttattttttctgtctcaagcaattctctagaaatgtcttagattgataagttgtctttcttttgagaagtggagcagagcaggagggaggtgggatggaaaagtagcagaactcagsgggaagaggtctcacctagaggccaatgaggacagaaactttacatactgccatccttgcctctgcccccggaaagccttgtattcccaggaagaagctgctgtcctggggaaaggttaatgtgagtgttttcttcctttcaggtttttgactttgagttgactccagaggacatgaaagccactgatggcctcaacagaaatttccgatatgctaagttacaattgtaagtcatgcttgcagattctttcacaggctgttttctgtaatatgcaggcaaacagaggaatacatcttccctaaatcaggaaggcaggccagatttcaggaataggtatgaaacaggagcttccctatagtcctcatgtggctcaatctgtgacccaacaggaatgtgagtcagtaagtgaaactgttgacatctgcaccattgtgaatgcacttcttcaatttttttttttttttttctgagacaaagtcttgctctattgcctaggctggagtgcagtgacacgatctcggctcaccgcaacctctgcctcccgggttcaagcaattctcctgcctcagcctcctgagcagctgggattataggcgtttgccaccacgcccagctaatttttgtatttttagtagagacagggtttcaccatgttggtcagtttggtctcgaactcctgacctcgtgatctgcccacctcggcctcccaaagtgctggaattacaggcatgagccactgtgccccgccatgaatgcacttctttaatgcccttactacctgtgcccggtcctgcacccagggccactgcctattagaatagaaggcacggtgtctatgacccatcatacttataggagcccatgataatgttctagctttaatttattttaaagtcagaagaaaaagagaatacaacaatgatgaatatgtaataatgaatccagcctcgtctatcttcatgtctataccaaggcaatgtaagacttaattttaatatttgtatagagcattggtccatgaaagcaaatgtgcatacgtcctagggaagtcacagtgggccctgcttccatggcctcccctaagtgtccagtgacatttctccttactgtggcattccttttccgagacaccaactatttcttccaaatttttgtcttccttggctttctttaccttcacaactcccatttcctcagctatataatctcactaagctgaatgacaaatgaattatgaaattaatagaccctcagtgctagtgactgaggtgtccccagtggcctccaccaagttaagatcctctggaatttctccggatcttcgaggcaagactcttactccagtgtcatcttcgtccatctgaagcccacctctaaggaacccaacataacttcactttagtttattcacaaacatgacgttccattggatcaactgtggcaggatctcagggttgaggagaaagatgactaatcaaacagagccaagtttggaggggagtttagaaacagggcgaaatatcattttagttaggaaaatactcagtctccaaaacacatctgaaaggtcccccttctttttgtaaaaccataccaggcttccaagaaaagacattttcaatgagaaaaatgtgaaagcaacctttctatactcacaggccttaagtataatctgtgatctgcctcatgagactgtgaatgtctcctcttactcatctctgtggccctatgttaatacagctcctggtgcatttaactgcttagaaagtactctttaatgacactcaattaaaaagaacgaattataaaaaagaaagccctttttgccattaaggtaacatattttcaggttccagagataagggcatgtatgtctttgggggccattactgagcctactacactagttttgtaagtaaatttagagcaactaaactttagttttctaatttttgtaatagaaagaattctatgtccagccactggatcctgaaactctagacttttatctcagatatcaagaggaaaaccacatgaataaatacctgtttctttaaagctgatgtaatcttgaccctattgtatttcctccttctggatacatgcccttcattattttattctaaaatttattctcaggatctgttgacattgtcttttgttgttcatatggaaaactcaagcttttcagtttgccaacattctcaactcttcagaatttctactgatgtctagattatacttcaggcaatggatcccatgtttactacttaaacgtgcttcatctatgaaaccttcagttggacacatcttatattaatgaagtctcttaactctgcggtttctactataccttgatttatcaagttcttgattcatcaagagttgtcattaggtctctcttctttcctctttgcattctttcaatacccatagaagtttacgtatgaaaattaggctaaataatatactaaattgaaattgatcagactccacttattctacacaagtaagtttggaaacatctaatttaaagaaaagcactttctcactatggtttcagcagtcaagatgattgcctttccaacatcagttttactttaaataatttgtttaggtcagccatgctaatttcattgtggttggcataggagtcactgtggataaagagttgtgacccagccttagccaacgccacataagaagcactgtgctgggtacttctaggagagtttctctcacttctaagaaggagcctttgaagagaggttgcttctcttcttcaaggggatattgtcccattgcaaggtgaggtgtgaaattgctgtggagtctccacccagcctgaggacgacatcaatacacagaagaagaaaaaggagaagatgagagaaattctgcactctcatggatgacacccagagtttaccctccctctggacttcttgttatgggactaacacatttttgtggattttaaaccaatttgaattactttttttgcacctgcctgtactctaatccaaacaaccatccaagttaataattttctctttacaatgcaccctgcattttgtacctatacaagagtggtcagaatgtgtgaaaactgctgagtcatcctgacagcatggctccagtagattctaggggtcggctatagtattgagtgatattaaaataacaaataatgcacaaaaggcatggatctaaaaaagtctttaggaatcttcactcactgagagctcatattcaggacacagtttcttcttcaaatcaccttggacaagtaagtaaccctttttgttcccttttctgtaaaataagttacaagttaaatctactttgtagggtatttgagaggattccctgatagtcttgcctgatacagaatagaaactcaaaatcttagctagtagcgttggtgtcattgctattatcagcactataatttcccttgagttagccagaagaaatactaagtttattggacagtgagtacagggttgccttgctcagatgtactgagcctactgtcaactttaagccgctctctgtgaggttagagtttatcttggtctgggaggaccaagcagagtgctttagagatgacaagcacagctgtgttaagagacaacttccaaagtttgtgaccacataggataagttactctaactttcagtgcagttgagcaagagtccttgattggtttctgttgtgaatgccaatatttttgtgtcatgttgtgggatcttccagacactgtctgagagaaaatctccatagcctggagaggaagaaaaatgtctctggatggtggggttttgtctcctagcacagttaccacccarcgaccatccttctttacttttacaggccattatgttaagcctttttcatttgttgctctcccatatccctatttagactttgatatctgaaggtggaaaccatcccttttccctctggagctggagtgatgttcacggaaggcaaagcagctgggcctgaatggggctaagctctgggagccatgagtgtctccacagaaacagagcaggacacccggagggaccacccaaaaccttgggtccgtttgtgaggccatcagatcctcagctggcatttgacaaggaggatcaaggttgcaacagcctaaagaagtttaatttcaagaaaacaggtaacttttctttcttcttactcatctgaatttgtggattgaaaattatttgcaccatatagaggagttttctaactatcaaagcaccaacagtggagttatttgctgcaggacatgttgaaatgattctcattgaagacaactggatgaattcccagtgatgtttgaaatgcaggtttgccagaggaaaagtctgttgaattctgtttttgagaaccagacattttcttatagattaggataaactccttgcataataaaggtgtttatccatggacttcacattttattcctgttgctgtctgatactttccccaattacttggtttaatttggccttcaagctcccctccaaccctgagaggctgttagtgtgaacccagaaagatttattctgtcccatgtttttatttctcctggagcacagtagcacgaaagaggagtggatagtatccccaaaatacagaagggaggaaacggatgtggagagagagggaagtaaccagggtactttgtccaccttcacatgatcctagggattatcctgtgtcacaggcacttcagagttgttttattttggtggtgtctaaaagattttagtcttaaaacacacatccagcctgggccacagacgttgtctctacaaataataaaataattagtcgggcgaggtggcatgcgcctgtggttccagctaatagggaggctgaggtggaaggatcacctgaatccaggtggctgagactacgtaagctatgatggcaccactgcactccagcctggacgactccttctcataaaaccaaaccaatccacacacacacacagagaagagaaacagagtttacttttgaatatcgttgagagaatatactgaattgcctggcgtgatgcgaatgaagcaacatagttctgttcctataacaaggacattggaaacaaaattttcaccagttgtagcatttccaattagtctagttgggagtcaccaggattagatcaaagtataaatccaaagactgtcagaaaatattctgaattcaggagagaagggaaatcatgatagaacaggaagtctgatctgtgtacaatcagaagatatcataatccaaattttacatcaagttaggggtacatgcagggtttaactctggagaaacttcacacagaagtctgaagacaccaagaagtgtcttggcagctgagtaaaggcagcttgggatgaagttgagagtgctgggcatctgccaggaaatttcatggtattcagcttcatcagaaatatgacttgcaactaaatatttttatcccattctataggttgctttctgatgcttagtagtctcttttgatgcaaaaatgttttaatttatgaagtctcattcatctatgttttcctctgttgactgtgcttttggtgtcacttgcatttgattttcagcaatttcagccctgtggctgtaagacataggattctcactcagcgcacacctagaagctcttaggtcatgtgtgcttaatccaggattttgaattcctgagctcacccttttttttcttcctctttccagcaatatgaggtgcaactaaccaacatcattctattcttagttttccacaaatgtttgaaagtatcacatacagagtcactattttttttgcctcttttaagttgttaagtagagtatcaatgcagatgttttgtgcactctataaatacttcatatcatggactatcagtgctctcttcattattggaaataaagtccttcgcattttcaagtctaatctgattagactgacaatgccagaaaccccaaaaccaattcaggaaactcaaaattctattcctctagaactgctccagataccaaaatctatattagtcagggttgtcccaagaaacaaaacatatagtgtgtgtgtgtgtgtgtgtgtgtgtgtgtgtgtgtaaatgaaagaggaaatctcacatgaaagactcaatcaatgcagcaaactttattttattttattttattttaaataaatgaccacagccac

SEQ ID NO: 94545 - DNA, 35475 bp, Homo sapiens
  misc_feature (1)...(35475): n = A,T,C or G
ttcatgttcatattatttatgtcctcacctaaagtgagtttctagttcagaacatagagttgggtcctagattttttaaaatccattctgcaaatcttccttttaatgtgaaaatttaagccaatttcattcaatgtacagttatgagacacacaacaacattctgataaaggaagaaacacagaaacaatggtggcttcccccagttaagtaggtgttatccctgggattcaaggttgactcaacatacacaaattaaaaatgtgattcatcacattaacataactaaagacaaaaaccacataatcatcttcatagatgcaggaaaggcttttgataaaattcaacactacgtcatgttaaaaactcagtaaaccagatattgaaggaacatgcctcaaaataataagacccatatatgacaaacccgcagtcaatatcatactaaatgggcaaaatatgaaagcatgccctttgaaaagtggcacaagacaaggatgccctctgtcaccacgcctattcaatgtagtattggaaatcatggttaagaaatcaggcaagacaaagaaataaagggcatccgaataagaagagagaaagtaaaactacccctgtttgcagatgacatgattctatatctagaaaaccccctagtctcattccaaaagctctttaacaaactgataaacaacttcagtgaagtctcagaatacaaaatcaatgtacaaaaatcactagcatttctatacaccaacagctgtcaagccaacagccaagtcagaaacacaatcccattcccaactgccataaaaagaataaaatgcctatgaatacatctaatcaggaaggggaaagatctctacaatgagaactacaaaacatagctcaaagaaatcagagataaacaaatggaaaaaacattctatgctcatgaatagaaaaaattatgtcattaaaatggccatacttcccaaagcaattaatagagtcaatgctattcctattaaactaccagtggcattcttcacagaactagaaaagaactattttaaaattcatatggtaccaaaaaagagcccaaatagccaaggcaatcaaaggaaaaagaacaaagcaggaggcatcacacttcaaactgtactacagggctacagtaaccaaaacagcatggtactggtacaaaaacagacatatagaccaatagaacagaataaagagcccagaggtaaggccacacacctacaaccatctgatcttcaatgaagctaagaaaaacaagcaattggaaaaagacttcctatttcacaagtggtactgtgataactggctagccatattcatatgatttaaatcagaccccttccttacaccatattcaaaaatgaactgaaggtggattaaagacttaaatgtaaaaccccaaattataaaaactctaaaagacaacctaggcaataccattctggacacaggaacgaacaaagatttcattacaaacacaccaaaatcaatttttatagtatatattttttaaatatatattataataattgaaaacaaaagtgaacaggagtagccattcttatgtaagttgaaagtgactttgaactgaaaacagtagaaaaacacaatctatcctaaatatacatgcattcaactctgaagcatccagattcatgaaacaaataccactagacatatgagaaaacatttgctgctatacttccacacgcatagataaccctgacaggtcatcaaggcagaaagttaaaaagaaacttcagatataaactagcctctagactaaatggatctaatgggtatttacagtacattatacacaacaaccacagagtatatatttttcttatctctgtgtggaacattctgtaaaatcaaccatatgcctgagcacaaagcaagtctcaataaattcaaaaaattgatgttatatcaagtatcttctcagtctacaagagaataaatttagaaatcaataccaagaagaattgtcaaaattatacaactacatagaggctaaaaacttgtcttcaatgacttttgggtaaacattaaacaaaagcataagtcaaaaatatattttgaaaacaatgaaaatagagacacaacttaccaaaacttctaacatacagcaaaagcagtgctaagaggtaagtttatagtgttaaatgtctacatcaaaaagacagaaacaggccaggcatggtggctcatgcctgtaatcccagcactttgggaggccagggtgggtggatcacaaggtcaggagtttgagaccagcctggccaagatgggtgaaaccccatctctactaaaaatacaaaaattagccgggcgtgttggtgggtgcctgtaatcccagctacttgggaggctgaggaacgagaatcacttgaacccaggaggcagagtgtgcagtgagccgagatcgtgccactgcactgtagcctgggcaatagagcaagactccatttcaaaaaaaaaatagaaacatctcaaattaaccacctaatgtcacacccctaagaactagaaaaacaagaacaaatcaaacccaaagctagcagaaaaaaaaataagaaatattagaggagaaccaaatgagattgagactaaaacaatgatgccagaatcaaaaatattaaaaatatgttatttgaaaggttaaacaaaattatagactgctagttatattaaccaagaaagacagagaaaattcaaatgagcaaaatcagaaatgacaaaggcaacattgcaactgttagaacagaacacaaaaactaacaaatattgctatgaacatctctgtgcacacaaaatagaaaacctgaagaaaatgattgaatttttggaaatacacaagttctcaaaattgaaccagaaataaatagaaattctaaacacaccaataataagcaagcacatttaatcagtaaaagagcaagaacaaaaaaatcccaggacgagatgaattcacagccaaattttatgagatgtacaaagaagatccgaaacaaaccttcctgaagctatttcatagtatccctcattataggaaacaagtgtcaccttgataccaaaatcaggcaacaacacgactaaaaatgaaatctaaaggccgatatccctgatgaacatggatgcaaaaattctcaacaaaatactaccaaactgaaacaaagagcacatcgaagagataatttatcatgatcaagtgggttttcttgcaggaataaaggatgtttcaacattcacaaattaataaatttgattcaccatataactaagatttaaacaaaaaccatatgatcatctcaaaagagacataaagcattgcataaaatccaacatttctttctcataaaacccttaataaactatgtattgaagacatatctcaaaataataagtcttacataacaaacctgcagccaacgtcttcctgaataggaaaatgttgaaagcattcaccctacgaactggcaaaagacaagaatgtccattgtcaccactcttacttaacatagaactggaggtcctcaccagaaaacccaggcagtagaaaaaaataaaagccatccaagttggaaaagagaaattcaaattatcaatttttttctgatgacatgattttatacctatcaaactataatgactccttcaaaggactgcttgattgaaaaaaaaaaacttcaataaaatttgaagatacaaaatcaatgtagaaaaatcagtagcatttctatacaccaataatgttgaagctaaaacccaattaataattcagtcccatttgcaatagacaaaaacagaataaaatatctagatataaataaaattaagcaggtgaaagatctctacaaggagaaatacaaaatactgatgaaaaaaatcatggatgaaacaagcaaataaaaagattaccatgcttatggattgggagaatcaatatcatgaaaatgatcatactgcccaaagcaaactactgattcaatgcagttcctaacaaagtaccaacattattcttcatataattacaaaaaaatctaaatttcataaaaaggcaatcctaagcaaaagaacaaagtcacaggtatcactttacctgacttcaaattatactaacagactatagtaactaaaataacatggtactgatacaacagtagacacgtggataaataagaatagagaacctagaaataaagctacatacatacaacaaactgatctttgacaaagttaaagaaaaacaaacaatgagaaaaggacactgtaaccattaaatggtattgagaaaattggctagccaaagctgaataatgaaactaaacccctatctcttaccattggcaaagttaagtcaacgtggattaaggacctacaaggaaaatctgaaactatgaatgtcctaggagaaaaccttggaaaaactcttctggacattgagctaggccaagatataatgatgaagatgccaaaaaggaaatgtaacaaagacagataaatgggaattaaactaaaaaacttatgggcagcaagagaaataatcaacagaatatctacagaatgggaaaaatattttcaaatttaggctccaacaaaggacttttatttagattctataaggaactcaaaccaactcaacaagtaaaacacaaacaatcccattaaaaactaggcagaagacatgaacagacattcatcaaatgaagacatacaagcagctgacaaatatacaggaaactgtttttaatagtcatcagaaaaatgcaaattaaaagcacattgagatgtcatcttgcaccagtcagaatgactattattaaaatgtcaaaaaacaacaaatatcagtgtggatgtggaaagaaggcaaaatgtgcatatacatactaatatgcatatatatatatactaagtgtacatacgtatactaagcatatatgcttatggaatactaagcatccactaaaaagagtgaaattaagtccttttcagcagcatggatggaactaaaggatattattctaagtaaactatcgtacaagcacaacaaaataccacatattctcatttataaggggaagctaaacaatgtgtacacacggacataaacatggaaataatagacatcaagtacttcaaaagggagaaaggtggagacaggggcaaagatgacaaaacttcctattgggtacaatgttcactatttaagtgatgtgtacaccagaggcccaaacctcaccagtatgtaatgtgtctatataacaaacctacacatgtgcctatttaatctaaaataatttttaagactttaataagaaataaaaatccgaaagtctttccttactaatatcaatgcctgtaattcttcacagtttgtcagtttattttcttcctcataatgaacgctgttttcctgtttctttgtagctttgttattgtttttatcgcacatttgaaaaacagccacatttcataatctatatatattctgtgtcatgacaatgatcagctaatatgcttggcatattcttaagtctcgacatcagccctacatgaaaacttaaggtcttctcagttcttttctgaacgtgcatctgcctagactctgtgtgccctatttgatttctccaaatacccaatggttttgaataccttatcatgtcaaaaattcacagctcagcttctcctaagtgccatagatggcctattgtatgtctcttccccctaatctcttgccagtggcatctgtgcatctatagtcaccctgcatctctactgagccactctataaataaatgagtttattttagttcatttcagattgttttttgataattccatgggagatttgagagctttctaatctaccatcctgctgatgacactctgtgtgaaaatttttaaatggctctattatattccattgcttcaatgtatagtaatttacctaattattttcttttattgttccttttaggaagaagtgaatagaagaaaagagggtgttgcaaatcaaaagcacatagagatatcatcttacaccagtcagaatggctattcttaaaatgtcagacaacaacagatattggtatggattcttcacagatgttaatcatcttcgttttttgttttttgtttttttttttttttttgagacagtcttgctctgtcgcccaggctggagtgcagtgacccaatcttggctcactgcaacctctgcctcctgagtttaagcaattgtcttgcctcagcctcctgagtaactgggattacaggtatccactaccactccagactaatttttgtatttttcgtagagacaagatttcacttgattggtctcaaactcctgacctcaagtaaacctaccgccttggccttccaaagtgctggggttacaggcgtgagccactgcccccggcctaatcatcgtgttctagtctgccctccaatgggagaaacaagtaaaattatgccatgtgaggattattcaccaatttattttaattacttttttctttataacatttaataagatcacaaattatataaaatagttatcagctttttgggaagttacttttgctggtttcttataaaactgatggaagatacaaacactattaaagaactgtttgcatgttgcaaatgatgtccaaagtccaaacattgttaataattaatactccaataaacatcatgtcagaatttctgttttcttttccctttgaacctttgcaggattaccacatcatcaggaccacaccttcatcaggaatgaatattcctactacaattaaagaagaaacaaaattaatttgytggtgaaaaaygtaaaaagagaaattttctttggttttgtttaatttctttattgagggtcaccactaaaaaaaatgctcactggtcattcttttgaatactgtctgagagaaagatgtaagatggttgattatttcaaatgacagaagataaagatgggatatcatcatggcatgaacaaaaacaagatttgtagctggaggtattttatagtctaacatgatcaccaatcattytataaacctgttggatgagtttatcagacagacagagagagagattgattgattctgaatagaaaatttcactttagaaaaaaatattttgactatataataatgtatgtaaaaattctctttgataagaaacgagtgaactggattcaattttcctcacagcctgtgtaatacaccatcacttgcttcctcctacatgccattgattagccccagggagcagtgcagcactgcctgcccatgttttacataacccctgaatataaatgccagatgttgctgaaggaaacaggatctgcttagtgaaagaagtggcaagcaatggatcccaaatatcagcgtgtagagctaaatgatggtcacttcatgcccgtattgggatttggcacctatgcacctccagaggtaataatcacattttcagcattgagcatttaaaagagcaaagctagaataagtgaacgatgacctgggttgttcagctttgtgtttctgttaccctgagtgactcacgtggtctgtcttactgggctagagctattctatgttcaaagagaaaaggtagtcaatgtttgttttgcactgaggtctgtcatatggtaatttactgcttatttttattttatacactgtttttatatgctgtttctgtgtattgcccagcttggcagaatatataaaactcaacagtgaagaacactgcctggcagttccctttctaggagatgactgcagtgagaatggtttctccatttatttctgtggttgaagaaatcttttattcttctactagacgtgatcaaaagaaacatttgtggtaacagcacctaaagatggggtgtatgaaaactgttgggagagtactgctgagctgccgcgtggtcttgagcatgacacagtaatacyggtcctggacttaatacaatgccctgcacaactctcacctctaggaaaattatctgaaaggaaaaataactttattctaaggaaaacctagaacctcacaagaaaaattttaaatttttggtccgtgttaatatgcatcagatttgtatcaaaatgataggggtggccctctgacacggaagtgggcaaaatggagacattttttctagactgagctatttctacactggaagaaaacttgtattccaagactactaagtgtgttaataaggagtagtcacataaaatttttgtctaaatttgatcaactatacgttgtaagaatttacagagaaacaccttgaagaccatcgacaggagtggttcactttgtaatgcaaattggcatgaaggagaagtaaggaaaagcacaacacggaagctctagccttggtaaaccttgagtgcctgcacagcaaacagaggatcagggttggcatcaggggaaggtagtgcaacctggcatctagttccttttaatttcactagaaaaagaaagcttcagaaaagcttatattaaaatagaaaattgtttcatttacggttttgtcatttaaaaaatatacctttcaaatctttatccaaatttggtagataagtcaataattttaaatttcactgaaattatatcgtttctaaaagagttggtcttattttttagggataaagcgtaccttactaatctctcacaggtcrcagttaatttcttaggtataaatctacatccttggaatgtatgtctttactcctagtatttagttctgtcatgcacacagaatggctaatggctgtgtagaaaggagttaacacaatagactgccacccgtagatgcgcctgttttcaaagttggagcctggctggtatctgagaagttgaatttctcaccccttcctaactgataagggtagcatctataattaactggttgtacaaagtgtggggtttctgtatacctgctttctttacaagaccggaagtttggtgtgtgctatacagactgggtcaatttaaccagcacccagttaaaatcttgggaattgagtctccaaatagcatcccttgtagtcaacatttcccctatgttgccaaaatgtgatgctggaggaagtcagtgtgtttcctgaaacatcactgagagacgaatcataggaacttacaccgtattcttaccataatttcttccatgtgcctttttccatgtgttaatttcactatattaaaaataattaggagtgtgtatgcagtgactcatgcctgtaatcccagmactttggtaggccaaggcaggtggatcccttgagctccggagtttgagcctgggtaacataggaaatcccatctctaccaaaaatacaaaaacttaaccaggcattatcatgcctgtctgtggtcctagctatttgggaggccaaggtgggaggatcacttgagcccaaggtaaagaaggtgggggtgggggcagattttgtagtgagccaagattgtcccacttcacaccagcctgggtgacagagtgagactctgtytcaaataataataactatttataagttgagtcttgttaatttttctaacaaatgactgaatctgaggttgttgttgggaaactccatgctagtgattaaccagtaactgcctgggactgaagaggtccagggatacccaatctttattactaaccaggaaagacttcagcaaattgggatgggtttatcaccccacatatagaaccaacccaagacacgaggataatgtgatttttgtgaaggtcagtgctggtgcctgaactactgatagggatgtgctgggaagggaagagcgtggtccctttaaatgatacagaaagcgggaagggaagtgctggctagaggaggacgtggtccctggctacggctccaccgcctcggacctaggtgaggacaggcatttttgttttcctgcccaaaagttgcatttcccaagaccaccctggcctgccatgcccccatcctgtgcctataaaaaccccaaatcctaacaaggcagagacagaaccgggtggactttgagaggatcacatcggcagaggaatacacaggtggctagacatctagagaaatgcaccgaaaggcaccagtacgccagcgggccacctactggcagaagcagaatgacgctgagtttggctggggcagtcagaagacagtccaggctgctgagcagccggactctaggggaaaacgttcctactccatccccttctgacttccccccaagctacctccactcaatgaaaccctgcactcattcaccaagcccaggtgtgatccgatccttccggtaaaccaaagcaagaactcaggatacagaaagccctctgtccttgccataaggtagagggtctaattgagctggttaacacaagcctgtagatggcaaaacttaaagaacaaaactaaaagagcaccctgtaacacatgcccactggggcttcaggagctgtaaacatccacacctagacactgtcaacgggtcatagtcccacaacctgcccccatctgtatgctcccctagaggtctgagcagcgggggcctgaagaagcgagccacacccccactgcacaccctgtgaggacaagggaacttttcctgtttcactacctctcaagcacattgatcaccaaatactacctttcgttgctccttcaggttccgaggaacagagctgtrgaggtcaccaaattagcaatagaagctggcttccgccatattgattctgcttatttatacaataatgaggagcaggttggactggccatccgaagcaagattgcagatggcagtgtgaagagagaagacatattctacacttcaaaggtactgtgcctatgatgagcatgtatgcacatgtrtttaatgggattgtgtggagatgacaattctgtaactggttcagtagttgtgggtgaattgtgcttattagttccaatttattcacacatattcaggtattaaagctaaaataaaaggcagagaatgatgatgcctttctcatcattgttgtgttcaaatttactacttgaaagttactttaggttttgagcctcagctcagatcagtataattattttatgaattcatattttaatttcaacaggttttggggtacaagtggattttggttacatgaatcaattctacactggtgattctgagatttaagtgaagctgtcaggcgatcactggacatcgtactcactatgtaggcttttatccctcacctcactcccaacctaacccacactgagtcttgaaagttcattatataatctgtatgtctatacatcctcgtagcttagttcccacttataagtgagaatgtacagtgtttggttttccattcctgaattactttacttagaataatggcctcaagctccaagttcctgcaaaatatattatttcattcctttttatatatacactattccatgatgtatatatatatataccacattttcattattcatgcattggttgatgggcacttggattggtttcatatttctacaattgtgaatcatactgctgtaaacatgtgtgggtatgtgttttttatatataatgacttcttttctttttggtagataccagtattaggattgctgaatcaaatggtagatctactttaagttctttaaggaatctccatactgttttccataaagattacactcatttacattcctaccagccgtgtaaaagtgttctctttttactacattcatgccaacttctactgtcttttcagctttttaattataaccattcttgcagaaggtgatatctcattgtgattttaatttgtacttccctgattattagttatgttgagcattttttcatatgttcgttggctgtttgtatacttcttttgagaaatgtctattcatgttatttgcccacttttcaacagggttatttgtttttatcttggtgacttgagttccttgtagattctggataatcagtcctttgctggatgcatagtttgcaaaaactttcttccattctgtargttgtctgtttactcgcatgattatttcttttgctgtgcagaatctttttagtttaattaggtcccatttatttttgctttttgtkcatttgcattttggggtcttagagacaaattcttggctgaggccaatgtacaggccaatgttaagaagagttttccaatgttatcttctaaaatttttatggtttcaggtcttagacttaagtctttgatccatcttgtgttggtttttgtataaggtgagagatggcttccagttttattcttatacatgtggcttaacagttgtcccagcaccatttattgaatagggttattttccctaatttatattattgtttgctttgttgaacaaagattagtatttgccctaatttctgtgttctctattctgtttcattgatctaagtgcctattttttataccagtaccatgctgtttgtataactatagtcatgtagtataatttgaagtctggtaatgaaatacctccagatttcttctttttgcttagtattgccttggctattgaggcccttttgtggttccatatgaatttggaatatggccatttttatactattgattctttctatccataagcatgggatgtgtttccatttgtttatgtatcatttctttttagtagtgttttgtatttttttgtagagatctttcatctctttggttaagcatattcttagkgattttatttgcagctgttgtaaatggaattcttaatttgactctcaacatggttgttgttggtgaatagcagtgctactaatttctgtaaacggattttgtaacctgagactttactgaatttgtttgtcggaggagctttttggatgaggctttggggttttgtaggtatatgatcatattactggcaaacagcaatactttggcttatccttttccartttggattccctttattttttttaccttgcctgattactctggctaggacttccagtactatgtttaatagaagtggtaaaaattgggcatccttgtcttattccagttttcaggggaatgctttcaatttttctccattcagtatgatgttggctatggatttgttatatatgcattttatgcctagtttgttgagggtttttatcataaatggatgttggattttattaattgcttttttgcatctattgaaatgatcctatggttttggtttttaattctctttgtgtggtatatcatatttattggcttgtatatattatagcatccctgcacctatgggatgaaacccacttgatcatgatatatttttgatgtgctgatggatttggttagctagtattttcttgaggatttttacatctgtattcatcagggagattggtctatagttttcttttgtgtgtgtgtgtgtgtgtgtgtgtgtgtgtgtgtgtgtgtgttatgtcctttcctggtattggtatttggtgatactggcttcatagaataatttaggcaggattccctctttctctgtatttttgaatagtttcagtaggattggtaccagttcttctttgaacatctcctgtggagatagcaactttggctttcaagctattcccctccccatccaccttcaaggccaggtgccagccttctgcatttgtctgcagcacacttcctgctttcccccggggttctggccaagggggctcattcccacttgagataatattaatatcatgaaattcagttaggagcttctttcgatctgtgacatgtggctgaactccccaagttcargttggctgactttgctgatgtcccctgtgagataaaataagaaatggcttccctcagtccatgctggagactggtaatacctttgtgacacttgtcactgccgcttctactttatttctcacctctccctaaatcagctttgggcctgggtagggttaaggccttacccatggcctgaattctcagattccctggtggggaagagtattctggaggcagtttctccccttctcacactctgggcacttacagtttttcatctgtctcacagtgttggctgtagcctgccacttctttcaaagggtctgtgaattttcacttttcctattaagttcctgcattgcttcttggaaaaaagtttgcagtgtgaatctctatatgctattctgtctttccaagtgggagaggcatgctaacactgcctccaatccacaatcttgggaacaaaaaactcagaccaggatggtttaacatagactacagattcagagagacctataatcaatattttagtttttcttatgtctgggatgactttcttcaatatcttattctgaatctcaattgtccttttcagtgaagagtgtgggaggcagggagatgcaacataaggatgttatgagtatgaaacaacagataacagaagtatcttgaatgattgctcaacacatgtcagcacgtaaaaactttttgctcttcagtttctaaacaggaatgcttattcttgcccatcgggttcaatggatgagaaaaattagactattcaaatgctttataatttctctcaaacacagttcagatcatcagaattacttgatatcaatttttacctactgaaaattttaattccattgttcagcagttgtactaactatatatgcaatatgtadctttcatataggtaggtcatatcaaaataaaacaaagggaatttttgccagaggtcatctgtttggaacggtgaaaaatgtctaaatattaggtgaagcaaactaataaaactagctcatgtttttattcaacataaatcctttattttaccatgcagctttggtgcactttctttcaacyacagatggtccaaccagccttggaaagctcactgaaaaaacttcaactggactatgttgacctctatcttcttcatttcccaatggctctcaaggtagggaatttgtgagatcaacttctcttctgttctcagcatgaccatcctttaygatggttgaattgaacttcttctaaggagggtgtaggtgttattacatggcagaagagtcctaagtataatgmytaagccattttcttgaagagtacaaccttccttctgtaacrtatgatgacaagagaagacartacatcaacctcaaagcctctgnttcaaaaattcaagaaaataacaacagccaccttcaaggctctgtcttaattagggttcctgagtccatctcttaggatcttcacagatacagagatccatgcagctgtggtaccccaaaaaaactgctgcacatgtggtgtacagtgagtttccattatctttccccattttaagctgaagtagatttggtggaactcactctgggtgagttttaaaaaggaaaccataataggacctgagaatccttgcctttttcactaaggcttgtttcacaatggagtttgtagctttgcctagtcatgaatttcggttgtgcataacttttaaatttatagaaaaaaaactcaggctagtttatttaaaaaagagtttattgcatgatgcaaatgggtagtcactgccatgaatacatttcaagatttgacgtagactctaaaaatgtgacctttctccataattatctatgaactccaagaagttttctggatttttgtcccagcctttttgattgttggcaatgatagctttgaggcagctcaatgctcatggtgattaacataaaagaacctccgtgggtcttacaactttcaaattaatactgaaaagaacttccatttgaacatgtttagcttatgatcctgctcatggactatcaagtcttcagggggataaggaactcttattgtatcacctggatcaagaayacaatcccttattgctggatatcaagggctgtttgagtcaaagagaggcatttcccccaaaaaaattataggatcagacaaaagtaacagaagtcgactgtgaacccccattaaaacctgtaaaatggttattaatatatatartggaagtagragattaaaggaagcctgtctcctaaagacattccttaaaactctgtacgtgaaacacttggcccacatcactttctagaacatttcagcacctacctcacrgtngattattatcctaaaatgtacatgggagcatgcctatgggtggaaaagttaaatggtgacactaaartgactgcttctacttcagccaggtgagacgccactaccaaaagatgaaaatggaaaagtaatattcgacacagtggatctctstgccacatgggaggtgagtgcttggaggacagagtacagaaaaggaagacaagaagaggtaaacctgttccccagctttcatatgcaacattggaatatgcaccattggaactagaaattaaggaryttgacaaaggaagttttgctgagtggtasggaagaatacatgactgaaatagaatagcaggaaatgaaggagataaactggggacaaggaagacagatattcctcccgctccatggacatttatctctccagcttcctaaagaggatacacaaattcttcttgctgtcactatccttttgttatctgttgtaattttttctcttgagaatcactgctattttcattgtcatatcttaacagttgttgctttaacagttctgtcttgcatttatcataatctgcagccaactgcacaaataattcctcacaacccctttctccccaggtcatggagaagtgtaaggatgcaggattggccaagtccatcggggtgtcaaacttcaactgcaggcagctggagatgatcctcaacaagccaggactcaagtacaagcctgtctgcaaccaggtgagcaccctcagcctcctctcctttctcttctcaatgtccatcttcctgtcctactgcctggcttccatttgttttgttccacttacatttgtgaaacagaagattctagaaagcaaaacatctgtctagaagaaaacggaagacccttaattgcacctcttcttggagaagtcttaatgaaaatggtacagagaccttcatgctaaattgtgtgtactattttkgggggaggtgaatttcatcaaggaggactgaaatggttaatcagaactcagggagaaggtggacttatctctaaggtatgaaagaccaccagagagtggattggtaaagatgatttggagtagaatgtatataattatagaggccataaaaacatgggatgagcaataaatcaggagacagtgagaataagagaagatcggtactacgggtttaaatagggtttagatgtctgaatgctttttgtcatctctgttttcatagttcttgagcaggtactaaaaattaactggaaacaatgaaagtcatccaggttagggagaggaagttacccgtttatgagagttgcttgagagataagctgaaaggatgtggcgtgctacccccacccctgcctcgtgtagaaaagcctgccaatgttgcctcatttagacccagactccaaaacgggagtcttatagctgggccacctaggaagagaggttctaaagcataaaaaagaaagcatttcattttgggacayttatttgcagctggaaatgggggaatgggctaactggctaaactactatcttgtccatcctgccttcacttcagtccttccacattgttatttggtgtttgractgtgctagaagaactgttttatacaggctgctattcaatraatttgtaaataccatacccacaccaaaggatttaacactgaaaagattaaggtaattttggaaaattctaaaagtcacttttcactcctgagatgtaggtggtcagaagaaatgaggaacwctgtagaagccatatgcaagatgcacagatggcattgtgtttgttgtggactgttgatgttaacaggatggaagaagtcaaaactgaactttataaaatagggtataagaaaataaagatgtccctgtacttacaggtgctaagaaactagacttgaagaacttgtctctctcagaaattgagaaattgttagcaatggttgaactaagctcatcaactccttggcatttgcagcctacctgtgcaatcataggacatgaaataaaggaaggacttgagaaactccatgatgtgataatgaagagaaaaatattgcagtaatataaaaagatgaatatgataccttttctatatatgtagaatagattttctctggtctgattttgacaaatacaagactgtctacagcctagttttcctgtatgccctcctgggtgctatcaaagcttcatttcattgaacaatcagatgcccaactctgtggctttgtggaagatgagtaaatgcagtaatgcttgaaatggtctcttctccctagcccacaaatattttggtactatcattttgggaagtcaagcaagtatagtaaattaaccagaacacaattgtggaaatttgatgcaaagttagtgaaataaaactttaaagagtgaaaaaaagaaagttaactatttatggagataactagttatggtggatgaaatcaacactgaggaaaatttagcagaacattgagctgaccttttgactgtccacatcttattctgatgcactgctttgctttctgtcatcaaatcaactgtttagawgcatttattctgcgtatggttctgttctcttactcttttactacttagagtcaatgagtacaggtctacagttgaaacatgtatttaaaatttatgtatttggtaatataatacaaaatcatgattttcaattaaaaaggaattaatgtggttttaatattagttttactcaattwttattatgacaactttcaaattttagagaaatttgaagggataatacaggacatctacatgttatcatctatttccaaaattgttgacaytttgccaacctggcaagtatataggcatatatgagtatatctgcatcaatacaggtagtatttgttgaatctcttcaaaatatattccaatgatcacaattcacctctacagacctttcaaagcatggcataggaatgaagatattctcccagtaacagtgcaattattatatctaaggaaataacaataatgccctcatatcattgattatccagtcagtattcatatttcccattgttttattgaaagatctcttatacctctattttaaccataaatagaagatgaaaaaatttaaagataccataagatattaagtacctgaaattatacctaataaaagatgtgtatgacctctaaggagagaattataaaacaatgaagaataaataaaagatgtatcatgaaaacaaaaacaaaaaaaaaacatccaattgtgactttcagtttgttgtactttggtcmgttaacttgttgttccaagtttttaaaatttaagtttgtgtagattagaagttatacttgaatgctttatatcatagaagttaaacatttttggtgagaaactgcctctacattgctgtatccctgaaattataccacagtaggcagcatgaaatgacagattgtcccacaattagtgatgctaattttgatcacttggttaaacaagtggtaaccagatctaatttccagagacatgtgttctcccctttgtaattactggtaatctgctgggtgaaataagagggaaagttatattacacagcaaattttcacatgatgattgagtatacatcaatgatgttttaaatttttgtattgtattattgtatttgttctttccttggggctttaaagtaattactttcaattttaactacaagttttactattctttacgttttattataaaaaaatttttttcacaaagtcaagaaaagaaacaattactgctctcagatatgccaaaagcttaactccttccctttaattattcatttcctagaaaaaaaattactgtaataatcactatattagtccattttcatgctactgataaagacacatccaagactgggacttatagttccaatatggctgaggaggtctcacaatcatggcagaaggcaaggaggaacaagtcacatcttacatagatgatggcaggcaaagaaagagcttgtgcaggaaatctcctccttataaaaccatcagatctcatgagacttattcactatctcaaggacatcatgggaaatatctgcccccatgatttaattatctcccaccaggtccctcccacaacacatgggaattatgggagctaaaagatgacatttgggtggggacacatagccaaaccatatcatgccacccctggcccctcccaaatctcatgtcctcacaattcaaaaccaatcatgcattcccaatagtcttccaaagtcttaactcatttcagcattagatcaaaagtccacagtccaaagtctcatctgagacaaggcaagtcccttccacctataagcctgtaaactcaaaagcaagttagttacttccaggatacaatggcggtacaggcattgggcaaatacagctgtttcatgtgggagaaatggkccaaaacaaaggggctacatgacccatgcaagtctgaaatccagcagggcaaattttaaagcttcaaaatgatctcctttgactccatgtttcacatccaggagtcaatggaactccatttacatccatgctgatgtaagaggtggttcctatgttcttgggcagctccaccactgtggctttgcagggtacagcctcccttctggctgctttcatgggctggcattgagtgtctgcagctyttccaggtgcacagtgcaagctgtcagtggatctaccattctagggtctggaggatggtggcccttttctcagagctccactaggtggtgccccagcagggactgtgtgggggctctgaccccagagcactgccctagcagaagttcaccatgagagtgcatgcctagtggtaaacttctgcctggacattcaggcgtttctatacatcctctaaaatctgaaatctaggtggaggttcccaaacctcaattttttttttttttgagatggagtctcactctgtcacccaggcccaggctggagtgcaatggcgcgatctcagctcactgcaacctccgcctcccaggttcaagtgattatcctgcctcagcctcctgagtagctgggattacaggcacgtgccaccacgcctggctaatttttgcatctttagtagagacagggtttcaccatgttggtcaggctggtctcaaactcctgactttgtgatctgcctgcctcagcctcccaaagtgctgggattacaggcgtgagccaccacgaccagccccatacctcaattcttaacttctgtgcacacataggctcactaccacatagaagctgccaaggcttgggacttgcaccctgtgcagccatggcctgagctgtaccttggccccttttagtcacggcaggagtgattgagatgcagggcaccaagtcsctagactgcacacagaatggagaccctgggcccagcccatgaaaccattttttcctcctagacctccacctccctctgggcctgtgatgagaagggctgacacaaaggtctctgacatgccttggagacattttccccattgtcttggtgattaacatttggctccttgttacttatgcaaatttctgcagctggcttgaatttcttctcagaaaatgggtttttaatttttactgcatcatcagactgcaagttttctgaacgtttatgctgtttgccttttaaaactggatgcttttaacagcacccaagtcactgcttgaatgctttgcttagaaatttctttgaccagatatcctaaatcatctcaggtccaaagttccacacatctctagggcagggacaaaatgtcaatttctgctaaaacataacaagagtcacctttgctccagttcccaacaagttcctcatctccatctgagaccacctcagcctggttactatcagtatttttgtcaaagacattcaacaagtctctaggaagttccggaccttcttatacttttctgtcttctcctgagccctccaaactgtcagaacctctacatattacctagttccaatgtcacttcattttcaggtatctatctttcaacaatgccccactctaccatattagtccattttcatgctgctgataaagacatactcaagagtggggaaaaaggggagtttaatggacttacagcttcacatggctggggacacctcacaatcatggcagaaggcaaagaggagcaagtcatgtcttacatggacagcagcaggcaaagagacagcttgtgcagggaaacccatttttaaaatcattagatcttgagagacttattcactatcatgagaacaacacaggaaagacccattcccatgattcaattatctcccctgggcccctcctacagcatgtgggaattatgagagctacaaaatgagatttgggtggggacacacagccaaaacatatgaatcaccattggtgaaggcaaatacttttgatcactctgtcttttaaccactcaacactatgaagacatggattgttttgctataatttgtaattcattttattcattgttggtttttgatgctcaaatctatgcaaatgttactgggattcctataaaactacttttctcttttaaacctgcccttatgagtctttaaagaaattcttacattctggcacaatttgatgttcaaagctcagaatcttaacctatcccaagtctagaattggccatgtgcacttctagtggtcaaaggttgttagaaactggctctggttcatagagttgctaatgctcagaaataacatttctatatatacttttagaccagyaatataaactgtatttttataaantgattgttacttgacagtaatattctgttcaaatttaatgttatactttattcagcttattttaatctttatattaacatatctgttttgaattatctgatgcttttctctcttgatcatctaaaggtagaatgtcatccttacctcaaccagagcaaactgctggatttctgcaagtcaaaagacattgttctggttgcccacagtgctctgggaacccaacgacataaactatggtaataagagcatcaggaagtttacctaaaatgccattttgatgaaaaattttagttatagcatactcagtctcctagagttcattctcaatgggtcagggtaaggggataatttkcatttcttatgagatmscaggtgatgctgctgctgttcagggrcctcacttgagaggctctggtgcagaatgaacaccttagtctgtttagggagcctcctaccaaactgaatccagcctcaagacttcagcatttctggctttccttccagggtggacccaaactccccagttcttttggaggacccagttctttgtgccttagcaaagaaacacaaacraaccccagccctgattgccctgcgctaccagctgcagcgtggggttgtggtcctggccaagagctacaatgagcagcggatcagagagaacatccaggtgaggagttgggtgggcatcagggctcctgcacagtgtccttcacacgtgtgcttcttgtaaggttctcaggacacccttggactaagtccacttcctgggcatttcctatgcacaaatgctttgtgtgcataagtgttttctactctaccacaggaggggcagcatgggtggagagaatcaggatgggaccaaaaccaggaattttggtttcacaacataaagttggcaacttaactctatccctctgctagggacatcaccttttcttcattttctgaagtgaggagttgggttaggtgttctctaatcttcaaaaatcattgcagatttttcatgtccttgtttactcagtataaatttcatatatttattctcttagaattatttgttgagtgcctgttgaaatctttgggtattttattaggttgcatgtctttttctatgtgtagaagatcataattatactgagtaaacttattaaagaaaacctctcaacatagaggtttaatacaaaaccatttatttaactgacaattccatggtttgaartttagcctaaagctycacctgaactcagtctcgtcctgtttctggctgggctttctcacgtgtgtgcagggcaatgaggcagctctacagaattaatccagaatccatattctggatattctttaacagcttcaaatgtattgttgaaatagcctctcccaaaatgtacccgtattttgattccctttatggtggttttaataagcaaaagtttctactcttaatgtagtcaaattctttatgacattttctcgtggttgctaatatcatgactttttctatattggaaacatgacaatatgttaatatattatatagtaaaatattatgtagtaatacaaagtaatatattattgtctattaatatcttataaaagtattaatgtgcttttataaactgggatagtaatttgatttttaatatgtgaaataagagtacaaatgtacatatacataatcttcacttgatactaaaatgtcctactaagaattattgaaaagtccatatttsctcacttatcttgatttttcatcctaagtgtccataagtacttcactgacatttcccctctttcagagttaactttcctgtactgtttaagattatgttgaatagaaagtcttactaccataatagtaacagtatttttctgacttagtctatatataataatggcttggctagtcctgaatgagtgttctgttacataacattcagtaatatcaacttcaacaaaagggctaatattttgttctctggctgaaattgctgtgaaactgcagatcaatttggtgagaactgattgagacttccagtttacgaccatagaccatatgaatattcagttatttatgtgatattttaatatgtgcttcaattagttacatagcattctttattaaggcattcgtgtatgttttcctagatttattcatagaaaacttatacttttaatagtctttggataactttttttgagaattttctaatctatgcaaatattctaagaatacaatgaatgcttcttacctagactcatcaattgttaaattgatgacatttttattcttttcctctcattctctgtatcattagagtattccattaaaatttagtaatttagtattatgttagcaatgagtgacatctttttgatatttaaattctttccaatttgtatactgagaccctcttcaagaaactatttgtgttctttgagcatgatgttattaggatttggacaattactgtcttgaattttattgaaaacaattgtttttcacattatagctgtttgtcaaagatggaaatacagatgaataaatttggatttcagtatttctacatctgatgtgaaactgtataatgctgcagacaaagaggatctcaacagatactagagatgaaataaagttaaactggtgtgtacatgactggttcatgtacttataagattcggaagaatctggagaaaaattttgaaacttataatttagacagtttgatggtgatacaatttggatatttgtctccttctaatctcatgttaaaatgtgatccccagtgatggaagtggggtctggtgggaggtgtttgygtcatgggggcaaatatagaaatatagaaatccaacaatatccatctgtattagtctgttttgtgctgytgtaaaaaaaatacttgatgctgggcaatttatacagaaaagagctatatttggctcacaatttgcaggctgtacaaaaagcatagcaccagcatctcattctggagaggcttcaggaagctttaagttccaacattaggtcattcctttgcacccatacctgatcataggctgttagaagcagtcacactatctcttgaatgttttcctgcttagaaatttcttccaccagatacccttagtcatcactaagttcagacttccacaaagtcctggaatggacacgatgcagtcaagttctttcgtaaggtataacaagggtgatctttgttccagtttttaataagtttctcattttgatcttagacctcattagcctaaacttagttggccatatttttaatcagcattttggtcagaatcacttaaccaatgcctaacaagttccagactaccccttatcttcccattttcttctgaaccctcctgacacttccaaactgtgctaattatccagttctaaagccactaccacattttcagacatttttagcaatgtcccactcctggtaacaattttccatattagtccattgtgcgytgctataaagtacccgaggccagataaaatatgccgaaagttgttttgacttaccattttgcagactgtacaaaaatcatggcaccagcatttagttttggtgagggctcaggaagcatttactcrtggtagaaggtgacagaggaggaaacatatcaaataacaagagatgaagagggaaaaaaagaaaatgtcaggctcctttttaaaccagatttcatgtgaactaatgcagtgaacactcattaccatggggagggcacccagccattcatgagggatgcccccagggcacaaacacctcccaccaggacccacttccatcattggggaattacwttttaacatgagattaggaggggacaaatatccaaattgtatcaccatcaaactgtctaaattatacatttcaaaatttctctagattcttctgaatctaagtacatgaaccaatcatgtgcacataaggtcaacttcgttccatctttagtttctgttgagatcttktcttcagttttgtgcagtttcaatatgtaatatctaggaatagatttatattttatctgatattctttaatcacttgagagtttagagatggtctttcataacttttggaaacttatcaantattttacatattgcctctacaccctactgtgtgatatacttggctattccaagttgacaattatgcaatctaagaataaacattttctacttctttggtaggtttttgaattccagttgacatcagaggatatgaaagttctagatggtctaaacagaaattatcgatatgttgtcatggatttgtaagtaactttggaaaatgggtttcccagtttatttttagaggaggaatgtcagatgggtgttgaaagtgacctcaataccagggagacagaggccagtgcaagtgagaggtgagacaggaactctctggaactctccttctggattcactccagagctctgttctctgacagggtgagtggacccagggtcagcatsggtcaacctgtgcctctgctctcctgactccatggaaatttccagagcagccaatattattgctaaatctgcaactttcatgtaggcctggcatttctgccgtggcctagtggacagtagatattgcccatatggcttgattaatgtttttccaaatctgtacttatagctttttcttccaaatccactcagtttcttatcagctaaaaaacatttccaacaacactggtgtccatgccagaaattctcttctcttccatatggaattgctcactagatcatgtcaattcagtatctttaattgtttcaaatttctttcttccttctctttagacatttgctcatgacccaaacactgcattttgcctccaggaagtttgcccttagtaggcaatagaactcttggctttaatttttgcaatatggaaatctcaatgcagagtataaagaagctttagagaagatagattaaaaatcaagggaagagccaggctcagtggctcatgcctgtaatcccatcattctgggaggccaaggcaggtgaatcacttgaagtcagaagtttcagaccagcctggccaaaatggcaaaaccctgtctctactaaaaataaaaaaattagccatgcatggtggcacacacctgcaaatccagctactaaggaggctgagacaggagaatcccttgaacccgggaagcagaggttgcagtgagccaaaattatgccactgcactccagcctgggcaacagagcaagactcagtcattaaaaaacaaaaatatcaagggaagagttggaaagtcccatctttggggataatatatagctgacaaaagatcttactcttttctatatgctccaaggttctaggattcacagaaaggcactcatgtgatgagggcaaaacaagttatgtcactgcctgcagtggagatgttaacaagtaatagacatgagataatgtattaaaaaggataagcacagcagcacatcataagaactcaaacatttttagatatctttattagtttagaggaaaatagtaaaatagaaaatcatgaaaaggaaaggaagagtggcaaacatcagtaattctcaccaatcaattattcaatattaatgaatcatttattcattctattttgtgtgattttcacctaaagattgcccttagcatattgtagggttttgaatatggaaccccatatcacatatgacaatttacatgtctgaatcaaagaaaatattttccatatggtaagcagctagtcagtaatgaatacattcttttaaaaggatatgtgattgctaccaataacatttaaccctcaaaactttttgttaatgatgaacatatagctggcttatttctattcaaaacaatgcaagatgagttcctgctttcattgagaatttgaaatagaaaatgtcagaatatctctttgctctgttgacagatatggaggactatgtttgaacaattgaccctgtgtagtttgtgtgataaattccaggcaagggaatataagttgaaaattttcttattttgaaaaaaaaaaaacacattataaactcatgttcatgaaagacattcnacaaatagtccgaaaataaacttcttaacattcacactaatggcagcttcatataaattcactttgctaccagctttttaatagagtcatttcatccatatttatgtactatcctttctcttttcagtcttatggaccatcctgattatccattttcagatgaatattagcatagagggtgttgcacgacatctagcagaaggccctgtgtgtggatggtgatgcagaggatgtctctatgctggtgactggacacacrgcctctggttaaatccctcccctcctgcttggcaacttcagctagctagatatatccatggtccagaaagcaaacataataaatttttatcttgaagtaattgaatgtttttccttaaagattcttttcctactcctttctctgttacttgtgtgtttcttttccttctagttctttaaggccaaaaactgatttgcctataagtttggggcagagagcagatgataaccaatattttatagacatttttgaggtgagagtaggtggagttttcagcctctagaggagaagcaagtgacatatttgttagtctgtctttagctcttccagaaagaagaaaacacacagcacagaacctgaacatgagccatattgacaggatgaccaacaattaatggcctccctccagcatcgcaagaatgggagctccagcaacctaggggtgcagcatccctgtggggtaatggttagggaggtgggagggcacccatccaggagaaataattaggagtcagatatgggagaggtgagaagggagttgagcacattctgcttgggaaatacaaacacatgctcttttgttaattacgtcttgtgcataaaaggaaacttcccacatcgttttaaggctgagagccaggccttgacctcctctgtgtgcccagtatcagcagtgaccttgctgggctgtggtggagcaggacatcaaagacaccagtgactggccacattctcctgaatatcagctccatttagaacaaattttagattctaaaaatatactcttaatttgttctactcagtcttttgaaatatttcatacattcaaaaaggcacacttactaatataaaatatctgaaagccattacatgttgtcaaattaatttcaaaattgcaaatacatctaattatccaaaatttcaaaactcttctgtaaacagtgtatgtcaatagcatgatgctttcaaactttgtaataattattcctgaaagttactaaagacacctaattgttcatatagtttgtaggggtacaaatttaatcagctagtcaagaaaataaaatttcattccagacaactttttgaaaagttgggacaatgttatgggctactggccaaagcactttgagactgacaggtgtttatgacctgtgcacattttccagtgcttttaccctccactgatttaaccccattagaggggtttccttaagccatgtctttcagctgagaaatatcctgccaagttttgtagtttacaatatttcctaaaatgatttgtttcttagaagtggaagaggccataaactttggaagacccttgggtgatctttggactggttttctgtcttcactcatttccttgatgatgtcaaatattctcatggctttaaatacaacctctaggccaagaaaccacaaatcaatatcggcaggtgagctttttctccgaaactccagaatgaaacatcatattgtctgcatctctacattagtgcctaatggactttcacacttagcatgactcaaacaaagctcatttcaattgctgccttcctgttccacctcaatgttcctagactaagtaatgattatttcacgtcttgtaaagttgattgacataatcaaaaattaatgtttttttaacttattagtcaagtatgtaatgctaaagaatttcagattttcttagtatgcatgacattattttccccaagatgtgaataattagaagtcatttataaatagtaaatctaaaaaaataaaaaataaatagtaaatctgctacaggcttattctacttgtttacccttcattttcacagaaatcttattttgaaaagaaagtttaggccaggtgcggtggctcatgactgtaatcccagcactttgggaggccgaggcgggcagatcacgaggtcaggggatcgagaccatcctggctaacacggtgaaaccccgtctctactaaaaatataaaaaattagccaggcgcggtggcaggcacctgtagtcccagctactcaggaggctgaagcaggagaatggtgtgaccccaggaggtggagcttacagtgagcagagatcgtaccactgcactccagtctgggtgaaagagcaagactgcgtctcaaaaacaaacaaaaaaaaagttacttggaattttttaaagcttaaattgggaacacacagaggttacagaattttgttacatccaattcctcatgtcattatattttttctataagaaatgctaaagtgaggctggaacagtggttcacgcccgtaatcccagcaatttaggaggccgaggtgggcagattacttgaggttaggggtttgaaaccaccctagccaacatggtgaaatctcatctccactaaaaatgtgaaaattagccaggtgttctgtcatgcacctgtaatctcagctactcaggaggctgagggaagagaattgcttgaacccgggaggtggaggttgcagtgagccaagatcaagatcacgccattgcactccagcctgagcaacagagtgagactccacctcaaaaaaaaaaaaaaaaaaaaaaaaaaaggaagaaaaagaaaaaggaagaaatgatgctaaagtcagtacttcaggctgaaataaaagacagtaactcaaacccataaagatgtataaagactgcttgtctctctatataggataaaatatgaaaaaaatgtatttttgaagttcacatttttactccatttatctcaagatttgaaatataaatgtatgcaaataacactaaattaatatgtacataatgtgtaatctcactgacaaaagtaatgtgagatgaagagaaagaaaccctgtggaaaggtttatgaaatactggtagattggtattgattcacagtaaattggtattgattctaagcaaattgttataactttataaagttgtatgtcatcctcacagcaaccacaaagaaaataactatagaatatacttaagaggaaatgatatgggaatcccaatgtcacttctaaaagtcatgcaaacacaccaaaaaaatagtaactgtggatatgaaggacaaaaaagctatggacagaaaggaaagactgaaaatagcaaaagtcacattttccgtgtcactaattcaatcatgcatcacatcacacctcttctgaaagaggctttattaggcaatttcatctttctttgtgcaaagatgagggagtataattacatgaacttggatggcatagcttactattcattaaagctatatgatatagaatatggggctggacacggtgtttcatgcctgtaatcccagcactttgggagacaggcaggcggaccacttgaggtcaggagtttgagaccagcctggccaacatggtgaaactctgtctctactaaagatacaaaaattagccaggcatggtggtacacacctgtaatcccagctacttgagaggctgaggtaggagaaccgcttgaaccagggaggttgcagtgagccgagatggcaccactgcactccagcctgggtgacagagcgaaactctgactcaaaaaagaaatttatagaataaaaatatggggagctgggattacaagcacctgccattacgcccagctgatttttgtatttttagtagagacggggtttcaccatgttggccaggatggtctcgatctcttgccctcgtgccctcgtgatccgcccagaggagggagtctttaaggatactgtaagacgccctataagaagaaaccacagtgtctacacaggtaaataagaaattcaaatgatctgaaaaacaaatcaaaagtaagaaccaggggagggcagccaagatggccgaataggaacagctccggtctacagctcccagcgtgagcgacgcagaagatgggtgatttctgcatttccatctcaggtaccgggttcatctcactagggagtgccagacagtgggcacaggacagtgggtgcagtgcaccgtgcgcgagccgaagcagggcgaagcattgcctcactcgggaagcacaaggggtcagggagttccctttcctagtcaaagaaaggggtgaaagacagcacctggaaaatcaggtcactcccaccctaatactgtgcttttccaaagggcttaaaaaacggcacaccaggagattatatcccgcacatggctcggagggtcctatgcccacagagtcttgctgattgctagcacagcagtctgagatcaactgcaaggccacagcgaggctgggggaggggcgcctgccattgcccaggcttgcttaggtaaacaaagcagcctggaagctcgaactgggtggagcccaccacagatcaaggaggcctgcctgcctgcctctgtaggctccacctctcggggcagggcacagacaaacaaaaagacagcagtaacctctgcagacttaaatgtccctgtctgacagctttgaagacagcagtggttctcccagcatgcagctggagatctcagaacgggcagactgcctcctcaagtgggtccctgacccgacccctgagcagcctaactgggaggcacccctcagtaggggcagactgaaacctcaaacggccaggtactcctttgagacaaaacttccagaagaatgatcagacagcagcattcacggttcacgaaaatctgctgttctgcaatttctgctgctgataccaaggcaaacagggtctggagtggacctccagcaaactccaacagacctgcagctgagggtcctgtctgttagaaggaaaactaacaaacagaaaggacatccacaccaaaaacccatctgtacatcaccattatcaaagaccagaagtagataaaaccacaaagatggggaaaaaacagagcagaaaaactggaaactctaaaaagcagagtgcctctcctcctccaaaggaacacagttccttaccagcaacggaacaaagctggacagagaatgactttgacaagttgagagaagaaggcttcagacgatcaaactactccgagctacaggaggaaattcaaaccaaaggcaaagaagttaaaaactttgaaaaaaatttagacgaatgtataactagaataacgaatacagagaagtgcttaaaggagctgatggagctgaaagccaaggcttgagaactacatgaagaatgcagaagcctcaggagctgatgcaatccactggaagaaagggtatcagtgatggaagatgaaatgaatgaaataaagtgagaagggaagtttagagaaaaaaaaataaaaagaaacgaacaaagccttcaagaaatatgggactatatgaaaagaccaattctatgtctgattggtgtacctgaaagtgactgggagaatggaaccaagctggaaaaccctctgcaggatattatccaggagaacttccccaatctagcatggcaggcccacattcagattcaggaaatacagagaatgccacaaatatactccttgagaagagcaactccaagacacctaattgtcagattcaccaaagttgaaatgaaggaaaaaatgttaagggcagccagagagaaaggtcgggttacccacaaagggaagctcatcagactaacagcagatctcttgccaaactctacaagccagaagagagtgggggccaatattcaacatccttaaagaaaagaattttcaacacagaatttcatatccagccaaactaagcttcataagtgaaggagaaataaaatactttacagacaagcaaatgctgagagattttgtcaccaccaggcctgccctaaaagagctcctaaaggaagcactaaatgtggaaaggaacaaccagtaccagccactacaaaataatgccaaattgtaaagaccatcgaggctcggaagaaactgcatcaactgacgagcaaaataaccagctaacatcataatgacaggatcaaattcacacataacaatattaactttaaatgtaaatggactaaatgctccaattaaaagacacagactggcaaattggataaagagtcaagacccatcagtgtgctgtattcaggaaacgcatctaacgtgcagag

SEQ ID NO: 94546 - DNA, 9108 bp, Homo sapiens
  misc_feature (1)...(9108): n = A,T,C or G
ctttcagtttgagaagtccgctactatgtataacaactgattctattgttaaacagctttaatatttagaaggtgtacttttatattgagacaacttcttataatttctactaattggtcttatttctgttgttaggagtcagagagttcttttattttttctattactataacattcccactttgacaggactgctgcatgctataaactcttaagttttgttcacttttcaccatatgacgtgattttaaggtgaacactgataaacttcctagggttactctgtgttttttaatgaagatttcttaaagtgccaatcagaaragcataatwctaaaaatatggtcaatttataaaaaaaaaatgttcagatgtagtattttgtacatttatctaaaaagaagcatgrcggcctccaatatttatttagcatatgtcatgttcaaggcattttcacatatattacttaatttttatagcaaaagaactcattattctcattttacaaatgaggaaactgagacacagagaaattatttatattgattaaattttctcagctactagtaatagagcctatgttttaatcctggtgtttctagtactaatgcccttcccatttcaatgccattgcatggcttacagtgatgttaagaagcccttgcaggccaggtgcagtggctcacacctataatcccagcactgtgtgcggccagctgagaaggtcagctgacctgaggagttcaagacctatctgggcaagctagcaagaccttgcctctactgaaaattaaaaaaaaaaaaaaattagctgggtgcggtggtgcacaccaacagtcttagctacttgggaggctgagatgggaggttcgcttgagcctcggagatcaaggctgcagtgagctacgatcatgccactgtactccagcctgggtgacagagcaaagaagtctttgcagtgccttggaatgaaaaggagaggataacaatttgctacctttgtttgaaatatggcaaaagagaaccagaggatagagagatgatgaagacccagtaaagggctataaaaatcaatgaaggcattggattctagataaagtcactgaatgcagagacacaagtaacaggataggttgggtttggtttaaaggagaaggaagagataaatatatatatgctaaaatttggcttttcctcctgtaattaaggatgttaatgattgggttgggccaccaaatrataatggagtaaytaaagaagttactattaatccagacactacttgtggcaatgactgsgtctgtgaacatcgatggcgccaaataaggtgagaatatgtatttagacatgtcctctaatagtaaatttccrtagcactttatttaaaacagttgaagtttaagaatatcaacgttttatatggtattgtgtttttaggaacatggttawtttccgcaatgtagtggatggccagccttttacaaaytggtatgataatgggagcaaccaagtggcttttgggagaggaaacagaggattcattgttttcaacaatgatgactggtaagtamatatcaattaaaaataatattttgtaccagtatgytcttggkttattcttttttttytctgttcattgacatttatcatatctgaaaaatcatgtagtcagtggagcragaagacaatagagatcaaaattgggnagaagcaaaaggatgatggstgttactccttcgttctcctgttttcataagkgctttstgttgtaagcagaatcctttstgtgcacccttgcaatatcttatgcatatatayaatgcacattcatatgcttacctacacatgccacaaaatacacaaagtaattaatagaaggattgtgaaatcattaaaagaacgtttcttatagtcctgctcttttaatcatggaaaaatgctgcctcagtactaaaatatctttatttctctttttctcaatgacagctctacctagttttttggtatactttcttcacttctctgtctccttgtgacaaataacatttttaaagcatatggataaataatatgtatcttgtggttaatgatttgcttcaggagacttgagttttagttctgaaacttctcattattggcctttcatctgtgatttttgtatcctttggctgtagtataaatgattcccgaaactgtagctgagaagacctccttgcaaacagttgaattgtctctgtccaaggccaactgacactcatacttagctcactctagtataaattatacttcacttatgaaaaataaataaatacaaaaatatataagtcaagttgatctctttcctgccaaaaaaatgcgtgtctatttccttagtttccttcttttgtggatgaaaataccaaaaaaatcttttgtgaaaaagctttatatttcaaactatcacttcctcatacaaatgctagaytgtttttatgtacaccctaaattctttttgacctcatgtagaataaaagaaggttaaaaaaataataccctttaaatttttaaagtaattggcattaagttcagttgagaaaaaatttgattttaccaaggtagcactttatcaaaatgtgaccgctcccgccaatcttcggtgatattcttcaactttgatttttcrgttatattttcactactgaaaaggaaattggtaggttttctgtaaggttacttttggtcctagaaagctgtttacacctactagggaggcatatgggttttcttcttaatgagacttcactgcttagggttctaaaacataaagttatgctgtttatttgtgttagtctgtattcttgatttcattgttttgaagttaaatctgaaattttattttacaggacattttctttaactttgcaaactggtcttcctgctggcacatactgtgatgtcatttctggagataaaattaatggcaactgcacaggcattaaaatctacgtttctgatgatggcaaagctcatttttctattagtaactctgctgargatccatttattgcaattcatgctgaatctaaattrtaaaatttaaaattaaatgcaaatccgcaaagcaatagctaagtgtgtttcttttcttacatatacagtaatagttacatatcattaattttaaataaaagctctaattagtaaaaagaggtttaagacacttgatagtatgaaatacaattccaggttacacataagttatttattttggcaaaaggatgactcaaaaattttaaaactaggcaacaatctttactcattaagaggtaagacttagctttccaaacagtttgtctcctgtctactcttttctctccttggcattctaccaacaaggcaaaccaaatatttcattattcttctctattacatgaaaaatctgtacaagggaaggaaagccaaattttacccttacataggtttcaaaagaatcctttttccataggcaacatttacatttttatgcctttttataatcttttaccacaaacacatttaagtgttcctacacaccttgcatgtaaatttatttttagttgtcttatttacatatttttatggtcaatcttagcaatttttaactttaatgtaaacctggtaagttgttttaattatgtactagatgcagataaagtctgactttttccattctagttagggcatggttaatttcatatgtccccaggccttaccaagttgtaaagtaggcagcctacaaccttgaaatatttagcaagccttttatctaatttatgtgatttaaacctgctatttacatattgatgatatttgcattttccaatttgatctttaaaacagtttttatttcttagagtttaaaaacacataaactaaaaggcattacggttttaactttcctctaaaatatttgatttaagtgcttatttttatttaaggcaatcaattggtcctcgttacagacatcacacacaacacatatattgctacacagacaaacagaagaagatccagtagctctaagatttcttctcgtcccatttcctaattgcattactggcttcccagtagagccctttaagaacagggatagcaaaccacgaagtttctagggcctaatcaacttgtatagctgtaagacaaaaacagattttgagcaggattgatcagcctctagattctgggattccatgaggaaaacagaggtttctcccaaaatggaatccatcatgcattttctgtttttcccaaaacgtttcaggccaccagaagttatcttgtgtgcattaagagtggaaagacagagtggagaacagtaattcagtcaatggaaaagttcttttcaagaaaaacacgatccaagaagacaaaaacatgcaggtcttttaaatatacctataacttgaatatccacttttaatcaagctcagcaccctttcagaaaatcctttgacatcttctgtttcctgactttagctaaatcaagcaggtaatatttctggcttttgaattttaccaaaggtaacatcacaggggaaactaaaaactctccgttaggttataagttcaccgttagtatacaagatattttataagtggtggtaagcagcttttaccagatctagaacctttaaagtcagttgagagaaaggaagatttcagaaaggcagttagagtttttcatggcggagcacgagatgattaaacgtcacacagttgttaactggaaagtattcatcacccaggctgggattgaacctgggtcaccattgtaaaaaggcaacggctgaaaagtggtactaccacatggttacaggttatgcttaaggacataaaacaagtcggagacatgcagcaaagtttgttactgaccagtttatgagggtgtcttgaacagtgagctcaaggagtctcaggcctggattccattccaaggtaccctctgtctgactttttcttctattttctctccttttcctgagcctcctcctagtacgtcttatgaaagacagaggtggctactcttagaaggttttctaaggtgccttctagtcctatagcctgtttctgtagcttccttcaaatatcaggagctgcttgagtaaacctgtctttcaagattacctgtccctcaattgaattagaatatagggaagcatgttttgccatagtctctgtcagcctttatagaaaggttgaaggattttcatctaggttttgatctatcatggatagcttagagtagttaacaggtttggctctggtcctctgtacaccttctaccatatacatctgaaagtgatttctttttcactcatctatgggcttcgtagggttccatttagagttttcaatggatactgcctcttttcctactaggtatggggattctgcctctttctcaccctctttcccwttttgamtggctataggagacatgctgttcatctctgattttttctgctacctgtagggctgcctgtctctcaggagcagttagggtttaagagtaacataacatccttgcaggagagtttaaatacttgggttatatcctggaaggcctctatacatgagtgaagttggcacttgcccagagtgatcttcagtatctgaagtttagagactagccaggctatacccaaggggaatgcaggcttgaagatgggttgttacccatgcagaaaaggaggggagtagaaggtgtcacttggtctcctttctcctttcaaagtgacccaggatgaagagaaagattacaggggtgtccctcttctcctctttcctcccacctcctttgggtcccagcaaccatcataggtgctgcccatggatgcaagcatgaattgcacccatggatctggaggtgctagctggcaggagtaatcatgcttaccagcacaatgcctcatctcactgctcttctgggtacccaggcctcccagaagattgtacagtagataaagttgggtgacacaatttattagagggagtgctttaaccctattcctgcctcctctagttatggccctggaaaagaagtgcattcccagaaagttttacccagtgacttttaaacaaaaaaacccttttctgtttaaatgccaatgtatctggaaacagaacaggtgtctcacgagaacatatgcatttaacggctgtcctccttctgatgggaacagcactgaggctagaatttgtctctcaaggctggcttcctcccaactgttgaatgtggagatttttccttacaaatggggcagagagtctgcttactgatagaggaacacaaaaggagaagaaatctgggtactagaggtttttggcaaagggctgaaaagactctttgcagagaaaaaaatcctatttcatgaggtggtgctgtaggttctgaacagttaggtaaaatctgtgactctaaattttttccaggcagaagttagaaagagaagtttggggaagttagaaagagaggttagaaagagaggtttggggtttaaccatacatgcctcccagcagtagaaaattaacttttcttattaatagactctttaaattcagtcagcagtgctgagcttttacatgaaggaaaagcaaccaaaatggagagggaggaagatattcacttggggtgaaatatcttctcatagagtgccataaatgactgtcattgtgggacaaaaagcacttactaggtgaaggtgtagactgaaatcttgcaatcccctggtattttgagtttctgattagcctttccaaaggaataaaatcagatttgtatctatctcagtgagcagagggatgactttgagtagaatgggaggaaggtttgttctaagcagtttccggcttgaattttccttagtgattttgggggcccaatatattttcctttcacacatctgacaagggattaataactagaatatctaaggagctcaaacaactctagaggaaaaaatctaataattggatctaaaagtgggcaaaagatttgaatagacatttctcaaaagcaggtatacatatggcaaccaagcatatgaaaatgtgctgaacatcactgatcagagaaatacaaataaaaactacaatgagatattatctcaccccagttaaaatggcttttatttaaaagacaggcaataagaaatgctgttgaggatctggagcaaagggaaccatcatatactttttgtggttatgtaaattagtacagctgctatggaaaacagttgggaggttcctcaaaaaactaaaaatagagctatgacatgatccaggaatcccactgctaggtatatacccaaaagtaagaaaatcagcatactgaaatgatatctgcattcccatgtttattccagccctgttcacaatagctaagacttggaaacaacctaaatgtccatcaacagatgaatggataaagaaaatgtggtacatatatacaatggagtactattcaactataaaaaaatgagatgctgtcatttgcaacaatacagatggaactgtacattattatgtgaagtaaaataaaccagacccagaaagaaaaacatcacatgttctcacttatttgtgggagctagaaatccaaacgatggaacacatggacttagagagtagaaagattgttactagaggctgggaagggtaggatgagaagcaagtgggaattttcaatgggtacaaaaaaacagttaggaaaatgaataagacctagtatctgacagcacaacagggtgactatagtcaataacaacttaattgtacattttaaaataactaaaagaatataattagattgtttgtaacataaaggataaatgcttgtggtgatggataaccatttaccctgatgttattattacacattgtctgcctgtatcaaaatgtgacatatgccctgtaagtatatacacctgctaggtaccaacaaaaattaaaaatttaaaaaagtgtatccttcccagtgaactgaaatattttacattaataatttttaagttatcatagtgtgttggaataatcacacctttggaaagaaaaatattatagatataaactctcaatgatggagatatagatctctctttctttagtggattaaaatatgcaatttgttatcaacattgcactgacaatttttaacacaggacatattctgcaaatgatatgattataggagttataggaaaaagcattttttcataccgtgattatctaggctatgaggaaaggagatattccctctatggtgtctaatttagcataattattatttttaaactatatttagatttaattaagatatacacaaacaaattacttttagtagtaagaagagtttttaaaatgttttgtgtaagatgactatgtaataaagaaagttacaaacttgctttttaatgtagaaaaataatctcaaataatctcaccttcttactccacggaagttgaaatgttatgtagaacccaatgtacaaaggctctcagtgaggatttctgtcttaagtttcagtggattgacgtgagatcaatgcctgctccacctttttcctccctgtcctaggtgactggataacatttatacagccataaaatgttgctttcaaattcaagtatagagaaaaagctttaaaatgtgatattttatacattttattttaatatcttacatggaaaatgtttttgaaaggttaaaaaattaaaaattttgagagtattgtgagacaatctaatcacatgtggaaattgtgttactatttccccaagcattttttgtacatttatttgaaaatgagttgaatgtaactcataagtagtataaaaatgtttaatatttaattttctgctgcaataatgttacgtaacaaccttaaattcttcctaactttaaacaatattttttttcccaaatttctaggttatttaagggcagttctgctttatattgcagtttgcctgggctttactccaggctgtgtgttggagttaggtctaatctattgtatccctgcacgtcccagttagaaggttaacaaattgtcttcggacttcagtcagttcgattgtatttgtcatt

SEQ ID NO: 94547 - DNA, 69933 bp, Homo sapiens
  misc_feature (1)...(69933): n = A,T,C or G
gctatgtgctacagacatgaagaggattaggacaagttgttcataatctcgcagaggagacaaatgagaaaccagctagtcataacaaaggcagagttaaataagtgctgtaatagacaaggtactgggaaattcaggaaaaggagggactaaaattcaatataggggactagggaaggctcactgaaggagatggcatttgaacacggccttaaagaatatgttagaccagaatagcatggaacatataattgggcattcttccacattcatgttctttttttaaaaaaatcttttatttaaggttcaggagtacatgtgaaggtgtgttacataggtaaactcatgtcatagggtttattgtacagattatttcatcacccaggtattaaacccagtacctaatagttatatttttggctcctctttctcctcccacccttcactctcaagtagaccccagtgtcttttgttcccttctttgtgtccatgtgttcttatcatttagctcccacttataagtgggaacatgcggtatttggttttctgttcctgcattagtttgctaaggataatggcctccagctccatccatgttcctgcaaaagacatgatcttgttctttgtttatggctgcatgcattcaagttcttgaagtctgaaattcttccactgtgcaggctgtggcagctctcatatttcctttcacactgaacctgctctgtcttcctggagacttccagcctcccaacccatcctagtctcacggtcctttatgcacttctagatgagactccaagatcagagttttcaagcagatttttttttttttagtacttctttgtcctctggcttctgtttttatctatcgtactaatccccaatcttgttttgctgaaattcatgttatccattcagtatgaggtctctcaacaactctctagtctaactcaacatttctttgtgtcttccccaattctctcccccaaccctatcctctatggagggggcattcctttctatgagtaactctttatcccatgttttctcttcccttccaggacccagtagcatgctttttctcctctctcgtatccagtcttcattgcctgttaatggttctctccttagaggtagatccagggttttcagggcctaaagcttatttaatcttgggagtcttcttcttcttcaaaaaaaaatacaaaattacaaatatcaaattaagggggaaaagttaatacttacttagaagggggctgtgtaactgcgaggggccctgaagcttatttcatagtgagtccatctctgtctgtcctataataaaaacctaaccaaacacaaaagcttccctttgctttgctattgcaaaccattattccatttctctttctcaacaccctgaaacttttcaagaaagtagactaggtacattctcttcactttaacatcactttgacctcatgcccaccatgctattgcaatggttttctctgaagcaccactgaccttctaatccctaaagcctatggccttttcttggtcctgaactaacttgtcccttccataaaaattcaacatgagtcatcctctgacttcttcaaatgactcttttcccactcaagcaccaatggtgagccttcctcagggtcccttcaacatcccaggttgtcttccctcccttgtgactcaatgatcacacctatggcatggcttccaccatcacccacctgtgtggctgacccaattatgtgtcctttgctctgacttccctcataaacttcaaacttaagatacaaactctctacctacgttccatcagcacaccaaattcaacatctttttcttgatgtgtcaatggcatcactccctccctgccatctgctctagaaatttcaaagtgttactttaaacaaatttcccctctctccttctatcctcccgtcatttctaagatctagcagttctactccacactgattccctagtgtggttctttctactgccatttcccgtacttcaatttttttcactcttgactcagactgattcaaaggctcttcattgtttgcagctaaggagcctcagagctgagtatgacttgccccattgaattaatggcaggccagatgtagaatccaggtctcttgcttcttttcggtggctgcatacttctaagcccactataatccattttatatatgaatgccagattaatctttctttttttgtttttttttttgtttttgttttgttttgaaacagggtctcactctggttgcccaggttggagtgcagtggtgcaatcttgactcactgcagcctcgaccccctgggctccggtgattctcccacctcaccccccgagtagctggactacaggcacgtgccaccatgccttgttaattttttgtatttttagtgcagatgggttttcgccatgttggccaggctggtctcgaactcctggactcaagcaatccgtctgcctcagcctcccagagtgctgggattacaggtatgagccactgtacctggcccagattaatcttaaaagtgattactccagtgaaaccctgtctctactaaaaatacaaaaaattagctgggcgtggtggcgggcacctgtagtcccagctacttgggaggttgaggcaggagaacggcatgaacccgggaggcagagcttgcagtgagccaagatcgtgctactgcactccagcctgggcgacagagcgagaatccatctcaaaaaaaaaaaaaagaaaaaaaaagtgatgacttttgtccaggcgcggtggctcacgcctgtaatcccagaattttgggaggccaaagcgggcagatcatgaggtcaggagatcgagaccatcctggctaacatagtgaaacgctgtctctagtgaaaatacaaaaattagctggacacggtggtgcatgcctgtagtcccagctactcgggaagctgaggcaggagaatcacttgaacccaggaggcagaggctacagtgagctgagattgtgccactgcactccagcctggtgacagagcgagactccatctcgaaaaaaaaaaaaaagtgatgcctctcaccaaatgaaactattatactatagtctgtggcatggtatttcagggctcaaaatctgatcaaaagtaatatctcaactttatctttctcttggccccttgctgtactctacaatcaaatgggctcttgaatatcctctgaatatggccctactttcatgcaaataattcatggaattagtttcttcctcccctgaaatgtagttcagtagtttgaacctcatatcacatatgatctgatgttgtctttacttgtctgtgtaagactatggtgactccccagcaaccattccatcccagcaggttggaaatccagagtaatcccatctacttctctgtgattggttaggggtgggcatgtgacacacttctggccaaggacacactaagggaagtctgctgggaagattcttggaaagcttcccatgtgttagaaggaaacatagaagaaaatgtcctttctgcctctggatattttcatgtctggatgtgaactgcaagaacagctacagccaccttgctctcaacccaacaaaagagatggaaagaatttggacttttgatgacatgaaagctcaggtcaaccaatcctggagactgttctgtctttggacttcctattatgtgaagtaatttatttccttattgtccaaggcagattaaatcacagttttctattatttgcagccaaaagcatcaggaaacaatattttgtttttgatgctaaatgttaagcttcttaaaatcagggactgtatctatgtatctttctagccctcttacagcttggcatgcagcagatggatgctcaaaaagcgactgtgaaattaatatttgtatatatttctgggatacaactagtaaaaacacttgcaatttaaaaagctctattttctcacagcaatctagaggtaacaaaataaagcttagacagattaaatagcttgtttagggaattttgtttctcgaagtcataccaacttctcaagagtttgttgctctttgtctcaaatccttatctgggaatgccatgcctgttagggtcccaagaaactggggactgaaggaaaaataaagtggcaagccacttctgtgcttaacccagcaataatgctaatacagtagcctagttgtttctggctcagaacccaggcctggaaccccttcttctcccagtcccagtgtatagtgtggtagctctagtgctggggtcatgaatccccataagtacaaaattttagatgcagaagtattttcctgggaagatggatcatagcttttattagattctcaaaggggtctgtgagaatcttagtcttcttaaaggctagatagaagttggggtagaagatggtagaagttggggcatggccaggaaaagttagggctggtttgaatgataagagactgaatttgtaggctgtggggagctactaacttactgaggtaaattggaaaagtttatttgtcttcttaaaggctaaggactataacatgatacaaaatctcagaagtagatggaaataaaaactttcagtagacttaatgtgtccctgtgttgttctgtattttgtcatctaaggggaccagtagcccagggatctcttgtagattaggaagaaagagacaggtgtcagggttgggtaactctaggtaagactggaaaaggaaaatgcggagcccctttctgaaaaattacgaatttcaaaatggcgacaccagaatattaaaccaagctcgaagcccttctaagctgggagcactgtgcaactacataggttggacgcatatgcagctggtcctgcctcttgcacttacgattgcacacactattgtctgccaaattgggatgtattcctttggactgctatccagacctttattcattttttgagcacctacaatgtgccaggaattgtgctagtggtggggattccagataagagcgagcattcaattcaatcatatcgggtttctactatataacaggtcttgttctaggtcctggggatacagctctgaacacattaacacggggcagagacaaggaataaatgggttaaagatcagatagtgacaggtgcccaacaaaaacttagcacaggacgatgtgacacagggtgactatttgaaatgggttgtggtggggggtgccggagatgatatttgagctatgagtttagtgaaaatagtgggcagccctagctccatgggggtgtgggtggggagggttatcttaagcttgggaaacaaggcaaaataaggaaaggggggagagagagactatatacggcagagtgaacacaggtggtagctaagggaagggatgaaatcatgggacacctccaggcaacagcctccaggggctaaaccatcgtcttgggtaaatggatggtttgagagcaaaggcgggagcagcgagtccggtgagaaggtcctcacaggaacccaggctggtgagaaggtcctcacaggaacccaggctagcgaagcggtggctcggactagggtgaaagtagcggaggtaacgctgggtgagccgcacccgcgtctcccacgaggtccccccagtgaggttagcgggtgccgcgccgagcgccaagctgaggagccgcccccaggggctggcgctagtctgcagcggcgccgacgtggccggcgcgatccgccacgcacgtgtccggctccaggccgggggcgggggcgcgcgggggtctccggctcctccccgacttctggggcccgggcgccagctggccccgagcctccagtccgcgggtgcgaagaacggagcagatgggtcgggaacaagggagctgggtcaaggcgaggagggggcggccgggcgcgcgcgctctggcctcgtgcacgcgctgaaaccggagcgcgcagggcgcgccagggtgagggggacgggggcggggtgggggcagccctttcccaggcggtagcgggggcggcgtcgctgttgcccttttaagccgcggggccgccgcctcctgccgctggagtcggttacaaaggaagcgccacccaggccgccacacgccgaggcttccgcgcccctcgccattttccagcagcgctcgacgaggcggagccgcgagagcgcggcccaggccggccccgcggggcggtcgcggccgtgacggcggctccgggcccggctccccttccgcgcccggctccccttccgcgcccctcccgccggagatgaggggaagatgtccgtgtcagggctcaaggccgagctgaagttcctggcgtccatcttcgacaagaaccacgagcgattccgcatcgtcagttggaagctggacgagctgcactgccagttcctggtgccgcagcagggcagcccgcactcgctgccgccgccactcacgctccactgcaacatcacggtgaggygcccggccgcggccccgcggggcagggcgaggacggagagggggcgcttcgagtcccgggacaaaggggagcctgccccggagaggctccggctccccgggcggggcaggcccgcccctttcccccgcgacttgcccatcccaggccgggctgggactgcgcgaggcttgggtgggaggaggcggagggcgcgtctttccggcttctcgccaggggctggcttgggggcttctggcccatctcggtccccgtctcctagccccgagggggragtccgcggcggcccaagcccttgtggggtccatggccgccctcagccggcctgctcccgggaccggggcggggcggggcggggcggcgcagctccggctgttgtttgagcccaggccggcaaggggaacggcccttaagttttaacgcctcatttttcagtcggattttccttcttcccgcttgttcagccaattgtttttaagtttgcgtttaaggagaaactgacaatgagaatggactcgttgacggaggaaaagttggaatgcagactctggtgctgtttgagcgacccctctcccccgggcctggctgcgcgctgctgtgttctggaaaggagcatagtaccgtcgttgcggcaggtggtgttgagtgtgtattcgtgtggcccctcccttgtgtgtaagcctcgaaaatggataggtgaaaggagatacgcgccagggctgctccccggaaagatcacgtatgtcacaaagccgaaaagacacttttaaaaactcactcattaagcggaaatctcattagaaacccaaggcttggtaaaggaattgaagtattaagtktctccataaaagtgtatcgtgaagctattcgtcgtgaaattgatgtaggatattggtccaaactgcagaatattctsttggttataataggcgtcaaggtggtggcttcgggctccttttcaaacatggctaaaaccaagtcttgtttttaactccctttggttgagtcagtgggtactcaagtgcctgcagggtggctggcgtttgcaaaaaccttgatgttataattgaccttaaaatggttaccagactatctgggcagaaggtgtgttaatttcaaaaaaaaaaagacaagtgctgtactgaggagataattcatttattgaatgaatacgtctgagtgttctgggcactagtgttgcagaattgagtgaagtcgtcctcgctctcagaactcagtcttcttgggggaagagttcaataaggtgacagctcctgtggtatcatcaggaaagccaaagcaactaattttgacttgggggaggtgcgcttcagggaaggctttgatgagaggctgagacagttagagatgagcttccacaggtgactacaattttggaaggctggcggaagggcattttagactgaggaaactccacccaaagaagacacggagatttgagaaagtgtggtttccttagaagtagaaaatttatgctaagacttgagaagcccacgatacaggctggagaaggggaggattttccaagagtggaaaacagaaagtgtagtagttgtcatgaagcaggtgttttaaggagacgggcctgaatggcttcgagggtgattactctggtagaagttggggcatggccacgaaaaggtagggctggtttgaatgataggagactgaatttgtaggctgtggggagctactaagtttactcaggtaagttgggagaatgtatctttcatccaggattagaaatggttctctacagtgggtggcattaggaaatgtggttatcccagtgggggtggggtggtcttattgctgtgccggcatttagtgctaggagtacagggataccaaatgttttgcaacgttcaggcagtctgccacagcaaagaattatcccacctaaagtgccactggtgccccatcgagaaccatattgaaggctggtaagagtctgctgcagataaaaataaggagtgatgacctggattaggcagtggcaacagaaatggagcaagaagtgaatgagacactttcagtacaaggaggatttagtgaggactagtgtaatggcacccaccgctaggtagaaactattaaaattgacttgctagtgaaatatgacagactatcaggagataattatcatggcagctgctcagtacaaatgtctgctaactttttattatggaaaatcatcaaatgtacaaaagttgaacagtgtaatgtagccagcctcaacaatgataaacttttggctaatcttcatctgtactccactttagattattttgaagcagattccagacagatcacttcatctgtaaatatttctgcttgtatcttttgaaggtaaaagactcttttattttttattattattttttgagacggagtctcgctgtgtcgtcccagctggagtgcagtggtgtgacctgggcccactgcaacctccgcctcccaggttcaagcaattctgctgccaccgcctcccgagtagctgggattacaggtttccgccgccacacccggctaatttttgtgtttttagtagagacggggtttcaccatgttggccaggctggtcttgaactccacctcaagctcccaaagtgctgggattacaggagtgagccaccgttcctggccgtaaagactcttttaaacatggatgactgttttgataaaatgacatggcttgttcatgtcgataccatttgcttagaagggaaagatcaagggaaaaatggggttggatttcaaatgatttggtttgatcgatgatttgttattctctaaagttgtaactctggaaaaggtaatgagtttgacttattctttaacttttcctctttagacagttcaaatatttgaattctacatgctaggacttgttttctttatacttaccaagaaacatccttatgcagtttctctaatgtttgagaaactaagttgttttttacacacgtgcatgctagttcctgaagagtcctgtacaggtgctctgctggcttttcctttcaggtttctgtatcagctgtatttctccctgtagaatgtgcccctgacctccaccccttaaccttaccccatttgtctttatatgcctgaccatccgtcaaggctcttctgggtcatatttagttcatgctgttatttccccttcctcccttctttagtccttactatttttgctttggtcatgttttcttatgctgtattctgtaagcctttaaatttttctttttatggtggcaggggagaatattttataattatgctttgtgctttttatcttccactcaataaatgcttcataaayatttgagtatatagcgctattctagctgtattgtatttgaacaaaaatcttaactgccttgtaagttaactgctaagaatttgtcaaaagtgcagagataacatcaataacttgtcatggatagtacaaaaaggtctctaagggcttgatggaagtctgtaaattgacttcatatgagagtgtaagaagtgaaaaagaccaaaacagagtagatgttttactctgtaggccaagggaattgagctaattcttttcctgttttataaatttgtcctgatcttaaataatgaagggaaaagagtgctctttttcaacctcgagtcctttttattcttttctgtgaagccatgatatgaaagattgcctgttatacaaacttaagtatagtttttccatcttcagtaaactaacctgattgccgtctaattagttgttacaatcacaccgaaatgcaaagcagcttgttttaagcagccttattgggagctagtatatggctttagtcgttttgaagtatttaacataacttggcaactccattactccttttatggactttttggcatctgggcattcttggtaggaaatcactgttttagaatgaaaaatctcccccaggaagtaaattagctagtaaacaaatgaaacttcattttttatattacttgtagagcataaatgattaccctttctgcgtataagtggctgtttgctaggctgcttttagtgggactttgtttttgattggttaattaaatttctattcattattgccaaaaagtgcctacccccaacagcaagatactaaattttaaaaatgtkggagctgtgaatctakgaggaagtgagaagtttagcttttatttagtagttaggagcttaagtaagtcacttcttttactgtgtktctgtgtactatagataatatttttttgcactgcaagagagcatatakaggaaagctctttggcaatgatattatgttctacaaatataaaagcgatggtgtcatttgtggctgaataacactttattttgaaaatgctttataacaggtttttgtgggaaataaagcaatgctgttaacttcatcttgcatttttctagtctttactatgattaaaaagtagtccagtcaaagttgtacaaaggaaataaacctggactaaggagcctaagacttttctctttggtttgccctcctgggacagattacctttccaaattgaattcatggaagagcatttggaaatatcagaactgtcatgttaagcacctaagtggtactttcattccagaagaatcattgttttcgtttatctgacyaatttataatatagggtcaaattcctggtggttatttatgctccctcatccccatttttatacctgtccttgaaaggaacagatatatgaagagaagacttaggtttcccttttgtgaatagtatatcccttagtatcttgattttttttttttaatttggttaaacatatttagacctggaaaagggtagtatttgataaatgtcagctagttgaggggtggggaattgagttgaatggagatagtcactgccaaatgtcaagcatgactggagagccagagtgataaagcaggggtccctttttccagatcctttgtaacagtgttatgtgatctcttctagaagattctgaaagataatcccaacttggaacctaggaaaccacccagtgggtttctgcagcttaggtggttcagatcctcatcagcacctttttctgtgcctcagtttgcttacaatgatgttctcagtagctgtaatttgctgcttgtgtttgaatacttaagcattttctttttatcatgggtatatgaacatttttatttcaacaagtgttagaattttyactctgcttttgtgggctctaggttagctacttggttgtttatttgtaaaatgattagcagggaaccatgtgtatgcattttaagtatcttttgttgtcagagcagttagaattttattaaggtactatatgctaattctgtcaatttacttcgttctccaccccacatttattgaacagcaaactatgaaagtaatgtgtcccataactggccttcagaagaattacaactgctgttatctctgaaccttcmagaagtttgtgcatcagttttaaaaaaatgatgaaatccctgaagatagctgtgtcctacatttggaaagatacaaaaactgaccattctggtcaaccagttttggttgctggtgcttgagatagagccacacaatggtctcagtggatttatggagaaaaatagatacagaaagttacttctaaataagacaaaaaaatctttttcttgagcagtgacaggtaaagaggttggtttggttaatcttgagttgtgtttccctccattaagacagttttatggtgggratggtagtggtgatgaacttgtttgaaatttgtccacttacagtaatgtttatggtagcttcacagacaacttcattctcacaggccttagaattactataaaactaatagaatggatgaggaacaaaggacctgagtaattagatgcttagataattgttctgtgttttcataactgtggtgaaaaagagtggtgctagaagcacttaaacattctatgtacgggaaaactgcctgaatttgtattgggatttttgagcaccattcactgtttaaaaactgatataccataggtcatatttattttaaagagaaatagtaggcaaacttatcttttcaagatagatataaagcttagttaaccttatcaaaattacaaaacttaaagcatgtgaaagattgaaaatattaatacataggtttaaatattggtcattattttagatgtctttcaaagtagattctctcttaaatgttaaactgaacaaaccttgaacatgatgtagagtttgtgctgaaggttaagtttcctggcgtggtggatattttataatatggaaaacaaaaccttcttattgtaagacattaaaagaaatttagtcaaaactaggagatatgattctaccactcagaatataccactatcagaattttgtatctttccagttatctgctcatctcttttctccgatgcttatgtgtgttccctctcccttaaaaaatcagatttttttgtaatctgctttttcactcaacaatattgtagatccgtgttataacttactccttacgtgtaggcaagatgaattctgaccaccccaaggtggccatccttgtccctgtgattccagatctcccagaactagaggtctagcttcagggaaaacccagattttcttggcttagcccacctgacagctaatcactggaaatggggtgggctggtagagtcctttggtcaggttttgtgtcaagagagggaggaggaaagatgggagggaggtagcaaaactggtctcaatggaactatgtaagttaatatagaatggcaaagggatgtttcttccaaggaaagaattctaaggaaggaaggaaagtggaggggaaggcagcagttctcaaagttttggggtcaggactcctttacactcttgaaaatatattcagcacttaagggctttggtttatgtaagttacgtctattggtatttatcactacaagttaaatcagaaatatttaaaacattaactctttaaaaactcatcacatattattataaatgtgcttttacgaaacaaaattttctaagccaaaaaatagaatagtagcacagtcttaaattttttgcaaatttcattgatgtttgctctgtcatttgcttttgcatttaatttgttgtatgctatttgcttgaaataatgtaaacaaaatccaaccttatacagatacctggttggaaaaattgtgaatattttaatggccattttagataatcctggatattcttcttttttttttttttgagatgggggttcactgtgttgcccaggctggagtgcagtggtgtgatcacagctcactgcaccctcagtctcctgggactcaggtgtaggccatcttactggctaattttttgtatttttttgtagagacagggttttgccatgttgcctaggcttcttttttgatgctctatcaaaacttggtctttcttgaactttggatcttttacccttgtatgatattataacatcatgcattggtcatttaraaaatagtggttcaccgagatcttctaaatgttgatacatttgattttacagtatcaaaatacattcatcaatattgccatcaatgttatcaggatattcttggaaaacggtggtggatacaagttttcaaaaattctaattttttgttcaaaaacttgcattttattattagcagttttattattgaaatttattatggcctgtctgttgttttccttgaaatgacagaatctcattttttgaggaaaatgactgccaaaaacccaagttgaaataacatcgtcagttatcctttcaagtaaaaatggtattccatttaagtggttaattcacttcatgacttagtcacacaagggttttttctcaggcagtctgtaggaatgctcatgtatacttcccgtttcatcacttgaaatattaaaaagacatattcaaggattcagatgtagtaaaattttcactgcttcatcatagacattctttttatttttgrgacagggccttgttctgtcacccaggctggagtgcagtagcgtgatcacagctcagtggagactcgaccttctgggctcaatcaatccttctgcctcagcctccctagtagctgggactacaggcgtgcaaccaccatgcttagctaatttttttatttttttttgtagagatggggtttcaccctgttggccaggctggtcttgaactcctgggctcaagtgatcctcctgcctcggcctcccaaagtgctgggattacaggcatgagccaccattcccagccttatcgtagacattcttaaatgaaactgaccttttgttgcccttcctttttaagcctttcctgtgcatagtgaagaataccatgactactagtagtttggtgttaccgcctttatttgtgctaaagtgccagcgtttttacccaccattgtatctgcacccttacagcatatgtcaacatgttagtattcttgtaaaaatagtttggacctgggggtctgaggtccccactttgggaaccattgaaataggtacttagatctacagtgtatcatatcttttcatctacaagattaaaaacatgatttcagttaattgtttttgtaattttcttaatatggttttgaggggtttcagtccagagtgaagacatgtatgtttcttggcttatgctgaagtttactagacaaatactaacctaataatgagatcctaagtgtagttgcagtttctttagcctaaggraaaagaaacctaaaaactaaaacagtaaaaatggtccagatggtgtattcccaatgtgtgctgaagaatttgaagaagaaaatgcagtactcaataagtggtgttaagaacaggattaattctggagagtttctcatttagcctgtaaagagatttggggcacagtaagagttagaggaatgaaaatagtaaataacccattattgaccaggtatactattaatgatgtcctccatcaatacaacttattcttaaaagaacatttggtaaaatgctttaaaaatattcagtttctgtggcttcagctataaatcagattatagttctcaaagcagtgtttcctaaaatcgtttctgtgaaattgttttccatgacttgaacctagttgttctgaagctaatatacgataataatggcttttccccaatttataatagaaaatcatacaaagtaacagagtaaatgtctgttagtgggtgaaagcacataatgcttagttcattagctttttaaagaaatcacatgtaattgtgttttaaaaaagatatgggcctggcttagtggctcacgcctgtaatcccagcactttgggaggctgaggtgggctgatcacgagatcaggagttyaagaccagcctggccarcatggtgaaaccccgtctctaataaaaatacaaaaaattagcttggcgtggtggcatgtgcttgttatcccagctactcgggaggctgaggcaggagaatcgcttgaacctaggaggcggaggttgcagtgagccgagattgtgccatgcactccgcctgggccacagagcaagactctgtctcgaggaaaaaaagaaaaaaaaattatatatatatatatatgtatgtatgtatgtatgtgtgtatatatatgtagtaatggcatttcttggtagtacttggtttgtgtgatagattaaaacattagaattttatggtatttgaattacttttctattgctctgtaacaaatttatcagcttaaagcaacaaacattatctcaccatttctgtgggtcaggattttgtgcaatttaccttgggttcactggcttggcctctcaccaggcagcgaagttgttggtggcagctgtgatcatcctaaggcaggatagggagagaatcagtctccaagctcacttatgtagatgttggcaggattcatctcacaggctgtgggactgggcctccgtttctggatggctgttggtctgaggccttttataatacctcgccatgtaggtctctccatagggcacctcatcacatggcaactggtttccatcagagggagcaatggaaagagcaggagaaggatgggcaaggcagacatcatagtctctttgtagcctaatctcagaagtgatgttattacttttgctgtattctctttgttagaagtgagtcactaggtccaggggcgggaattttacaagggtgtgaatgccaggaggtgatggtgatcggggccattttagaggctgcctaccagtgttgaagaaaatcattgacttctatgagctgtagcaacagacagtgctatgcaaggagaatggttgtctcaaaagtccagctcctcacaaggtttttaatatgttgccttttccccccatacattttgtttaaatccatggtcatcttgccgtttagtggtgtggtttaattgcatatttgggttagtctgtatgtaaatgtttaacatgtgtctctgtgttaaacaggaatcctatccatcttcttcaccgatatggtttgtggattctgaagacccaaatctgacatcagttctggaacgtctagaagatactaagaacaacaatttggtaagaaaataagccaagctattttctcttttcctcatgaacattacatatagaaattaaatgttaagagataatatgatataaaagcatgattaatgattataatcttgtaggaattaaagactagtttgtttkttttttttccttcaaattctatttactacctggtctctcttttatttcccacatgtataaccttaatttagattacaaattagggatctctttttccctgaattctaaccattaagccaaacaagcattttgggtagagaccactagccaaggtgggaagcagaaaaaagaccaaggtaggagtgaagggagagatggggagaatgacaccagaactagtatgagggaattgccttttctttcaagggtctgtaagtctgcagtaaaagaatagaaagttttatttttgtttttagtatataaagaaatataactttccatgttgaaaaagtttttaatgctttttttcttgattataaaactcatgagcaagcattattgagaaaattagtaaaatatagacaggaaaaaaaattaaaatctcccataatttctctacctaatataaccactgttgacatgatggttattttctaccagtatatatttttcctttgctagtaaaatacatatacctttatacatgtgtttaaatagttgaggtcatggtctatatagttttacatcattttaaaaaacatttactggccaggtgtggtggctcacgcctgtaatctcagcactttaggaagcygaggcgggcggatcamttgaggccaggagttcgagatcagcctggccaacatggtgaaaccctgtctctgctaaacatataaaaattaactgggcatggtggcgcatgcttgtaatcccagctacttgggaggctgaggcaggagaattgcttgaatctgggagacagaggttgtggtgagccgagatcacgctattatactccagcctgggtaacagagtgatactccatctcaaaaaaaaaaaaaaattactgtattttcccatgatgtcatacagtctttatagaaaaataatcatcattattttcagctgacatgattgtttacctgaaaatattcagaggaaccaactgaaaaaaagagtttttaagattactggttgaaagctctgttacataaaagtcaatagctttccacaattttagctataatcacattgaaggtatagtgataaagtatttttttaagtatttcaacaaaaattawatacctaagaatcaacttagatgtgcacgacttttatcaagaacatgacaattttgctgagtggaaggaaagatttgcattctgtgttcctggatgagcagatttcatgttataaatatgtcacttatcgccatgtcttcatattcgtaaatgtaatttctgctgggtgtgtagtggctcatgcctgtaattccagaactttgggatgttgaagcaggcaggttgcttgagctcatgagtttaagaccagcctaggcaacatggtgaaacctgtctctacaaaaaatacaaaaattagcagggtgtagtggcacacacttgtagtcccaactactgaggaggctgaggtgggaggattgcttgagcttgggaggtggagattgcagtaagcctagattgtgcctctgaactctagcctaggtgacggagtgagaccccgtctcaaaaaaaaatgtatatatatatgtgtgtgtttatacatgtatgtgtatatgtgtatatacgtgtgtgtgtgtgtgtgtgtgtgtrtrtatatatatatatatatataatgaatttcagtacaaatcccagcagatttatttttggaagttgacaaaatgactctaacatttgtttaaaagggtaaatgataaaaaaataaagaatagacttgttcaaccagatgttcaataaaatgttgtatactaactctgttccagacagataaaggcaatggaaatttagaaccagagtcatgcaaatgagaatttagtataaggtaaaggtggtattctaacttaataaggaaaggctagattattctgtaaacagtcttaggaaaactatttgaggaagtttgagtctcaactctgatttttgtcaaaataagttatagttgtatagttggtttaaacacatctattcttaagaacagaaggctgggcatgatggctcacgcctgtaatcccagaactttaggaggcccaggcaggcggatcagttgaggtggggagttcaagaccagcctggccaacatggcgaaaccccatctctactaaaaatacaaaatttagccgggtgtggtggcatgtacctgtgatcccagctacttggaggctgaggcaggagaagtgcttcaacctgggaggcaggttgcagtgagccgagattgtgccaccgtactctagcctgggcgacagagcaagactctgtctccaaaaaaaaaaaaaagatattttaagagttaaggctgaggcttggcacagtggttcatgcctgtaatcccagcactttgggaggctgaggtgggaggattgcttgagcccaggagtttgagattagctttggcaacatagcaagaccctctttctctctctctctgtacacacacatgcacacgtacgtacgtatgttaaggtttgtatggagagccatgaaggtaagaggtaaaaattaaaagctagatggacacatgtttacatccccagcaagggggttgatgggaaagagtggtagacatagttctgttactgctacctccttttaggaagttgcttctgaagatctaaagataacggttttgtaatagcaaaaatgagttatttttcagtatctaaaatattacataaacatgttcataaggttaaatgaaataggatataaaattgggcctagttttttaaaagtgaatatatttacatgaaggagaaaacaactcacctcccactcttgcagcctctgccagtttatcaaaacctagtttcttgagagaataagctacatgtcttcaccttttttcgctgaagttattataatctggattctgccttcatcattgcactaaaatttatctcctagttgccaaaactagcggctcctctcttagtccccaaattgacccctctgcagtattttgatactgttgattgttcccttgttgaaacattcctgcattcttaatgtccaccaataaagagttggttaaataaaaatcatagtgtatagttttataatagaatattctgttgtaggcaaaaaaaaaaaaaaatgcagccattttttccataagagcatgtgcagatttctaagatatattaaatgaaaaagcaaggcataaaatattgtgtataattggcccctttagtatataatgtaaaaaaaatctatatgcttgtttatacttttttctttcctggtgggtacaggaaactgtcaatagtagaacacaattaagaaaaattggcttctgtgtcaggctctgtgataattgagtataaaagacaaggcatgtccctgtcctctgggaactgataatctaatggaacttccatctgattactgtcttgttttgatcttatcaccctgccttggtctcctctgatctcttctcccttggcctacttcttctcttctcattctgtgctttctctgagtaatattttactcccattactttagtcatgatctctgttctagggattcctaaatctgtattcatctccagagtttcaaacccatatatctgtctgtaaatcatatatgttagggaatctcacttacagtgccatggatattcaaaatgatgacgtttaaatttgcgtttacccacctcctagcactctatcagccccgtgttttttctcagtaattcttgtgattgtgagtgggacaaaatgaaataatcaaactagtcacccatacccaaacctgggaactgtcttagcgttcttttatatactactgttctctgacccccgccccccgcaaactagtaattttctaagacctgtccttytgaatgtctcttactattttccctgtgatctcagtttcttcctcccatccctcaaatgcttttttggtgtgtgggggaagggaggaaaattgaaattcgtggagartgtactaccctgtctttcttgttgcttggtatgactccactaccctgctgcctctctccccagcactcctggagccccttccgtgccagaggccagagtgkctaggtctgtgtccrgattgctctgcctcatcttcattatgcacttagcacgcaatagagtgtattgggtggatatcaaatccacactggagcttggtttccktttaagcatgaagatttttgttggatcgtaatttaccgttcaaccttcctcattttcatttgctccgttgtccactttgggaaagcttattctttgcttcgttaacccattctaatcctatgtcttctttctttgtcctttgtaaacctgcttctttctcttcatctcttttcttggtcagagccacctaggaaactgttcctgaccgagttaagtgagttgccttattagatcccatttgagtcacgttatacattgaaaaacattttaaacaatgaacaccatacttgtgcacatgatttaccttgcttacttgttgaaagcaaatatgcttagaaaacaatctggacttaaacatggaaatttacagttattctttgcagttttcctagtgaattattgttattttttatacagacacttaagagcctactaaatatcaagtgttacaggtttcatttaatctttaccattctgggaaagttttcatttctttgttttacagatgggtagactcatactcagggaattagataggatatccaaggtcatctagattgccaggctctgtctactagatatttgcttctgtatttttaaatgaatatgactggaatatataattttgtaatccatctgtaacaacactgcctgtgtgtgtctgggttattttttctgttattttttgtttttatttttttggtagcctcattaatgcattaatgttctcttgtctgaagttgtaagtttctcagaaaacgggttagcagtgagaaattggacaatgtctggaacttccttcctctgcccttattgttgtcattctgctaggtatcagttgtagtgattataccccaagccatagtaactttcttacactagagggtcctgaaaatattttaaagactattttttaaatctgtaagctgcagttgagcagtaacaaactttttcatttcctactggattgattacagtagtcataacattattgatgtcttctaagggctctttaacataatgcttatttactgaaatgtgttttgtagcttcgtcagcaattgaagtggttgatatgtgaactctgcagtttatataaccttcctaagcacctggatgttgagatgctagatcaaccactacccacgggtcaggtaaagtaaaaattctctagtgttcaagagctaaataaattgtctcaagcaaaagtcaaactaggatgatttttctttttattgttcaacttatttagaagttagtttcatttttgttcctattgaattgttttgtttgttctgttttaggtactaaaaataaacttttcattctttggagctgctggtatttactatacaggcaaacaattgcccttctctctaccaccacctttttgttaatattgctggtttccgtaaatgctcttgcttctttcatagtttgtctttggttattcaattaccttcacctagcaatgtcatctccttaagtctgtctgtgctttttaaagactaaaccaaatgttatctcctgcaagcaacagaaatttccactagctcaccaccatcactaatttcattctggatttacctatttaggcatctaaatatttattacctatttattttttttttactataatacatgataatttagctcttataccacccacttaccactcacctccccttcctcaaatattatctttagtcatataagtaatcactaattatcattaggactttgtagagtaaagccaagttttctagaatatttaagataggatatttcctttcttggtgcagctttttgttttgcagtgtcttcctcataatagtaatttttaatttaaaaaattctgttgtagccctttctgtgaggtttccctttcttctgaagcctttggttcctctgtgcccatcttggcaggttgttctttgggttggctgtgcagatgccatcttgaggtttttctcatctgctctcctacagtagatccattgtttcttggatcccatgccrtctttcttggctgaccctttctcattttgcctgactatattctcaggtaaaaccctaagaaagcatggaggagtacattttctgagctctagcttctgaaaaatactgtccagtgtttggtttttggagccagaccgtgataggtttgaatctttgttctgctacttactggctgtatgcccttgggctgattccctaattgctctatgcatcaattttccattggcaaaatgggggaaccagtaataatattagtacctatgttttgggggaactatgaggattaaatgagttcgtacaagtaaaccatttagaacagtgcctggtgcatagcacatccccatcaacgttgacttctgttatattctaccctccctcacacttgattggtagtttggttgattatatatttctaggttgaagataattttaccttagaatttcaaagtctatgctgttgtcttctaaccagtcgtggtggtgaagcctcatgscattctgagtttcagtcatttatgtatggctttctctctggaagcttttaggagtttgtcttttccttggtgtgctgaaacagcacaacagtatacttagtgtgggtcttttttcactcattgtgctcagtacaccaaatggataggcctatggataggctctttcaaatttggaatcttgaatcttctcataattttgttaactttctcctttccattttatttgttcattttgaagtgtccgttaatgggattttagacctcttgtcttgagtcttgtatctcatattatttctaaattatttttctttaattttaaaatctgaaatatttttctttcaacttttggaaatgttatttggacagtcatagctttaagttttatttattgttgcttaaccaattatcccaaaacttaatggcataaaacaacaaatttgcctatctatcactattgtatggcttaactggggctagttggacaggttttctgctggtctcatttggcagctctcactatgtggtttagacggtggcagggactggtcatctggatgctcagctgcagtggaatgtctgagacgacttcttcacccacaggtctgctgccttggtgtttcttcatctggcctttctctctgcatagcgtctcatcctctcgggcctcttcatgtggcttctctttctccaagaggatagtcagttcctatttttggcttccagaagcacagaagtggagctgccaggtgttcttaaggcttagatctggaacaggtccaatataatttctaccaaattctgtaggttaaagtgagtctcagggccaacccagactcactgtgggatgggcccatccaaggacgtgatgacaggaggtgtggttcattgaggaccaactcccaagatgagccctgagttctaagaaccttttcttcgctggttattttttattcatattctatttttgttccatggttgtattcataagtgtctttaaggagctattttgatactctttggccctctccctagcatctcttttttctttaataaatttttttcttagtttattttggtctttttttttttttaaacctttcctcaggtatctattctatgttgctcatcatttgtagtcttttaattcccttttttgttcatatttgagagaggtactaaaagactgattgggaggctgggtgtggtggctcacacgtataatctgagtgctttgggaggctgaggtgggaggatcacttgagcccaagagttaagaccagcctgggcaacatattgagacsccatctttacaaaaaataaaaaattaggtgggtatggtggcacctgcctgtagtcccagctactcaagaggctaaggcaggaggatcagttgagcctatgaggttaaggctgcagtgggctgtgatcatgccagtgtactccagcctgggtgacagaatggaaccctatctcaaaaaaaaaaaaaaaaaaaaaaaaggactgaaagactgattgggagttctttgtggccaagactggtagcttttagtgggaatttaggctgattcccaattgttattccctacccctctatcttatctcctggtgcaatcataaatgatggctggaactactccattcctctggagatgaaatctgtgttcttttgcctgaggtagatgtatgtttgcttaggttctgcttaaggagatgtgggagaacagtgtgtttcagggcctggaaaatgtgttctgtatataggcttttgttaatctgtttacagtcttgcctatctgtcccactttctggggtacctagtgtctgagtctagagcctcttcagggcgctgtgagataaatttgccttcttgctgtcaatatccccstaacctccacctttgttggctttgctccattaattaactattttccatttactgtcattgtctagtggaggtgagttctggtctgccggtaaccccattccttttttgtaattgtgtgtttattcttcaccgtaattctagtggagcctcaggacaaagagcagatgggagaaatatgtgttcagtattcacttttccttctgttttttttgtttgtttgtttttcttttttttttttgacggagtctctctgtcgcccagggtggagtgcagtggcgcgatctcaactcactgcaacctctgcctcccgggttcaagtgattctcctgcctctcagccttccaagtagctgggattacaggcacatgtcactacggccagctgatattttataaacatctrtgatcacctggccagtctttttttttttttctgagttggagtctcgcctgtcgcccaggatggagtgcaatggtgcgatcttggctcactgcagcctccgcttcgtgggttcaagcgattctcctgcctcagtctccccagtagctgggattacaggtgtgcaccaccacgctcggctaattttttgtattttttagtagaggggtttcaccatgttggccaggctggtctcgaactcctgaccttgtgatctgcccacctcggcctcccagagtgctgggattacaggggtgagccactgcacctggcccctcacttttccttctgtaagacatctgcagcttgtstttttcactgaatatcacatggacttaatgcatagagagctgcctggtttttcatgattgtgcccacgattctgtatagggatataatttatgaattcctaattttgaatcatccttgcatttctatagtaaacaccgttagaatggatatggtaatactttatttttggatttttacttctatattaagtaaggttatactttgtttccttttaggctcttatttcagtatcaagggtatgcaggggtgacttggaaagctttacatcttttttcctaagatctagggtgtagatctrgtttacacagtaattttcaactggaggagatttttgcctcccgtgggacatttggaaatatctggagccatttctggttttcacaactggtcatggtaggggtgctgttggcatttcttaggtagaggggatgtcactaaacatcctacaacacacaggagaaccctccacaaagaattgtctggcccaataygtcaatattgctgaggttgagaaaccatggtttaaataaaactccaatctggaggatgagtctttgactgtctttttcctttttctatgtatcggtctccagattttccacttcttcagttttagtaactgtagattctaaaaaaaaaaaaaaaaaaggatcgcttcatgtatacttctaagctgttgcatcatattcacatgtggctatatgccgttttcacttcaaaagttttctttatcttgattacttatcagaggcttggctgttttattagtcttgtgaaagaatcctcttttagttttattttttaaatctagtgttttctttttcattttttgcttatgtcttaattatttcccctttttattttgctttttctagtttagtggattaatgtaatttaaattgctttttaaacaaacatgtaagggtatacattttctttgggtgctgtttgagtttattgcacaagttttaaaatctgttttctaagtaagtttattccatcatttgttcacattgccatactattaaaactttttattgtgagagatgacatgtattaaaaatatgtaaaacataagcttagtgtaactcataattagagtgaatacttgggagccaacacctagccagcacccaggtgaagagaaggaacattgctcgcactacagaaaccttctgcaggcttcttcctgatcactgttcctctgtgcactcatctttccttacatttctctagtgttaccacttatgtatgcatccttgaacaatacagtgtagtgttgcctattgctgaacttttgaaaatcatactgtatgtattttttcgtacctttgttgtgcttaacattgtgtgtgaaatttgttcctattgtgtgtagctatagttcttttgcattgctgtatttattccattgtttgaatacaccctaccatttatccccttgactggatacagacatgtgggttgtttccagtgttaggaacagcgaatgctgctgtgatcattcttgcttgtatttcatggtacccctgtgccagcatttytytggggcacatacttaggggcatgaggatcaatttyttyttttactcaagagttatytaggaaaaaaaaaactttttaaaaagcattttcagatggcttttcagttatttttagtgcatcaatatggtcagagaatatggcctgtgacctttcagctgcattatcagtaatcgtttagacttcactattggtgttactgctgtctttgcttcttattgctgctccttgtattatgtgtcctgctccctgcccctcaagtatatccctgaataatatctggttgttttttttttttttaacctaraaagggtttaaagggatgtgcatggagagtgtcccttgaatacttgctgtctgttatttgttcaacaaatatctgactctgtataaagtattccacattggtgtggagaatctggaggtgaacgtacacagataatgcttcctgtcttgatggagctagatatagaattctaagttcataattgagtctattcccagttctttacgcttttatcttctgatatttgttacaaatgaaaagtctgatgcctatctcattcttaattctttctgtgtattttattttttctttctggtagttggtatgattttctctgtaactgtaaagtgtgggggttttacttttcagttttactttttttttttgaaacagggtcttgctctcttgcccaggctagagtgcagtggtgtgatcacagctcactgcagcctctaccttcctgggcataagcagtcctcccacctcagcctcttgagtagctgggactacaggtgtgcactgccaccgtgcatggctactttttaaaatttttttgtagagatgtgttttcaccatgttgcccaagctggtctcaaacttctgggctcaagtgatcctcctgccttggcctcccaaagtgttacaggcatgagccaccgtgtccggccttcagtattcctatggggctttcagagccacttaatattctaaagtctttctttagctcagcagcacttgtctcttttgtttctttttattccccttcatcctctggatgaatgttagatctctatatcttcaatgtcccttaactgttctcttacttacatctcttctrttttctcccccatctcctttttttctctgttctaaggaaatgtcactgtttgtttttcttaatcataaataccttgttgggtcaagtccatagtactctggcccttctacargtggttttttgggggtggaggggatcttatttttactttctagaattgtgcttgcatagtaatctgttttttattttgtggatgcagtatcttcccaattactgctaaagatcccaattaggttttaaaattctatttatttccttcattagtaatgcttcagatcaattgtgcttacttgacttggcactttcagattgctaattttcttcagctctctggtgatacctggttatctcctcatttatagatgagatatacccttgatcagtatccattgttgacctgagtgtcttcagaattgtcactcttttctactgtggcctccccctcctggtttgcagacctgtgctcttcctatggcatgaggatggggaggtgctggctggtgagctttccagctcctgagctwaaaggaagaggtggagtctaagattttgctgctgcattgagttatactaaaaacactctctgtcttttctgtctggttttgacactcatagaggccatcaagatagggttcctatataggagagtgatccttaccaactgtagatgggacaagtacagtaaagaatgtctgattcttctgaaaaaaagtggtccctgcattatttggattgagtctgtgactttctcaagcccagcagtctgattccatctcctttgtatcttccagcatgtccttatagttttagttcactaagggtattctccttgtatttgtttttctgctactgcggcagacctactctttttttataaaattctgtcatttcagtggggttttgaaaagaggaccaggccacatcttgaaatgaaatcatcttagggtttcccacgattaactcactttttgttttgattaaattacttcccctttttgaggtgatgggggctcagttttctcattttaaaatgagggatagtaactgggctgatggtgacagacccagatgcatgtgagaatcacctcagagagcttttgaaaaacagattctctgggtaggctttgaaattggcatttsgaaaatgctctttcaatcgttgatgcaaccaaactctttgggagttttaggctaggtatatagtctttagatacccagaatagtttgatttggaatataacaatttagggaaatgaaaaaagggagaattacattttggaagctgcttgcttccattttccattagtttttagaagacaatgtgtctaaagagatgcagatttaaaggaaatacaagttaattctgcatgggtatgtttacatggaattctccagctgactaatccagaagagttctaataccctctgtgatcatgggtttgtttttcttgagaattattccatcagagtgtctaataacagatgcttagatactgccgagacctttgttggtcttacttgatctctggatcctggtttcgtgatcttttacatattctgtgttctaacctgaactggccttcatggttaaagatgcatgtataaacagtgtcctggcgagggcttaccttttgaactttgtcaaaaatggatatgaaagtccttcctaaaaccccatcaaattcatttctgaacttgataaattgtaaattgtgtaaattggttaagttgtgtcttgtagggaagtattttgttgtaaaatgtttttaaaaagaaaatttgctttttagtgaggtggtaatcatttcataattcttagttttgtgaaatgtctattatcaataacacatctgactgttcaaaatgtaaggcaattgaatttatgtaaatgattcaggctttccaaagttaaaaagggagctattttaaggaatcggtagtttgggagattttattttaaataagccrttgatcttatgcatatagccatataagtaaaatgttttcttattttaaattagattatgttttaacatttttttctgttttgctttatatttgattgcttttctttgttcctaaggcagccattaagttgaattgttcaaaattgtttcatttttaaaagctgataacttatttgttagtcaaagctggatttaaagataaacattttaattttaataaactgtctggtagtgggactccagtgacagatgtttgagagtttgtggcaccagtcttctaatgtactcagcctgtgcatatttgttctgtatagccctggcagattctttctctgtttcagaatgggacaacagaagaagtgacttcagaagaagaggaagaagaagaagagatggctgaagtaggtattttatataaaagaagagttcataaatttcttcatttttgaacatttgagtaattctcaaatcttttttatagactactattaatgtggaataattgaaagcacattgtgtttggaatggaatataatttcccaactctggctttacctctaactaatgatatgcctttgagcaaatttatctgaattctttggatttgatttcctggaaaacaaaagcttttaacatttagcaccaaaattatatttatgtttaatactaatcagtacttaatctgtatttggttatttttaggaagaggaactactaagtttaaaaaattttatgtttgcataaaaggagaatttgagaacattttagggactactcgccagaagtagtgaaactgtctcttgttgaaaaatcatcaaagaattttgtcttaatctggtttacactattttaacagaatactggagactgggtaatttataaagaacagacatttattttctcactgttctgaaggctgggaagtccaagatcaagataccaacattkggtgtctgaggaccttcttgttgcatcctcacatggtagaaggcagaagggcaggagagcaagctagtccattgtgtgaagcctcatttgtaagggccttaatcccattaaggaggaaggagccctcttggcttaatcacctcttaaaggtcctacctcttaatagcatcacattggcaacacctgcattttggagggagcacatttaaatcatagcaaatttagtagagtgcattccaaagacattgagcttaggccagttgtcagtcatggatataattttagatgttttcaagctctgaagctctgcatttaaattcaaacttcagaacaaagatctttgtttctgcgttgaccaaatagaggatatgtgaattccatggtcttgatttaaaaaaaaatttttttttctgttttgggtcttataattatgcttttattttcttgatttggaaatttttaatctaaaatgtgcttttagaatgcttcagaactaaagaagcagtgttgtaggcttgttttgtttttttgagacagggtctcactgtggtgcaggctggagtgcagtagtgtgatcacggctcactgcaacctcaaactcctggactcaagcaatcctcacacctcagccttctgagtagctgggactacaggcgtgtgccccatgccaagctttttaaaaaaatttttgtagagattgggtcttgctgttttgtccaggttcatctcgtgaactcctgacctcaagtgatccaccactggcctcccaaagtgctgggattatagacatatagacatgcgccactgtgcctggctgtaggcttgttttatgagtctgggagtaaaatactcttaaaactgtcaagttagaatgagagtttaatgtttttatgcagtttagcttaggtggaataaactgcatgaaaacattaaaccttttttgtgcgcccagtttaccatgaagcagccattgtactaaagttcatgaactttttctttttcccctcataagataataaacaaggggccgcaacatggagggaaacctagaaaggtagactggactttggagatgtcagattaggacaagtggaaagaagatattctaggctcctaaaataatatgggaacaggctcagaacaaccttggacatagtgtgtttgagttcattggatacttttcttttgaggagggttgatgggtggaagtcatgaaaaaacaagattggctagaaaaggcagatggttaaaagtcttgaattcgagacaggtgtgtttctatttggtgtgattatttgaaggggtgggttgcccctccacacctgtgggtgtttctcgttaggtggaacgagagacttggaaaagaaaaagacacagagacaaagtatagagaaagaaataaggggacccaggaaaccagcgttcagcatatggaggatcccgccagcctctgagttcccttagtatttattgatcatttgtaggtgtttctccgagagggggatgtgtcagggtcacaagacaatagtggggagagggtcagcagacaaacacgtgaacaaaggtctttgcatcatagacaaggtaaagaatcaagtgctgtgcttttagatatgcatgcacataaacatctcaatgctttacaaagcagtattgctgcccgcatgtcccacctccagccctaaggcggtttttccctatctcagtagatggaacgtacaatcgggttttataccgagacattccattgcccagggacgggcaggaggcagatgccttcctcttgtctcaactgcaagaggcatgccttcctcttatactaatcttcctcagcacagaccctttacgggtgtcaggctgggggacggtcaggtctttcccttcccacgaggccatatttcagactatcacatggggagataccttagacaatacctggctttcctaggcagaggtccctgcggccttccgcagtgtttgtgtccctgggtacttgagattaggaagtggtgatgactcttaaggagcatgctgccttcaagcatttgtttaacaaagcacatcttgcacagcccttaatccatttaaccctgagtttgacacagcacatgtttcagagagcatggggttgggggtaaggtcaaagattaacagaatctcaaggcagaagaatttttcttagtacagaacaaaatggagtctcctatgtctacttctttctacacagacacagtaacaggctgatctgtcttgcttttccccayaattattgataggaaggccttaagcagggaatagtgtgctgaggatattgtttgagaaagataatgttgaattctgtttgggatgtgctgattaatactcagaaaaagaaatttcgtggatgggaacatgactgaggttgaaggtataggaggaaatacaggctaaaggcatttgtgagaattgtraggaaaacatgtaggatggaagatcagggctgaaaggtgcacacagggagaagggagctcaatgaagtatggagtcatgggcagagtttgagtgagaacagaacgttatagggcttgaagagatggcattccaaaaaggaggccggggaggtgaaggctgcagtgagccgagatcttgtcactgtactccagccggggcaacggagcgagactccatctcaaaaaataaaaaaataaacccaaaaaggaggcctattgaatggatagaaggtagtgattaacctggtctagaaatcagtgaattagcctgcttggggaaaaaaaaaaagccgagatgcgtataaactactcctttagagattttggcaattgaagtagagaaataaggtaattgcaaaaagttaggatttaaattctgcatagatttatatatgtgtaagaacagatagtacgggaaagaagggagcagaatgatgtgaataaagatattggtctaggggtattcaaattctttgttttcttttcctttttttttttttttttttttgagatagagtcttgctctgtcacccaggctggagtacagtagcatgatcatagctmactgcagcctcaaactcctgggcccacatgatcttcctatctcagcctcctgaggacctgagataaaattctttttctaactttttttctagttataaacgtcaatagatgcttactacataaaacttggaaattaggggaaagcattaaatgcctccagagataactaagattaactgaaattaacatttcaatgtaagttcttctggtctttctttttctgtgcttatttcagcgtaactgaaattctttctattcttttttgtaktgtttttcattttaaagtttttcgttacaggagaaattaggctatgttagtatttcagtggcctcttaatattttgctattttgcacatgcagattttgtgtttatttttgtggctgcaaggttgaaataggtatccttatgcctaaattagtgtttatagtttaaactagtttcttagaatacaattctagaagttgagtttctggaacaaactaggaacacttaaggttcttgacacctgctgctaaactgttttaaaggttcctcttaataggagatttagaagatggcttatttggtaatagttatgattttgtaaagcttttaaatctgctttacccagagtctagattttaaataaaatayaggatataaaaggtgggagcctcttgaatggaatgtgggggctttttctctctccctataggatagttacattttgtttcttgttcctcatttgagtcaagaataatttaatgttattttggcataagaaactgctgaagaaaaataggttgaataagctaacatttttcgtctctttgtaggatatagaagacttagatcactatgagatgaaggaagaagagcctattagtgggaaaaagtcagaggatgaaggaattgaaaaagaaaatttggcaatattagagaaaattaggaagactcaaaggcaagaccatttaaatgtaagtgtgtgtagatatctagaacctggacttttgtggttaaataattgtagttaataccaggcaattcattaacatgcccatctcagctgccctcttcctccatttctgccttagtggtggattcagtcatgtgtgttttaaaacagggtcttgctctgtcgcctaggctagagtgcagtggcacaatcatagttcagtgtagtagccttgatctctcaggctccagtaatcctgctgcctcagcctcccaagtagcttggactataggcacatgccaccatgccaggctagttttttttatttttagtagagatgaggactctctgttgcccaggctggtcttgaacacctgagttcaagtcatcctcccatcttggcctccgaaactactgggattacaggcatgagccaccgtgcctagccttagtcatatgttttgttgctgtagattacgtttcttatctatagatagccactttttaccctgttcatctgctcttcatatcctggaaccacctgctgatccctgtatttgccccttcccggcctgtttatgctgttttctctgcttaccttcctctcatgggatctgtatattcaaattcatcctctccgacaaaatacaattcaagttctttctccttcgtgaagctgactttggtctgtcctgctctgacccaaccaaaagtaatttttctcttttgacttaacatccttttttttttttttttggatgaagttacgctctgtctcccgggctggagtgtggtggcatgatctcagctcactgcagcttccacctcccaggttcaagcaattctcctgcctcaccctcctgtgcagctgggattataggtgtacaccaccacacctggctaatttttgtatttttagtagagacagggtttcaccatgttggccaggctggtcttgaactcccgacttcaagtgatccacctgccttggcctcccgaagtgctgggattacaggtgtgagccactgtgtccggccacaacttaatatctcttttacgtgaagcagcaggatgtgaaaagaacactgagtctggtgacaaacacacaatttatggtttcactttcctcagctctaaaatatggctagacagtacataccttttggatgattgctatcaaaaataaatgaaaatgatgtgtgtatatatataaaatgctcagagtagggaaacatcaaatgattgtctgaacacttactactttttgccttgtgttagagctattgaccaactccgtgaaatctgagtagcagttactttgtcttgggcacaggttccccaaaacagggaatgaattgttaggtaagtagatgccaaatgttgaaaacaggtagattactctccctccttcagtctaatttatatattaatctaatttataatttttagtagagcaaagaaatttagtcaagcccccatatcttgattacttaaaaaacaaagtttgtcatttgaattaatgatgactgtactttatgtcttgtgatcgattccagtttgagttatagtcaaaacaactataagttactgaacacttytgcatgatggatactatgccaagtactttatacttcacatatcttcacatttagtcttcatagccaccgtgtgaaataggtatgcttcatattttagagataggaaaaacttctcatattttgtagatatgaaatgagctaggaaacttgattttttccccccttcaaagtatagtgcaatgtttaaaatctttaatttcacgtgaccaaaaaatagttccgtttgtatttagtcttatgataagatattgatgtgttttcatctttagagatgtccctgcactgaaaaactgaaaccagtcgcatgtaggcagatgtttctcagtgtcttaatgtgcgaactagaccatctgtgtaatattcttgtttgtagtcttatgaatggaactctattttagtaaataatgtgtcaccttgagtgtcttctagtattttcaaaaattgctggggtttggaatagactcatactgaattctttgttattgtggaatccatggtggtctggacatgttggctagactttttcacatgagaagaaataggaaatgaactagacttgtgcctagttttaatatcctcttgaaacttcataatgcttcatttaattgggcttttttttacttcttaaaatgttgaggttgggcacagtggctcatgcctgtaatcccagcactttgggaggccgaggcaggcagaccacgaggtcaagagattgagaccatcctggccaacatggtgaaatcccgtctctaccaaaaaaaaaaatacaaaatttagctgggcgtggtggtgcgcacctgtagtctcagctacttgggaggctgaggcaggagaatctcttgagcagggaggcggaggttgcagtgaactgagattgcgccactgcactccagcctgggtaacagggctagactccatctccaaaaaaaaaaaaaaaaaaaatgttgagtggtgatccatttttgctgtaatcttttagatcaggttgaaatatcttaaatcttagctcagcagaccctggtaaacagtggcttttgtgtttcagggtgcagtgtctgggtcagtgcaagcttcagatagacttatgaaagagctcagggacatatacagatcacagagttataaaacaggtaaggatctctggatccctgctctctttatgattcttctgctcttttctattgtcagattataaatgtcatttcttaaaactggacagaaatggaaatgtttactagctttatttcaggaatgtgaaactcaaatgcaatcaagttccaaaagatgtaggagtaaaataggatgagtttacttgtcttttggatttttaaaaaatgtttttataggtccattggaattttgtcctcttcttgataaacagtgaactcttacatgatttttatcttctggggaaagcatgagcgatattgcttggaaagtaaataagagtaaaacatttcattttacagagaataattgccaagttgatttttatgattcccccccatttttgaaagcaagataatcagcttttattgtaaagatagttatgttattacctttaaaatatataagtttttaaagttttcatttccttgtttgacgagtattcttactcaatatgacttgaatgttatggaacctctctaactagaggtaaaattctcatattgttatggagattctaatagtattaaataatgagccaaactttaatttgaaaagatagcattggttgggtgcggtggctcacacttataatccctgcactttgggaggccaaggtggtcagctcacctgaggtcaagagttcaagaccagcctggccaacatggcgagcgaagccccatctctactaaaaataaaaaattagccgggtgtggtggcgcacgcctggtgatccgagctactcagtggtctgaggcaggagaatcacctgaacccaggaggcagaggctgtagtgagccaagattgcaccaccgcactccagcctgggcagcaagagtgagactctgtcaaaaaaaaaaaaaaaaaaaaaaaaaaagggttatgaccgattcaattctagcattatgaccgattcaggaattcttagcgtgagcaaatcaaaattaattagaatttgcttaaagaataaaaacaaggaaaaaatccttgctttgtagtgtgcaggataagccaaacttgtttctgagttgttagaattgtgggtgtccttacggttttttgtgtaagaagtctaaaagtttatctgtagaaacctaataaagtacaaacatttgaatactggttttatttttaaatgttaaataatcatttgtttcagcattgtttatatagaaaaaaaaaaacagatactgggtggaatttgttaaagcatatccataaaataaactaccacagagtcattaaaaagattgtgaataggtttatgtatactaacttggaaagatgtccctgaaagttgaagagagattataaaacaacatacgtagaaggattccatctttgtagaaatgtgtgttcatggaagaaaagtcttaagtacatatgattttgcataatctttttttcagtcagactaaacggtaagcagtttttcaactcattraagaatcttctcagttgatggctgtaattatctgttaagggcataagatactcagctgcagtagtgtaatatttactatatagcttagttgttccatgttttaagagcaaaatttctagctttcgttggctatttagtgtatacatttataccatagtaatagttatatgatgaaatgaagagtagctaacatgctctatatcttaacagggatttattcagtggaactcataaatgacagtttatatgactggcatgttaaactgcagaagtaagtggctttttaatgctcacccactctttgcaatggtagactatcacagtggaggttattttccttctaacttgatacctttatactatggcttttacttagaactttagactttgtttctatagaaatagttcttagattgtttaaatgagctgttgctgaggtctaataagaaagtgagaaagaggaaggacagaaagagggaccagctgcgggataaagtgttttatggagttagagcaggggaacttaaaaacaaaagtgtatttaataacttcatgagactgtgataaccagtttatatttgaaatatatacagcactttgggagactgaggtgagaggatctcttgagcccaggagtttgagaccagcctgggcaacatagcaagacttcatctctaccaaaaaaaaaaaaattagccaggcatggtggagtacacctgtagtcccagctactgggggtggtgggaggctgaggcaggaagatcttgcactccagacatcaaggctgcagtgagtcacgatcgtatcactatattccagcctgggcaacagaatgaggcacccggtctcttaaaaaaaaaaaaaaaaaaaaaaaagttggggggaggtgggattcaaattagacctgtwtatataggacagttgtagacaaatacaggtttttttagtgatttaagttttcatagttctgaccatggcaaacttttctccttgaaccctttggctaataatgtaagtttaatatgctttcctaaactttttttgagttcttgaraaaattatatwcatgtgactattttcctttagagtgactgcaaactctgaactccyttactagattagatttagagtattatggtctcttttggacatttattcccaaggagctggaacctatggtgacctctatttttcctggtgatacagagcagctttagaccttctctttctggaacttgccctaggtgctctattttagctgtcatactagttcatttttgagtttagttaaaaaaaaaaatctctaactttttatttgaactgttttttgttttgtaattcttagggttgaccctgatagtcctttgcacagtgatcttcagatcttaaaagaaaaagaaggcatagaatatattttgcttaacttctcttttaaggtaagaaaatagttacaggaccccatatacttccagtggggtgcrtatatttgtacaagtgctttggaaaacaatttggtaaagtagaagatactcataccctatggttcaggaatctcgtagacatattctccgttaagacgtgagtacttaggcgtaccaggagacacaggaatgttcagagcagcatcgtttataatagcaccaaatagaaaacccaagtgttcattccaataaaatggagaattgtggtgtttataaagtggtttacagctatrtgggacaagatgggtggatcttgaacacagttgtaaaagagactggactccaaaacctattttgtacaattccctttatatacagttcaaaaataggtaaaactaatgttgattagggcatgcattcttagtggaggcaatatcacctgcagtgtagtgaaaactgatctttagagtgaaaacaatcttagctattaaaatggtctgctgccctccaaagggccacagaacataaacagatatacgatttatctatggtgttaaaattccatggagcaggggggtaaaactaggaagaaaacttctaaaaaggcttcttaggggggcaaaaatgaaaagaaawctgagamacacttatttatggattcatacgtgagcagtaaaactgcccaaagaggaaaactgtccaagaacaaagaggtgattacatacaggttagggtaaggagtccatctaggtgggaggtagggaggtgtgaactgaaaggtatatctgcgcaggcttcttggatactggctggaatatatttctgggccaggttgatggttacatgagcacataatttacaatagcttcttaaggtatatctctatattttatgtacttttctgaatttatgtgttatatttaataaggtttttttttgtttgtttgtttgttttttgagacagagtcttgctctgttgcccaggctggagttcagtggcacagttttggctcactgcaacctctgcctcctaggttcaagtgattctcctgcctcagcctcctgagtagctgggattacaggtgcatgtcaccatgcccggctaatttttttatttttagtagagacggggtttcaccatgtttgccaggttggtcttgaattcctaacctcaggtgatctgcctgcctcggcctcccaaagtgctgggattataggtgtgagccaccacacctggcctaataagtattttaaagatgctaaaaataatggttaaagaatagcaatggaatctagaaaaaatgttaatgatttttttttttttttgagacagaatcttgctctgttgcccaggctggagtgcagtggcccaggctggcgtgtggtggcrcaatcttggctcactgcaacctctgcctcccgggtttaagcagttctctgccccagccccccgagtagctgggattataggcatgtgccactatgtccgcataatttttgtatttttagtagagatggggtttcaccatcttggccaggctggttttgaactcctgacctcatggtacacttcccttggccttccaaagtgctgggattacaggcrtgatttaatatggatctggatgagatgtaatggtttaaaatctgtggatatatgagatattttgatggaaaaagcaatacttcctttgtacttacaaaaaaggtagtaattttctaaaagcttcttacgtagcttttttatgtgtgtgtttttgcttggggatatatcttatgattgaactttcttgaagtgacccaaatgtcagtattatctctcacttttgttattatagaaactgttgtggttgtcaactgggttgtcttcctaaaatatgagtctggtatatattgactgaagttgctaatggctacatttttactaattcatatgggggaacgaataaagcacccaggccaaaaacaaaaaacaaaacacacaaaaaaggaaggtatctttctttttaaaaaattraattatatgtccttatgcctaacaccaaacttaagaaatagaaccttttttttttttatccrtccctgtrgccccctgtgtgcccctcccttgtcacttcctctttgagaggtatctttacgggaatatgaaatattggccaggaaactggaggatttgtgactataggtagtgttttcattattttttcctgctctaggtagaacttcagggaggggacgatctgggaggtaaatggctgaatttctrttggatttgtgtttctggaccatggctcctgataccacaaagaagggccttttctggggttggagtatttcttgagaggcctaggaagaatgtgattgccttgagctaactgaccttatgaagaggaccttaaactgaattgccaagttattagtatcgggattcacagactttggaggatagcaggtatgactcagaaagatttgcaggaaagagccagaacagtatatatttatggcctctgatgtccacggtgacaacttgaataataagaaaaatggaacttgagataaagcataacacaaagatgggagttggggcaggagggaatgtgaccttgttggtaaatccaacttgctatatttttaargaagtcactttttggtgtttcgggcagcatctgaattactgaattgaattctgaggtagtactttaagaagggtctatttagataaacttaggttcatttagagaataatagccaggattgggaagagattgattgtattccgtgtcctaggatagctggtgaaattgtggatttggagaggagaacatgagggttgatgttatcttgtcttcagctatttgaaggactgtgtatatggaagcattagtttttatttgcttttggtgaatgcagggcatgaaactagtaagtcaaattacaaagaggtgattttcaactcaatgtgaggaagcgatttgtaactatttagagccatttggtgatgtagtctttaaaatgttcctcttccttaataacttagatggctaagatgttaagatctcagataactttctgagatcctttatagagtctgagagtctgtttctgagttaatatgtactaaggtaactgaaacttcattttaacagtcatcctcaacctttttttcctccctgaggaactttttatttctgtaaaatctggattcctgagttccagggtatagactttatggaatagagcccgcagattttgatgtagaagagttattctgaactgtttaaaatgaattaaatcatacataatgaagaggttttgtagtcactcattagggattcacatgtttaaagatctaaataataggaggttaaatgaaattgtactttaccaagcttacatcaacctctatacctttcattatgtctgttaaatatagatgaaaggtgagctactttatttgaaagtagatyataataactgttgttaagttggtatcttgtgtcattaagttggtatcttgtggataatcttacatttctattgcaagttagaaaatgcaaatcaaaattaattagaatttgcttaaaaaatgagatgattaaagctggctgtcattmcctgtcagggcaatttgcagtttgttcttcagggtcccaacctaaggagcsggagacttagcagggcctgtcctcggtggaygctgagctccagtatttatctccctgtgagctctgtgagtctgtgagttctagctcagcttgtgaacctcttctttttctcttctgtaattggaagaaaacctaagggggaaaaaaagatcctgctctctggtgttcccttttcttagccttgaaattattatgttttgttcacctttctagttctcagtcagaagatttatctaagttacctagtctatcattattggaatggttcctttatatagttctagtgaagtggaaccccttcatgtgtttcatcagtttaccataatgctgttctgtttgggcctgattttaacttcatttttatttgctttggttttcattttggttttgggtactaattttatgactcttacccattatctgataataaatgtacacattctttatagtatcttttaaaatcttctaaatagtataacactaaggatgttctttaaattaattaaacttgcttatttgctttttaggataactttccatttgatcctccatttgttcgagtggtgttacctgttctctcaggagggtaagtttaagtgactacttaaaaagaaatttttttcagttaaaaaaaatttttttttatagrgacgagatctcactatgttgccctggctggtcttgaattcctgggctcaagtgatcctcccaccttggcctcccaaagtgctgggattacaggcatgaggccactgtgcctggcctgcattttttttttttcttctaaatatagtgtgcaccagaaacatttggagagctagtcccagggtttctgattcagtaggtctgtggtggggcctgagtatttacatttttaagaagtttccaggtgaagttgatgctgttgttctggggcccacacctagaaccattagttgtaaagcattaygttgttgataggtaaagtttttaatgattcatacacacatgtatttatacatatacacacacacacgtatatatacgcacatactttttaccataaaaaagctaatgttttcaaatgtaaattgtgattgagggtttagagaatgttacgattagagaatggtccccacrtgcctgtgatcctaattggtacttttagggataatcatgggaaaatctcatggacctatggaactggctaattactcctagaggtaatacttgcagtttattagggtcaaatggtaattgtattgcttctttttatggttggaagtcttacagaaggtggggaaaagatcacaatttgttaggttagttatgaaatgttcagtaggccctcaaagtatgagcagtttaacttgagaatgttccaacactcgggtgactaattctattatgtgacataatctacattatggtggttaaaatctaaatatatccagcctttcctttgatcatttctatggttgagatagtaatagttgcatttagggtaaaaatatgagtgactgcttcagacttcagaactttctccagaagagctttgttcctacagttatttttagttatatttgctttacatgcttatatatgtgttttgggggctaaaatcctgttaagaatcatttctgtgtagtcagaatacatactaactttggtgttgatactacagaatagttatttgggcatggtgtccatctgtaaagctcagagaaacaaaaagtgtgtgtttgtttgtttttttaacctttcgtattacatatggatatgctgagctcattttgagttctgccacatggtaaagcaatataatttatttttacttatttatttattgagataggttctcgctttgttgctcaggcttggagtgcagtggtgctgtcatggctcactgcaatctctgcctcctgggctcaagatatcttcccacctcagcctcctgagtagctgggatgccaccatgcccagctaatttttgtatttttggtagagatggtgttttgccatattgctcaggctggtcttgaactcctgggctgaagccatcttacccgcctcagccttgcaaagtactgggattacaagtctaagccactgtgcctggcccaatattgtttttcaaaattattttattattttttgtccttttttgtttttaaatatttcttaattttatttttttcagtattgtttcttaagagtttacttacctgacacctgcaacctaatctttgccatagctctcaaaatgttctgtaagcactaatagtagtggggtttttttttatttgttttttgagacggggtctcactgtcaccaggctgaaatgcagtggcgtgatctcagctcactacaacctctgccttcctgggttcaaacaattctcctgccttagcctcccgagtaaggactacaggcgtgcgccaccatgtccagctaatttttgtgtttttagtggagatggggtttcaccatgttggccaggatggtctctatctcttgacctcgtgatccgcctgcctcagcctcccaaagtgctgggattacacgcatgagctaccgcaccccacctagtggtttgttaatagatgtttgttttgaggggactgcaaggttttgggaaaccaggttcagaatatcttttaccaaaggacttcttggaggcttaatgctgttttctatttttcccaaatttgtttaataatttacacgatagcatctcagaggacggtgtcctctggcttactctctgggaaaggctgttcttttggaaatctggagttctgagtgattcccatgtgttttctgctgcagagcaggaaatgctgaaggattccttcgtgagcagatgttagaggtttccttttgacaggtkgttacaaagttgatcacaaatatactatcacagtgagtggaaatcccaggttgggtgtgaaatagttgtttagaattgtgtacagttttcttttgttacctttaaagcttccgtagactgtttttggatcaggcagtaaaattgctataaaaagtacttcttttgtcataaaacctcatgatcagttttgraagtggaatgttaggtaacccagccaaatatttacatatacaaaataaacacaagwctgaaaaatagtaaatttttaacctttctcttgctgacaccaccggtcttttactagccaccaagtcatagttcttacgtttttcatagtttaatgttaaaatatctttaacgaagcctttactgattggggagaaatgacataactattgtgttttagtttttttttttgagacagagtctcactctgttgcccaggctggagtgcagtggcgcaatcttggctcactgcaacctatgcctcccgggttcaagccattctcctgcctcagcctcctgagtagctgggactataggcatgcgccaccatgcccagctaatttttgtatttttagtagagacagggtttcaccatgttggccaggctggtctcaaactcctggcctgaagtgatccacccacctgggcctcccaaagtgctgggattatggcatgagccactgcctggccaactattgtgctttagttttatgtgcttgtttataaaattgtgatgtttactcagtattcccataagcatgggaaaaggaagacaggtcattttttgttcaaaatcttatttgagagaaaaaaaagatcaaggaaaagatttggaagaaatttgcaaattcagaataaatatataaaaacatttttatcagccagatgtggttgctcacgcctgtaatcccagcactttcggaggccaaggcaggtggatcatctgagtcaggagtttgagaccagcctggccaacatggcaaaaccccgtctctactaaaaatacaaaaattagctgggcgtggtggtgggtgcctgtaatcccagctcatcgggaagctgaggcaggagaatcgcttgaacccaggaggtggaggttgcagtccagcctgggcaatagggcgagagtccgtctcaaattttttttttttttaatcagaacattttaaaatgtgattataaaattggccagtatagcttttcaacattttattgtaagaattctaagaatttaagttcatgaccttagtttaccacctagaatagagacaaatattttatgcataatgccattttcagttttaaaatctgttacgtagtttcttaattgattcttttttgccacagtgttattgttctcattattcaaatgagtaatttgaataagtcagcttgtgacctactcaaataaatcttctgattcctaataaagtgtctttcattataccaaagccagctatataagaggggattaaaagtactaagtactccattgattatcaaatgctaaccatggacttaatttatcagaggtttaaagcagcaaagagttgctgtggcaatagtgacctgaagacttcatgaagtaggtgagatcccagctgggcagtgaaatgtgagtgtcgggtttggtcagctggtggaggttgaaggaaaatgatttacataggtgaaaagtaaacacaatcagttatctaggaaagagaatgagatactcagagtataccagaccagtttgagctataacacaaggagggtaggactcatgtagaagagttttaggaaatagtgctgatgtaatatcttgtacttaaacaggtctgtggactggccacagatctttttttttttttttycccctctgctaagtagactatcaccctggctattcatctttctgtataactggttgagraacaggggagtgacagtaaagaaactattgtaaagtaaatctggtgacagcagaagagaatatgagacacattgtgctcacagagcctagaagagtgtgacagtagttgagggccacgctgttgtcttagagtgaagtgaggagaacctacattggtttggtagtcatgggagtggaaggaggaatgaaatgtgaaagctcattggaggcaaaatcaaaatggcttgctcttcatagtcaactattaagtgaggaggaggaattatttgctgacttgggaagaagtaaaagcttgccatctcaatcagggtaaagcttaagcattgtgtgattctagatagattattgagcagttttgttctatgtatttcatatcccatatcttctagttatgaccctacttctttatttcttgmcatagccaaacattttttaaattaacagctttattgtgatacagtttatatatgataaaacgcttcgaagtgtacaatttggtggttgttagtatattcacagagttgtgcagtcattactactacctaatttcagaacattttcatracttcaaaaagaaaccccgtactgattagcagtcactccctgtacccgtttcccccaccattgatcctggcaacctctcatctaatttttatctctgtagatttgcctatcttggacatttcatataartagaatcatataaaatgtggctttttgtgactggtgttttttacagtgatttttaaatcaaatatctgaagaggctaagcttaggatagtgtttgctgtacaactttggcaactgaacttttttaaagttgaaaatacagtattactgtgtccatatatatggcatgttatccttagatgacccttacttagatcattaatgtttttttccttagtattcttgaactgtctcagtattcagcaggaaccctttggaggcaaagagcagtaagaatttggaacacttgttgacaaaatgaatgtaatttaatacagaagtagaatcggccacttttaggtgtcgatgctgctgaaagtgtatattaaggaaaagtttagttatcttactttttgtataggtactagaactacttgtcttgtgttcaacaaacatttgtgtagttattacgtacttgtacaaatgcactttttgacctgaaaatccaaaaactccctttcttccccccacctcttaagactctgcatcctcaaaggaagagtggggtaccttaaaggaaaggtggttgtgactggataacaggtaaaatgtctactgtagacttccttttcccgaaacaagttcctgtctaccatcagcatttccaaaatttgaagattgtgtttgatgttaactcatcaaccgattattaagctttcagcaattgtggaaccaaaatctaaatgagtacctggatcttctaattctgttaaatcagtgagtgcacattatatacaatactcttttagcccagtaggagagttaaagagtggaagatagatttctatgtttcagaaatagaatacacamaaaaaaatttaatccyatgaaccttcgcctgaatttaaatttttggagagtttttcttttagattttctttcacttttagattaatctttcactttgaaaggtcccagggtttgggcaaagcaagtggggagagacacttgcttggattctccaggatgggggagatgaaaaggacttctttcccttattttattattaaatattgtcactrtaacaattattaatgttagtggtctacagtaaaagtttttagatgccttgtctgcaaagtaatttggttagttgacacaaagatgcctttggttaactggaatggaagatgtgcaggctagagtggtcttggcaagtcttctggggggaaatacagcatttggaagggtaggaagcagtaggaatctcaagcaagggaaaggcatgggcagagccccggaggacagaacaatttgtggtggacttggtgtccacacagacctaatcagtggtcttagcttttgtgttttcaaaattaccacagtttttgttctaaaactatcattcccttgattttttaaggcatgatatttatgtattttgaaatttaaaataacattgaaggagaaatgaaattttgtttgagaaagataaaggttaaaaatcgttatctaagtaatgattttctaatgggagatttggtacatccccagaagttatcttttgttcagagaatagtcttcaggcctagaaagagcttaagggagtcccagagagaagctccatggtcagaaccatttgattctcacaacagaatgggtaaaaacaatttgaaccataaaaccatacagatcttcatagcatggatagggtaaggtcagtgtcattgtcaggggaaaaactcatggctgtwacatgttcagatgtaaagaacacgtgaacgccatttaaggaaactgattcttctgcccctattctttggaatatttagggctaagttcttaattactgatatcatacaaatctgaaagtattatgttctaagaaccattagaaaaaattgactagaatttcagagggattacattagcrtgataacattagaatttttaaattacccatagtcctgtatccctaacaactgttgtcatgtttgcatgttattttctcatccttacttgtgtgcatattttcttggtaatggcacttagaaattgtttaaggaggaataattctcgagaattttgtatgactccttttttctttttaaggtatgtattgggtggaggagcattatgtatggaacttctcacaaaacaggtgacttttcttacgatactccattttcacccacaatttagtgttttgatcatgtaaattagattgtaagtagaaaattctttaatagctcctactcttaaattttagtttatttttaaaatagygtctactttcaagaatgaaaaaggtaaaccaataaaatgacattgtacttggtgctgaatctatgctaggataggcattaagagtgacctttatttaaggttctaatttgctcatgttgggcacttagaacattggtttgttgtttttttttgtgagattctggaaatgttccaattttactttttccccttgactacagtctttttaacactgatttgctgctgttgagttatataccattttgttaggccttcccaagtgggaatcagaaatactactgtattttagagatactttgttcttctgtagggctggagcagtgcctactcaatagaatcggtcatcatgcaaataaatgccaccttagtcaaaggcaaagccagagtgcagtttggagcaaataaggtacttctgttaagaattttacataaaccataagatacattttatattactttataagctttcttcctgtcttgacttaattcttttttgagatagtttcattttcatttggtttgttttcttcttgttacaaaagtgatctatagaaaatatggaattataagaaaattaaagatactaattgataatcacttaatgatttcgtatctgtttttagtctgttatatttgctgtagataaacattataagtttacagttgtaaacaaaaacttatttgtaaacagatgtttacagttgtaaacttattattagtatgtatagtgtagtaaattaaaaattatatgtactttgaagttttaaaaaattgagttcatgttatagaactaattcctggtaagcttttatgtgctaggctctagtcttttcatttatttttacttttttttttctctgtgcctatgcttaccaagttttttttttttaaatctttttattaactcaatcctcttaataacttaaaaartaggtgctattattatctgcattttgtagatgaggtaactgaagcatacagaagttagttagataacttgtctgaggtgacaagtggcagaacaaggattggaactagacagtctggctgccctaggcccaaccaagaggagctgagagcaagccatgggacataaggatgttgttcaggctggttttcttttcagttaacctgaagcataggctgtaatgttaattttaggacattagtgagacagccttccaaagccggaggtttgttaccatgacttttagcaagaatttgtggtttaaaggcaagatggtgctttatgaagcttccattcactatggagggaatggtagttgagttaaatagtgaaatcctggagcacacagtctttagggcagcttctgacctatttctatgatcaggaaaggcatctgtctttccctgctgcccataacctccacttattctcccacagaatcccctagactgtgatcacattcagaagagagatctgttttgttttttccagggtaggaggaagtgagtcactacctatactaagcagtctagtcttctgtgtataaatgagcaagggtggggagccagatctcttggagaatctcaggattgtgcaagatggtaaagtggtctcatgttagttgtatccacagctgtcatcagaagcagacacagatactttttgtaggaaagcatctctaatttaagcctgtaggattcccaaagattaaaagaattcactcaaatcatagcattcaaatagtcaacccaacatatttgagaattgtcagaaataataaataatagatatgtttcccaaggacagtaggttttggaattatyagatacagaacacagacttcagatattagaattgtgagaaaatagttatatgtgaaatctaatataaagaaaaaaagatggaatcataaaattgagcaagcagcaagaccaccaggaatgatgaagaagacctgaaaagaaaatggatgaaatagaacttacagaaattaaaaaatgtagatgggtatggtggctcacgcctgtaatctcaacactttgggaggccgaggcaggaggatggcttgagcccaggagttggagaccagcctggggaacatggtgagaactcgtctacacaaaaaatacgccccccaccctaaaaaaacaattagctgggtatggggtacctgtctatagtctcagctactcaggaggctgagrtgggaagatcacttgagcccaggagaccgaggctgcactgaggcatgtttgcgcactccagccttggtgacagtgagactctgtctcaaaataaaaaatgtaattgttgaaataagaaactcagtagattagacaccagaagagaattaattgattagatgattatctcaaaaaaataagttagaatgttacacagagagacatgaggatagatgatagggcagaagttggtggggttggtggggagagatcagaatgaggtctaaaatatgtcttagtggaatcccaggaggagatattagaattacactagaaagtgagagaaatagaagttgtaaaggtgatagaagcaagtctatataaatcagtcacaacaaatgtaaatggactaaagttaccagttagattgaattaataaaatccagctgttttaatctatatatttaaaatatgaaggtacaaaaaggttgaaagtttttataaaggagagtgataaagatatgccagtatacattaactagaaacaaatgatgcagctttagtatcaaacaaaataggattctggaacagaaagcattagtaacaatttgataataagtgttaattaggaggatatagcaatttttgtattttatgtacctatcagaatagcctcaaaatacccaggaaaaactgataaaaccacagggagaagttgacaagtccaccatcacagttggagatttcaacataccctgygtactactagtaagataaacagaatgcccatatgtagatttgaacaaccagtgaacaggcatggtataatagacaaatatagacctctgtacccaataattagatatagatcgttctcaagcatatatggactatgggagaaaaattaattatagatccataaaatcagacgatttaaaaacagttggtaccatacataccatataatttaaatatgaagcaattaaggttagaaggcaataatgaagagattaacaaaaagctatgtgaatttggaaattaaacacacttgtaaatcatagttttaaaaagtaaaatgaaattttaaaatgcttagaattgaaccataattaaaattactaaaattctatctattcctttctcccctcctctccctccctcttcctgtctggaacattcaagaagctaatctttttcaatgaacaacacttcaaatactgaaaaacagaaaaggacagtgtcatwctctgatcttagttaaatctataagttaataataaaaccagaaaacagatacttctttctggaattgtataactcatgcaaacagcctttaggtcaaacagggatttgaaattaaaactgcagaatatctagagaatagcaataatgcaatcattacttatcagagactaaaggagagctcagaggaatgttcattgccaaatccttgtgccattaagaaaagaatgaaaatgaatcaagcctctgattgttagaaaggacaataaaaaaaacctgaaggaggccagggacagtggctyactcctataatcctagcactttggtaggctgagatgagtggatggcctgagctcaggagttcgagaccaccttgggcaacatggtgaaaccaatctctgtaaaaaaaacaaaacaaaacaaaacatgaaaattagctgggcatcgtggcaggcgcctgtagtcccaactactcaggaggctgaggtaggagaattccttgaacccaggaggtgaaggttgcagtgagctgagatccagccactgcactctagtctgagtgacagagcaagactccatctcttaaaagaacctgaaggaaagcagaatggggaaattattaaagatatacaagcagaaatcagtgagttagaagaataggaagggctagacccccagtacagtaaagtctctgcagaaacatttgtttaaactgggctttgagtaccttgctactgataattgagactggggaaggccaacattcnnnnnnnnnnnnnnnnnnnnnnnnnnnnnnnnnnnnnnnnnnnnnnnnnnnnnnnnnnnnnnnnnnnnnnnnnnnnnnnnnnnnnnnnnnnnnnnnnnnnnnnnnnnnnnnnnnnnnnnnnnnnnnnnnnnnnnnnnnnnnnnnnnnnnnnnnnnnnnnnnnnnnnnnnnnnnnnnnnnnnnnnnnnnnnnnnnnnnnnnnnnnnnnnnnnnnnnnnnnnnnnnnnnnnnnnnnnnnnnnnnnnnnnnnnnnnnnnnnnnnnnnnnnnnnnnnnnnnnnnnnnnnnnnnnnnnnnnnnnnnnnnnnnnnnnnnnnnnnnnnnnnnnnnnnnnnnnnnnnnnnnnnnnnnnnnnnnnnnnnnnnnnnnnnnnnnnnnnnnnnnnnnnnnnnnnnnnnnnnnnnnnnnnnnnnnnnnnnnnnnnnnnnnnnnnnnnnnnnnnnnnnnnnnnnnnnnnnnnnnnnnnnnnnnnnnnnnnnnnnnnnnnnnnnnnnnnnnnnnnnnnnnnnnnnnnnnnnnnnnnnnnnnnnnnnnnnnnnnnnnnnnnnnnnnnnnnnnnnnnnnnnnnnnnnnnnnnnnnnnnnnnnnnnnnnnnnnnnnnnnnnnnnnnnnnnnnnnnnnnnnnnnnnnnnnnnnnnnnnnnnnnnnnnnnnnnnnnnnnnnnnnnnnnnnnnnnnnnnnnnnnnnnnnnnnnnnnnnnnnnnnnnnnnnnnnnnnnnnnnnnnnnnnnnnnnnnnnnnnnnnnnnnnnnnnnnnnnnnnnnnnnnnnnnnnnnnnnnnnnnnnnnnnnnnnnnnnnnnnnnnnnnnnnnnnnnnnnacaggtgtgccccaccacgcctggctaatttggtatttttgtagagacggggtttctccgtgttggtcaggctggtcttgaactcccagcctcaggtgatctacctgcctcagcctctaaaagtactgggattacaggtgtgagccaccgtgcctggccggctttactattttaaagagctcttagatgttgaaaaagactaccctgtagaaaaataggaaaagtccttacataaatttaacatgttaaaaaaaaataggaaaagggggtataaaaagtctgtttacagaaatagaaataaatggctcatgaacataatggagacatgctcagtctcactcaatagaaatacaaatcaaaactatactgggagtccatctagtatattgtcagaaatctacaaatgtttgaagtactgcattggtgaggctgcatcgaggcactcttacagatggctggtgggcagacacatttgtgcagttatgtagagggcaatttagcaatatctcagaattacacatatatatcttttgacacagcagctctactctaggacatttttaccagtactcagcagatatacgtacaaggttgctcttggcaacattataacagcaaaatattgagaaaccctgatgtccaccaataggggactgattaaatatttgaatatccatataatagaaatatttcagtgtttaaaacaggtatgttctatactgataaggaacattctccaagatatgctagacaagaaaaggggcagaccagtgtctgtagcatgcaactgttagtgaaggaaagccagggacagtggctaataacagtgggctgtacatgaataatcttaaagagggacatacaagaaattagtaatagtggttaacttgtgtggaggaagggggatgaacgggaggaaactgggtgttcagggcaccaagtaggagggagagttttcacttaggatgtagacatttttgagtcttgtgctgtgtgaatttattatgcaaaaatttctgccacataatatagtggatagatgggtaccactatggagagtgctcctggtatattaattcgaagcgaagatataggttggttgtacttatggtgacaaaattaatcctagatttggctccttaaaaagattgtatatttttatcaaaagagggctcctttagtaagcatggtgacaattatgggcattctttagatttctaacttaaaatgtcattcatatgtatagttgtggaagcttaatattttcttatctgaaagtaatattttgtagtttttttaaaaatagaaattgtgtgaagacagtttgagttttattaacatccagatataatcctttaacttgattcagcaatatggagacggactctagaaccagaaagctttgtacttgtccaatggtaggaagacttataaaaatgaactktgaggcttgttgagttttattggggtacaattttggttttgttatttttataaaattgtagagaataatgaaactgagaaatgaggctattaagttaaaattgtttttgaaatggagatagtcagtttcccatgttcttttaagcacagtgtgatgcattcataaatttattgtaataattttcacctaattacacttttgatttaaaatgtgtaattctctttcagaatcaatataatctagcaagagcccaacaatcctataattccattgtacagatacatgagaaaaatggtatgtttaattcaataagtgtttattgccatttaagaagttttagataatgtattaatacttaccattttatttttctgtttttgctttagtttcttaaaatgctgttaccatggtgaaagaaacttgtgctgcatacaaaatctttatttatttatttatttattttattttattttattttatttgttttttgagacggagtctcgctctgtcaccccrgctggagtgcagtggcactatctcagctcactgccagctccgcctcccaggttcatgccattctcctgcctcagcctcccgagtagctgggactacaggtgccttttttgtatttttagtagagaccgggtttccctgtgttagccaggatggtctcgatctcctgactttgtgatccgcccgcctcggcctcccaaagtactgggattacaggtgtaagccactgcaccacaaaaccttaacattgtacttcagtcaaaatttttgtatcctatacacttggcctaggtatctcagagtcagaatcaagatttctttttttttttttttagtagattaatgaatgactcactttacttacttgaaatattaggaactgagttaaaggcaactccttacagatggagttcttgttgttataactggagtgcagtggttgtttacaggcgtgatcatagtggactgcagcctcaagytcctgggctgatgtgatcctcctgcctcagtctccycagtagcttggactgtaggcacaagccaccatgcctgtaaagtattctttactttgctagaaatgtgtcagtttgtgacttaagatttgtgttttgtgctcatttattttaatgacaaagcaaacttgtcactctttcagtgattgcttacttatggaaatagtattcaaaacaaaattttcaagcagaagagagaaacgataaaatttgaggacaaggccaggttttcataataataatttctagcacacaaaattagatccaaagaaacctgtgtactactttgatactttatagatcttggcatattcatactattctaaagtttcatactaaacagtacttagtctaatttgcctttttatagagagcttaggtttttgcggaacctgggacacagatttcttcttatctttgtttttatttcttaaccattacaactggcattcaaaaaatatttatagaaaatgctgtatttgagagtgtgtgggtatgtgtaagcttagctgtgatgaaagagtaatagagtcagaagcaggggagatgacttctagggttttgtttttttttaaatcttaaaatttttttgttattttaaaaaaatagatattatacttactgtgtacaaagttttgaagtatacataactgtggaatgactaaatctagctaattaacctaggcatcaccttacatagttatcatttttatggtgagacactttacatccactcttaacatttttcaagaatatagtatattgttaactayagtcaccatgttgtacaatagctcaagatggattctagtttggcctgctactaactctgattttaggcatagtcatttagtcattgcacctgctgcgatggcttccttgtcattgtgaaatgacgttatggctccgataacagtccaagttccttgtattctaaatcgccaggattttgtttggggaaataagtactttccatgaggcttactttcaagtatagaactgaagtggaataaaacttattcttttagtctaatattccacagtcatctttagctagagatgccattaatacagagctcttgtgttgaaaactcaggtacaatttattcatagaaaataactttctgttgtgaaatagcaaaatgcagtgttcccaatccaagtgtaagtttaatttttagagtagactgggtgcagtggctcacacctgtaatcccagcrctttggggaggtggaggtgggtggatcacctgaggtcattagttggagaccagcctgaccaacatggtgaaaccctgtctctactaaataccaaaaaaaaaaaaaaaaaaaaaattagtggggcatagtggcgcatgcctataatcccagctacttgggaggctgaggcaggagaattgcttgatctgggaggtggaggttgcagtgagctgagtktgcgccattgcactccagcctaggtaacagagtgaaactctgtctcaaaaaatatatatataatatatatatatwttttttacggtagattttaaacaccaaaattatgaaaagagactgtagctaaccttattacatgccagttcttctaatttatttaagaattattttaactttttttttttcattctatttcaggctggtacacccctccaaaggaagatggctaaatrtgttgactgttgtatgtttggactaatgttgctttaaagaaaatctttcyaacatgcagacaaaagctttgagtgcccctattacagcagtaccgaagatgttagttaatagatattttagtggataatctgtcatctgacatccagtataagttacagccttygcattttgctcattttagatatcttggactgagcagtggggcctttactgtatttttcctgataaatacacatactggccactccttatctctttttcttgaaaagtgaactttttaaagcagccaagtcaacatcaggctactgaagttgaggctttagggtaactttcctatattgagcccatgggttacaaggatttgcaatatattgttccatttacagccaatacaggtttaatcgatgttcaatattggtttaggaaatttaaggccttctaaatcataatagctctttcatgtctaaaaccattttatgatattgccaaaatgtgataggaaacctactcattaaattgttaaactttttaatgactatgtgaagatatgaattgtttcctgaagataatactcttaattgagttgtattgtacttcttaggcaaagcagtgtaaaactgtatcaattaaggcttgtgagtagtgatttccactggggcatcagagtcttggctgggctgaatctgctgcttgttggttcagtgtttcttatgaacaagagccacagtacagagcttcaagttatttaaaatactaagtcatcttacgtttccattttattaacgggatgttgcaatcgtttgtaaactaataaacttataaagtgattggcacaaagactccttgagcaaaagctgtgcagttaagtacaaaaagatacttaatttggagactcttacagtaatttttgccatgtcaaaacaatggcttttacattgaaagattaatagaaactctacatatgttaatttttttatagaacctgactcaaatcaaggtactctccattttattgccttacctgaatcagtcctttttggttggtaatagatttttttatacacccacgtttgatttaaaagtaaattctagttcttaagcacttttaacaagaaatccagaagcacatttttctgcacaaacaagttacaaagttcaaaagtgtttcttgtgcattagctttgagattcagtttttaactttgtaaaccacatctgagagacttgtcatttctacattgtgtgtgtttaatttcttttgattccattttggttaagagagcagtaaatagattttctggtattcttgttcacttgattacatttgtataaagttctgattgccagttgctcagataacaagtgacaaggcagaattctttaaatcagtaaagttccttaagcctaaggctaaatcttgaatacattgttgaattctttaatatcctgatggcaagcagactgatagctgcacatttggcatgctttgtttaatggattttatttttaattgcagatttatttggcaatgtacagtaaattttgtaaacttgcatcaagtttatgaataaagaaccatttaaaaattttgtttgtgctgatcatggcaagcaaaaaaaagattactttctcatttttccctcataagaaaactctgcttgatgtgtttgtaggctttattgagtttctggaataagatatttaaggagggaagtggtgaggggaggcttggaagacaggcagatttaacaagagaaagtgaaagtgtgaaagaacctggaaatagtctgtacaatagtcaccttttcctccgcctttttcctcttccattctcattataaattcaagtgctactttttccttatggctatccttagttcccccagtgaaaataatctgctccttccttagcatacccatggcctccttgcacacaattgacagattatttcacatacaagaagtccagaggtaggacaactccaggtactgtacatctgggctttgctctgcttccttgagatttttctatgttggtttcatcttttggttgcatgttatgtgcagcccccttacttgatccagaggtagataaatgcccctgtcttctagtgtctccttaggaggtgaggaaatctctaaaagcaccatcccatcaagcacactgcctcttgcctttccttggctacatcagggacctgtgcccacccctaaaccaatggtggtgaaaagaatgaaaccatcgtgattagtttgcacaaatggttctcaaagccttatttggggaacactggagacccctgagaccatttcaagaggttttaaaagactattttcataatattaaaacatttgccattttcactcattcttccatgtgtacaatggaattttccagaggctacatgatgtgattttgcaacagattgaattcagaagcaaatatgagaatctatttgtcttctattaagacaaattaaatatttccaaaaatgtagtgatgctgtcactggtaaactgtcctctttccctactttatatcagccacaaagaaagaacgcccactttgaaaggcagtcaggtttcattcagtagccagagaatggagaaggggagctcatactctaaaggcaccttctcccagagggatgggaggctggggagtttaaagagttagctgaggggcaggggaggtatgaacggcatgcacagactggagttccagacaagcaggcatagtccctgaacatgctgcttcatacatccatgttcgtaagatgccagtgagctttctttagggagaggattttagcattatgttaattatctaaaggtaactggagggcgcctgtttatcttcctctggtattccgcaaggggtcaggaagctctggtgacatctgggccatctggcttccttaagcagctgcgcctataaatagactatggaaaaaaactggctgggcttggtggctcatacctgtaatctcaacgctttgggaggcggaggcagagggatgtcttgaggccaggagtttgagaccagcctgggcaacatagaccctgggtctaccaaaaaaaagaaaaaaaccacagctactcaggaggcttatgccactgacaatgtcatactatccaccagtgggggaaggaggatttgggaaataattgttttccataaaaatatttcgttaatgtataacatcggttttttaaaaagagttaagcattaagatgttctgatttaatttttaatatggtaaatattgatagtcataacacacataaactattggtcgtgtcaatattttagggtgtaaagggtcctgaggccataatgagaactgctaatttagaccaagtttctgcccaagatctggcgatcaaatcagggctcccttaggaaggaattggcgggaggaatggatgttaggtggggacaaacctgtgtctgctgtgcttccatttcttggtggttctcagtttgagcatgcatcagaatcgtcataaagtgtgttaaaacagattgctgggcctcacccccagtgtctgattcaggaggtctgggataaggaccgggaatgtgctaaaacttagtagtttccaggtgaatctgatgtccctggcggggaactggtgcacagcttggggcgtgcttcacagcaatcatctcactcagctaccttagaatggcaggtgctatttatgccattttactcattcgaaactttaaacctgaagattacaacgagttaactaagtttacaaggaataaaggcagtgattttcacacactaagaattttttaaaagcaaacgtccgtttataaatcgagcttatgctatttaaacaggcattgggactacgaagagcaataagtactacctagtccctgcaaggaatttgtgaattagagaaagatgtaaactcagaaatatggcggtgccagggcagtgagaggcacaggcacagaagaagaatttattttcactgcaggaggcctcctagaaagttgccaggagcggtggcttatgtctgtaattccagcaccttgggaggcccaggcgggagtatcgcttgagccctggagtttcagaccagcctggaaacccgtctctacaaaaaatacaaaaattagctgggcgtggtggcgggagcttgtggttaaagctacgagggaggctgaggcgggaggatcgcttgagcctgggaggtagaagctgcagtgagcagaggccgcgccactccactcccgcctggccacagcattagacccaatctcaaaaatgaagaaaacagttccgagcgtattacggaacggagtacacctcggagtacgggctccagacgagggaacgcaccggcgttgccacgcccaccttccccgtccagccggaagtggcgcggacgcctgctcagtgcgcgccggccgggcaaccctatgctggcgtaatcgggttcctccgagccgccgtaggactggttccggcgggctggtgaggaatggagccggtaggctgctgcggcgagtgccgcggctcctccgtagacccgcggagcaccttcgtgttgagtaacctggcggaggtggtggagcgtgtgctcaccttcctgcccgccaaggcgttgctgcgggtggcctggtgaggagaggaggcggaggcgggaagcttgcctggggacacgccgtgggcatgtcccaggctggcggggtggggggagagacccttgggacccaccagggccgtccccggctcgctcgccctacctgaggtgaccccctacccgcgaggtatctcccagccgtggtgccccggggggacttccctgaggggcgaagttccccttaaggttttctccatatctggctctccttccgaactagcgccctgactgacacctacctatcccggggactttggatcccgcagggatctcctgctgctgcgccagcgggtgggggtttgtgagctgtgggagagacgaaaatgaacgtccgttcgcaatcctttgtgcgtttgcgtcctcagcgtgtgccgcttatggagggagtgtgtgcgcagagtattgcggacccatcggagcgtaacctggatctccgcaggcctggcggaggccggccacctggaggggcattgcttggttcgcgtggtagcagaggagcttgaggcaagtagcaaggggtgtcatgcacagtcatttgcaggttggtggttcagtctttgagaactatttttttttaaatcccagttttgttaattaaaggaacatcttctcgttccgtgaaaagattttgtaaacatcagttttagtgactacacggtaaggatgtgtcatgatttatttgaccgttcatcaaatgttgggccttttttttttttttttgagacgtagtctcgctctgtggcccaggctggagtgcagtggcgcgatctcggctcaccgcaagctccgcctcccgggttcacgccattctcctgcctcagcctcccgagtagctgggactacaggcgcccgccaccatgcccagctaattttttgtatttttagtagagatggggtttcaccgtgttagccagaatggtctcgatctcctgacctcgtgatccgcccgcctcggcctcccaaagtgctgggattacaggcgtgagccaccgcgcccggcatgttgggccttttaagtatccacattttcactattaacaacaacgctgtgcagaaccttcccttcacctgcttcccttgaagcaactttttgttgtctgttttaccgggaagacaactgggtgtgtcttgctcagtgagcacacctagaaagccaagaaccaaaacttaaagccaaatatttcaacttctgatcctgtactcttttgcttctctggcccccaacttcaaaaggggagccaacaccaggagagatgaagactcgaactgtggagtcagaggggctgcagggtgtaccatctctggggagtggaagggaaccatttgacagtaaagtgccaacctgctgctctgtcactctgtttactttagtacggcttacagacagacataactacggtgcagccgtcacaatcaggaaattatcactgatacatttctaccattttatcctcagactcggttcagattttgccagttgtcccagtaaggttcttcatggcaaaaagatctgttcccaattgcaatttgctctgagtaagtcctgtttctttaatctcctttgatctggaacagtttctcaagctttgcttgatttttcccaatcttgacacttaggaaaatcacaggctattttgtagaacatccatcaattgtgtctttggcaggaaataatcacagaagtgatgctgtgcttttttcacggcatactttaggtggcatgtgatttccattcgtcttgttattggtggtattacctttgattactcaattaaggcgatgcttgccaagtgtcttcactaaaatcactcttctactgtaatgattgttttgtgaagagatcatttgaaactatgtaaatatcgtgtttcaattcatttatttatttatatctgtacactctcggagtcttatttaattcagtgggatataatctgttactgtattttggtgctcaaattacccctctcaccccctagtttggctagtaggagctccttcaggctggcttcagtgtctttttagagatgactccattatctttgagcacttttcttgttttctggcacaagatgttctaagcttgtcttgggttttacctgccttggtcctggaattggccattaagccctggctccttttgatggagtgtggtatttagaaatcaaggtctagactctctaagtgtactccttgccattgagggatttgctgctccaaagcccagtcattagagccaaggaatataagtatgtatatacatgcatgtgtatgtatatacattagtatatacatatacacacatttacaattatatttctatatatatgtggaggctcatgagttcacacaggtgcatccttttcgaatcaaacgcaggatgctttctagttttgtctctgctcatatttgtacctcccttttgggcaaagggaaacctggttctcatcattcttaatgtatttagatattacatcaatgccccatatgtaaccaatcttctgtttcccccttccttgggtggtctttctccttaccttgtttgggctctggaactctcattccagggagctggccagtatccaaaggcaggcttgtagaaaacttttcttctctggcactttgtctcaactcttcccattttcccagaagtttatcatttggaaaaattcaaaatgcaagcagatttcctcgaaagtgttctctggagcatcgtttataataagggatactaaaaacctaatgttaatctaataaataaagctattaaattatagactgcaaatgcattaatgacaagagaaaatgttgattttaaaagtgaaaacagattatgaaattatatatttagtatcatctgaattattaaagacaaaaaagggagagtagaaaagaaagccaaaatgttagctttt
